(19) United States
(12) Patent Application Publication
(10) Pub. No.: US 2026/0193644 A1
(43) Pub. Date: Jul. 9, 2026

(54) Compositions and Methods For Modulation of Tumor Suppressors and Oncogenes

(71) Applicant: FLAGSHIP PIONEERING INNOVATIONS VII, LLC, Cambridge, MA (US)

(72) Inventors: Vinidhra Mani, Brookline, MA (US); Erica Gabrielle Weinstein, Newton, MA (US); Yann Paul Guy Régis Echelard, Jamaica Plain, MA (US); Avak Kahvejian, Lexington, MA (US); Patrick Shannon Pendergrast, Cambridge, MA (US); Tamara Ouspenskaia, Belmont, MA (US); Gabriel Humphrey Billings, Somerville, MA (US); Shruthi Hamsanathan, Cambridge, MA (US); Tao Fang, Cambridge, MA (US)

(21) Appl. No.: 18/868,916

(22) PCT Filed: May 25, 2023
(86) PCT No.: PCT/US2023/067464

§ 371 Date: Nov. 25, 2024

Related U.S. Application Data
(60) Provisional application No. 63/345,756, filed on May 25, 2022.

(51) Int. Cl. C12N 15/11; A61K 38/17; A61P 35/00; G01N 33/575

(52) U.S. Cl. CPC C12N 15/11; A61K 38/1709; A61P 35/00; G01N 33/5758; C12N 2310/20

(57) ABSTRACT

The disclosure provides, in various embodiments, compositions, such as polypeptides, polynucleotides, gene editing system, small molecules, vectors or host cells, that comprises and/or modulate expression or activity of cancer-associated proteins. The disclosure also provides, in various embodiments, methods of treating cancer using an agent that comprises and/or modulates expression or activity of a cancer-associated protein and methods of identifying said agent.

### INCORPORATION BY REFERENCE OF MATERIAL

[0001] This application claims the benefit of U.S. Provisional Application No. 63/345,756, filed on May 25, 2022. The entire teachings of the above application are incorporated herein by reference.

### INCORPORATION BY REFERENCE OF MATERIAL IN XML

[0002] This application incorporates by reference the Sequence Listing contained in the following eXtensible Markup Language (XML) file being submitted concurrently herewith:
[0003] a) File name: 57081026002.xml; created May 23, 2023, 54,371,388 Bytes in size.

### BACKGROUND

[0004] Cancer is the second leading cause of death globally, accounting for an estimated 9.6 million deaths, or one in six deaths, in 2018 (www.who.int/health-topics/cancer). Cancer is caused by harmful genomic changes such as mutations that alter gene function and contribute to the malignant behavior of cancer cells. Considering the prevalence of cancer globally, and the limited efficacy of currently available therapeutics, there is a critical need to identify additional and novel therapeutic targets for the treatment of different cancers.

### SUMMARY

[0005] The disclosure provided herein is based, in part, on the identification of non-canonical protein targets (e.g., proteins encoded by non-canonical open reading frames (ORFs)) for the treatment of cancer.

[0006] In one aspect, the present disclosure relates to an agent that comprises and/or modulates (e.g., increases or decreases) the expression and/or activity of a target protein identified herein (e.g., a target protein listed in the Sequence Listing, in Table A, or a variant of the foregoing). In some embodiments, the agent comprises a target protein identified herein (e.g., a target protein listed in the Sequence Listing, in Table A, or a variant of the foregoing). In certain embodiments, the agent modulates (e.g., increases or decreases) the expression and/or activity of a target protein identified herein (e.g., a target protein listed in the Sequence Listing, in Table A, or a variant of the foregoing). In some embodiments, the agent comprises, consists essentially of, or consists of a polypeptide, a polynucleotide, a gene editing system, a small molecule, or a cell (e.g., a cell therapy). The agent can be an inhibitor or an activator of a target protein identified herein. In some embodiments, the agent modulates the expression of a target protein identified herein. In some embodiments, the agent modulates the activity of a target protein identified herein.

[0007] In another aspect, the disclosure provides a pharmaceutical composition comprising a target protein identified herein, and a pharmaceutically acceptable carrier.

[0008] In another aspect, the disclosure provides a pharmaceutical composition comprising an agent that modulates the expression or activity of a target protein identified herein, and a pharmaceutically acceptable carrier.

[0009] In other aspects, the disclosure relates to a polynucleotide encoding a polypeptide described herein, an expression vector comprising a polynucleotide encoding a polypeptide described herein, and a host cell comprising a polynucleotide encoding a polypeptide described herein.

[0010] In another aspect, the disclosure provides a method of detecting a cancer or determining a likelihood of developing cancer in a subject, comprising quantifying an expression or activity of a target protein in a sample from the subject, wherein the level of expression or activity of the target protein in the sample is indicative of the likelihood of developing cancer in the subject.

[0011] In another aspect, the disclosure provides a method of preparing a sample that is useful for determining a likelihood of developing cancer in a subject, comprising:
[0012] a) obtaining or having obtained a sample from the subject;
[0013] b) adding a protease inhibitor, a control peptide, a standard peptide, or a combination thereof to the sample to prepare a sample that is useful for detecting a likelihood of developing cancer; and
[0014] c) quantifying an expression or activity of a target protein in the sample prepared in step b).

[0015] In some embodiments, the method further comprises treating a subject who is predicted to have a likelihood of developing cancer, comprising administering to the subject an effective amount of an agent that comprises and/or modulates the expression or activity of the target protein identified herein, or a pharmaceutical composition comprising the agent.

[0016] In another aspect, the disclosure provides a method of treating a cancer in a subject in need thereof (e.g., a human subject having a cancer), comprising administering to the subject an effective amount of an agent that comprises and/or modulates the expression or activity of a target protein identified herein, or a pharmaceutical composition comprising the agent.

[0017] In another aspect, the disclosure provides a method of modulating the expression or activity of a target protein identified in the Sequence Listing, in Table A, or a variant of the foregoing in a cell (e.g., a cancer cell, such as a cancer cell in a subject), comprising contacting the cell (e.g., in vitro, ex vivo, or in vivo) with an agent that comprises and/or modulates the expression or activity of a target protein identified herein, or a pharmaceutical composition comprising the agent.

[0018] In another aspect, the disclosure provides a method of identifying an agent that modulates the expression or activity of a target protein identified herein, comprising:
[0019] a) contacting the target protein with an agent; and
[0020] b) determining whether the agent modulates the expression or activity of the target protein,
   wherein a difference in the expression or activity of the target protein that has been contacted with the agent compared to a reference for the expression or activity of the target protein indicates that the agent modulates the expression or activity of the target protein.

### BRIEF DESCRIPTION OF THE DRAWINGS

[0021] The foregoing will be apparent from the following more particular description of example embodiments, as illustrated in the accompanying drawings in which like reference characters refer to the same parts throughout the different views. The drawings are not necessarily to scale, emphasis instead being placed upon illustrating embodiments.

[0022] FIG. 1 shows a bar graph showing relative apoptosis in HCT-116 cells treated with vehicle control, SEQ ID NO: 37997 protein, staurosporine (positive control) and irrelevant peptide. *pvalue<0.05, ***pvalue<0.001, ****pvalue<0.0001 vs. vehicle control, one way ANOVA, Dunnett's multiple comparison test.

[0023] FIG. 2 shows a bar graph showing relative apoptosis in U2OS cells treated with vehicle control, SEQ ID NO: 37997 protein, staurosporine (positive control) and irrelevant peptide. *pvalue<0.05, ***pvalue<0.001, ****pvalue<0.0001 vs. vehicle control, one way ANOVA, Dunnett's multiple comparison test.

[0024] FIG. 3 shows target proteins SEQ ID NO: 27301 and SEQ ID NO: 30462, and myc-positive control are over-expressed in stable cell lines. Left: Western blot of 50 μg of protein extract from stable cell lines with empty vector (Control Vector), target protein SEQ ID NO: 27301, SEQ ID NO: 30462, and myc-positive control. Left (top): anti-myc-tag antibody immunoblot. Left (bottom): anti-GAPDH (loading control). Right: graph of relative expression of control, SEQ ID NO: 27301, SEQ ID NO: 30462, and myc-positive control normalized to GAPDH.

[0025] FIGS. 4A and 4B show SEQ ID NO: 27301 over-expression increases proliferation of HCT116 colon cancer cell line. The results of a WST-1 proliferation assay on HCT116 cells stably expressing Target Protein and control vectors under low serum (FIG. 4A) and high serum (FIG. 4B) conditions. Compared to Empty Vector (control) published oncoprotein AP2A significantly increases proliferation in the low serum condition, but not the high serum condition. However, the target protein SEQ ID NO: 27301 significantly increases proliferation under both low and high conditions.

[0026] FIG. 5 shows SEQ ID NO: 30462 over-expression increases proliferation of HCT116 colon cancer cell line over time. The results of a Maestro Z impedance-based assay on HCT116 cells stably expressing Target Protein and control vectors. Compared to Empty Vector (control) published oncoprotein AP2A significantly increases proliferation. The target protein, SEQ ID NO: 30462, significantly increases proliferation.

[0027] FIG. 6 shows SEQ ID NO: 37997 protein decreases proliferation of HCT116 colon cancer cell line. The results of a WST-1 proliferation assay on HCT116 cells treated with test peptide and control peptide in the presence of 10% serum. Compared to an irrelevant peptide or untreated cells, the target protein significantly decreases proliferation over the course of 48 hours.

[0028] FIG. 7 shows a bar graph showing agonism presented as % activity (top) and antagonism presented as % inhibition (bottom) for a pool of 9 peptides, including target proteins SEQ ID NO: 30949 and SEQ ID NO: 34229 tested against 168 GPCR targets. % activity refers to β-arrestin recruitment compared to a known agonist at EC80 concentration. % inhibition refers to decrease in β-arrestin recruitment induced by agonist at EC80 concentration. CXCR4 (black) showed a significant GPCR antagonist activity, as evidenced by the percent inhibition and suppression of agonist activity against the peptide pool. C3AR1 (black) showed a strong agonism when compared to a known agonist and demonstrated a significant fold change with respect to basal activity (black dot).

[0029] FIG. 8 shows a bar graph showing % inhibition for the target protein, SEQ ID NO: 30949 tested on PathHunter® β-Arrestin cell line for CXCR4 human chemokine GPCR antagonist assay. Target protein SEQ ID NO: 30949, in black showed significant inhibition (~80%) at both 1 μM and 0.3 μM when compared to Irrelevant peptide, irrelevant scrambled peptide, peptide pool with irrelevant peptides and target protein, SEQ ID NO: 30949 in gray. *pvalue<0.05, ***pvalue<0.001, ****pvalue<0.0001 vs. irrelevant scrambled peptide_1 uM, one way ANOVA, Dunnett's multiple comparison test.

[0030] FIG. 9 shows a bar graph showing % activity for the target protein, SEQ ID NO: 34229 tested on PathHunter® β-Arrestin cell line for C3AR1 human complement GPCR antagonist assay. Target protein SEQ ID NO: 34229, in black showed significant activity at both 1 μM and 0.3 μM when compared to Irrelevant peptide, irrelevant scrambled peptide, peptide pool with irrelevant peptides and target protein, SEQ ID NO: 34229 in gray. % activity for C3AR1 is with respect to known agonist, C3A Receptor Agonist *pvalue<0.05, ***pvalue<0.001, ****pvalue<0.0001 vs. irrelevant scrambled peptide_1 uM, one way ANOVA, Dunnett's multiple comparison test.

[0031] FIG. 10 shows quantification of the chemotactic response of NAMALWA cells migrating towards SEQ ID NO: 30949. Cells were allowed to migrate for 24 hours in the absence or presence of SEQ ID NO: 30949 or SDF-1 (CXCL-12) in the lower chamber of trans-well plates. Migration Inducer was used as positive control and ADM3100 was used as negative control for chemotaxis. The data are presented as the mean±standard error of the mean (SEM) of the three independent experiments, each performed in triplicate. Statistical analysis was performed using a two-tailed t-test, *p<0.05.

### DETAILED DESCRIPTION

[0032] A description of example embodiments follows.

### Target Proteins

[0033] In one aspect, the disclosure provides a target protein identified herein. As used herein, the expressions “target protein identified herein” and “target protein of the disclosure” includes both the polypeptides disclosed in the Sequence Listing and the peptides disclosed in Table A herein. The target protein can be produced recombinantly (e.g., via DNA or mRNA) or synthetically.

[0034] In some embodiments, the target protein is a tumor suppressor (e.g., SEQ ID NO: 37997). In some embodiments, the target protein is an oncogene (e.g., SEQ ID NOS: 33586, 36829, and 38556). The target protein can be expressed on a cancer cell (e.g., a metastatic cancer cell), in the tumor microenvironment (e.g., on a stromal cell), or on a non-malignant cell (e.g., an immune cell).

[0035] In some embodiments, the target protein is an intracellular protein. In some embodiments, the target protein is an extracellular protein (e.g., a secreted protein). In certain embodiments, the target protein is a transmembrane protein. In particular embodiments, the target protein is membrane bound and extracellular, but is not transmembrane. In more particular embodiments, the target protein is embedded in a membrane, but is not transmembrane.

[0036] In various embodiments, the target protein is a protein in the Sequence Listing or Table A. In various embodiments, the target protein is a protein comprising an amino acid sequence set forth in the Sequence Listing or Table A. In some embodiments, the target protein consists of an amino acid sequence set forth in the Sequence Listing or Table A. In some embodiments, the target protein comprises an amino acid sequence having one amino acid substitution relative to an amino acid sequence set forth in the Sequence Listing or Table A, wherein the substitution is substitution of an N-terminal residue in an amino acid sequence in the Sequence Listing or Table A with a methionine (Met) residue. In some embodiments, the target protein consists of an amino acid sequence having one amino acid substitution relative to an amino acid sequence set forth in the Sequence Listing or Table A, wherein the substitution is substitution of an N-terminal residue in an amino acid sequence in the Sequence Listing or Table A with a methionine (Met) residue. In some embodiments, the target protein comprises an amino acid sequence set forth in the Sequence Listing or Table A and further comprises a methionine (Met) residue at its N-terminus. In some embodiments, the target protein consists of an amino acid sequence set forth in the Sequence Listing or Table A and a methionine (Met) residue at its N-terminus.

TABLE A
Target Peptides of the Disclosure

| SEQ ID NO: | Sequence |
|---|---|
| 21374 | MKR |
| 30784 | RMR |
| 30793 | MVE |
| 30848 | MPL |
| 30889 | MLP |
| 30908 | LVT |
| 30956 | MGT |
| 31100 | MCD |
| 31225 | MIT |
| 31281 | MTK |
| 31418 | VLE |
| 31491 | MNV |
| 31703 | MGM |
| 31738 | MQI |
| 31850 | IGR |
| 31953 | VDE |
| 32091 | MSL |
| 32188 | VAV |
| 32259 | MKQ |
| 32408 | MDA |
| 32427 | LGC |
| 32443 | MKT |
| 32481 | MPR |
| 32555 | IHD |
| 32564 | LHS |
| 32568 | IAG |
| 32611 | MQR |
| 32616 | KTS |
| 32635 | IHT |
| 32714 | TML |
| 32723 | MTD |
| 32724 | MTD |
| 33011 | TRT |
| 33089 | LSK |
| 33096 | MPA |
| 33104 | LAV |
| 33221 | MKD |
| 33287 | LDY |
| 33342 | MPP |

[0037] Certain of the target proteins in the Sequence Listing and Table A have been identified as being differentially expressed (e.g., upregulated or downregulated) in a disease state (e.g., a cancer, a pre-cancerous condition) compared to a reference state (e.g., normal state) such that modulation of the level and/or activity of the target protein acts to treat, ameliorate, and/or prevent the development of the disease.

[0038] As used herein, the term “differential expression,” refers to at least one recognizable difference in protein expression. It may be a quantitatively measurable, semi-quantitatively estimable or qualitatively detectable difference in protein expression. Thus, a differentially expressed protein, or “DEP,” may have a higher expression level in a reference state (e.g., normal state) than in a disease state, in which the DEP has a lower expression level or is not expressed at all. Conversely, a DEP may have a higher expression level in a disease state than in a reference state (e.g., normal state), in which the DEP has a lower expression level or is not expressed at all. Further, expression may be regarded as differential if the DEP is recognizably changed (e.g., mutated) between two states under comparison. Recognizable changes can include amino acid substitutions, insertions, and/or deletions, including N- and C-terminal truncations, as well as modifications (e.g., post-translational modifications).

[0039] As used herein, the term “reference” refers to a standard used for comparison purpose(s). A person skilled in the art can select an appropriate reference for a particular comparison purpose(s). Thus, for example, a reference for a disease state may be a normal, healthy state; a reference for a mutated protein may be the non-mutated protein; a reference for a disease treatment may be no treatment or may be a standard of care treatment. In some embodiments, particularly embodiments involving methods of identifying an agent that modulates the expression and/or activity of a target protein, the reference is the activity and/or expression of the target protein in the absence of the agent. In some embodiments, a reference is based on a predetermined level, e.g., based on functional expression or empirical assays. In some embodiments, a reference obtained from one cell, sample or subject (e.g., a cell or sample from a healthy subject, a subject that does not have a particular disease; a healthy subject, a subject who does not have the particular disease). In some embodiments, a reference is obtained from more than one (e.g., a population of) cell, sample or subject (e.g., a cell or sample from a healthy subject, a subject that does not have a particular disease; a healthy subject, a subject who does not have a particular disease), such as 2, 3, 4, 5, 10, 20, 30, 50, 100 or more, or a statistically significant number of cells, samples or healthy subjects. A reference obtained from more than one cell, sample or subject can be represented as a statistic (e.g., an average or median).

[0040] In some embodiments, the target protein has an expression level in a disease (e.g., as determined from a sample from a cell or tissue of a subject having the disease) that is at least about 0.5-fold higher, e.g., at least about: 0.6-, 0.7-, 0.8-, 0.9-, 1.0-, 1.1-, 1.2-, 1.3-, 1.4-, 1.5-, 1.6-, 1.7-, 1.8-, 1.9-, 2.0-, 2.5-, 3-, 3.5-, 4-, 5-, 6-, 7-, 8-, 9- or 10-fold higher (e.g., 50 fold higher, 100-fold higher) than the target protein expression level in a reference (e.g., a sample from a cell or tissue of a subject who does not have the disease).

[0041] In some embodiments, the target protein has an expression level in a disease (e.g., as determined from a sample comprising or obtained from a cell or tissue of a subject having the disease) that is at least about 0.5-fold lower, e.g. at least about: 0.6-, 0.7-, 0.8-, 0.9-, 1.0-, 1.1-, 1.2-, 1.3-, 1.4-, 1.5-, 1.6-, 1.7-, 1.8-, 1.9-, 2.0-, 2.5-, 3-, 3.5-, 4-, 5-, 6-, 7-, 8-, 9- or 10-fold lower (e.g., 50-fold lower, 100-fold lower) than the target protein expression level in a reference (e.g., a sample from a cell or tissue of a subject who does not have the disease). In some embodiments, the target protein is not expressed, or is expressed at an undetectable level, in a disease (e.g., as determined from a sample comprising or obtained from a cell or tissue of a subject having the disease).

[0042] Non-limiting examples of (biological) samples include blood, blood components (e.g., serum or plasma), urine, saliva, amniotic fluid, cerebrospinal fluid, tissue (e.g., a biopsy or microbiopsy), pancreatic fluid, chorionic villus sample, and cells, etc., isolated from a subject.

[0043] In some embodiments, the target protein is translated from a non-coding RNA. In some embodiments, the non-coding RNA is a long intergenic non-coding RNA (lincRNA). In certain embodiments, the non-coding RNA is a long noncoding RNA (lncRNA). In some embodiments, the non-coding RNA is a microRNA (miRNA or miR).

[0044] In some embodiments, the target protein is translated from a non-exonic element in an unprocessed precursor mRNA (pre-mRNA). In some embodiments, the non-exonic element is an intron in a pre-mRNA. In some embodiments, the non-exonic element is a 5′-untranslated region (5′-UTR) in a pre-mRNA. In some embodiments, the non-exonic element is a 3′-untranslated region (3′-UTR) in a pre-mRNA.

[0045] In some embodiments, the target protein has a length of 2,000 amino acids or less, e.g., 1000 amino acids or less, 750 amino acids or less, 500 amino acids or less, 250 amino acids or less, 150 amino acids or less or 100 amino acids or less. In some embodiments, the target protein has a length of 7 amino acids or more, e.g., 8, 9, 10, 15, 18, 25, 50, 75 or 100 amino acids or more. In certain embodiments, the target protein has a length of from about 50 to about 200 amino acids, e.g., from about 100 to about 150 amino acids. In particular embodiments, the target protein has a length of 7 amino acids or more. In more particular embodiments, the target protein has a length of about 18 amino acids.

[0046] Certain of the target proteins disclosed herein (e.g., SEQ ID NO: 30949; SEQ ID NO: 34229) have been identified as modulators of G protein-coupled receptors (GPCRs) (see, e.g., Example 9). Therefore, in some embodiments, a target protein is a modulator of one or more GPCRs, such as, e.g., the GPCRs CXCR4 or C3AR1. In some embodiments, a target protein is an agonist of one or more GPCRs. In some embodiments, a target protein is an antagonist of one or more GPCRs. In some embodiments, a target protein is a direct modulator of one or more GPCRs, such as a ligand for one or more GPCRs. In some embodiments, a target protein is an indirect modulator of one or more GPCRs.

[0047] The expression and/or activity of various GPCRs have been linked to different diseases/disorders, conditions and indications, including those set forth in Table B (see, e.g., Kenakin, T., Biased Receptor Signaling in Drug Discovery, Pharmacol Rev 71:267-315, April 2019; Harmar, A. J., et al., IUPHAR-DB: the IUPHAR database of G protein-coupled receptors and ion channels, Nucleic Acids Research, 2009, Vol. 37; and Davenport A P, Scully C C G, de Graaf C, Brown A J H, and Maguire J J. Advances in therapeutic peptides targeting G protein-coupled receptors. Nat Rev Drug Discov. 2020 Jun. 19 (6): 389-413; the contents of each are incorporated herein by reference in their entirety). Accordingly, in some embodiments, a target protein disclosed herein, which is a modulator of a GPCR, is useful for treating and/or diagnosing one or more diseases/disorders, conditions and/or indications, such as cancer or a pre-cancerous condition, or any of the diseases/disorders, conditions and indications listed in Table B, which are known to be associated with GPCR expression and/or activity.

TABLE B
GPCRs Associated with Disease

| Disease group | GPCRs Associated with Disease Group |
|---|---|
| acute disease | ADRB1, P2RY12, AGTR1 |
| breast disease | GNRHR |
| cancer or benign | ADRB2, ADRA1A, TSHR, SSTR3, SSTR1, GNRHR, CXCR4, CASR, |
| tumor | GCGR, ADRA1D, SSTR4, ADRA1B, OPRM1, SMO, TACR1, |
| | OPRK1, SSTR2, ADRB1, MC1R, SSTR5 |
| cardiovascular | ADRB3, OPRD1, ADRB2, ADRA1A, AGTR1, ADORA1, TSHR, |
| disease | HTR1D, PTGIR, HTR4, DRD2, F2R, HTR1B, FZD4, EDNRB, |
| | ADRA1D, ADORA2A, HTR1F, ADORA3, ADORA2B, CELSR1, |
| | CALCRL, ADRA1B, BDKRB2, OPRM1, ADRA2B, GLP1R, |
| | AVPR1A, P2RY12, OPRK1, PTGFR, ADRB1, ADRA2A, AVPR2, |
| | ADRA2C, EDNRA |
| chronic disease | ADORA3, ADORA2B, ADGRG6, ADRB2, CASR, GABBR1, |
| | AGTR1, GABBR2, ADORA1, CHRM3, CHRM1, ADORA2A |
| connective tissue | ADRB3, OPRD1, MC2R, OPRK1, CASR, PTGER3, OPRM1, |
| disease | ADRA2A, ADRA2B, ADRA2C, GNRHR |
| digestive system | CALCR, AGTR1, MTNR1B, GIPR, CHRM3, SSTR3, SSTR1, HTR4, |
| disease | PTGER3, GCGR, CHRM1, EDNRB, HRH2, DRD3, OPRM1, GLP1R, |
| | P2RY12, S1PR1, SSTR2, HTR1A, DRD4, MC1R, EDNRA, GLP2R, |
| | SSTR5 |
| disorder of | CALCR, S1PR4, AGTR1, GABBR2, CHRM3, GNRHR, KISS1R, |
| development or | S1PR3, FZD2, PTH1R, HRH1, S1PR2, EDNRB, LHCGR, ADGRG2, |
| morphogenesis | ADGRG6, CELSR1, GABBR1, SMO, S1PR1, MC2R, S1PR5, MC1R, |
| | EDNRA |
| disorder of | ADRB3, ADRB2, GPR179, GPR143, P2RY2, OPN1LW, CHRM3, |
| visual system | P2RY4, OPN1SW, GRM6, CASR, HRH1, CHRM1, FZD4, EDNRB, |
| | RHO, ADRA2B, ADGRV1, FZD5, CHRM2, P2RY1, PTGFR, |
| | ADRB1, ADRA2A, ADRA2C, P2RY6, OPN1MW |
| endocrine | CALCR, AGTR1, MTNR1B, MC4R, GIPR, TSHR, SSTR3, SSTR1, |
| system disease | TACR3, GNRHR, FSHR, KISS1R, PTH1R, CASR, GCGR, GHRHR, |
| | LHCGR, DRD3, SSTR4, GHSR, GLP1R, TACR1, P2RY12, MC2R, |
| | SSTR2, PROKR2, DRD4, MC1R, EDNRA, CHRM1, SSTR5 |
| genetic disorder | CNR1, GABBR2, MC4R, SSTR3, SSTR1, KISS1R, PTH1R, GHRHR, |
| | ADRA2B, GRM1, AVPR1A, P2RY12, HTR1A, PROKR2, OPN1MW, |
| | TBXA2R, ADRA1A, AGTR1, MTNR1B, OPN1LW, CHRM3, GRM7, |
| | HTR1D, GPR68, S1PR2, RHO, LHCGR, ADORA2A, ADORA3, |
| | ADORA2B, SSTR4, BDKRB2, LPAR6, ADGRV1, S1PR1, SSTR2, |
| | CHRM2, PTGFR, HRH3, CALCR, HTR2A, GPR143, MTNR1A, |
| | TACR3, HTR4, GNRHR, FSHR, GRM6, FZD2, CASR, EDNRB, |
| | ADRA1D, ADGRG2, ADGRG6, GABBR1, ADRA1B, OPRM1, |
| | SMO, FZD6, MC2R, ADRA2A, AVPR2, ADRA2C, CHRM1, SSTR5, |
| | ADRB3, GPR179, ADORA1, TSHR, OPN1SW, DRD2, CXCR4, |
| | FZD4, AVPR1B, HRH2, DRD3, CELSR1, CCR5, HTR2C, DRD4, |
| | MC1R, EDNRA |
| head and neck | ADRB3, ADRB2, GPR179, ADRA1A, GPR143, P2RY2, OPN1LW, |
| disorder | CHRM3, P2RY4, OPN1SW, GRM6, CASR, HRH1, FZD4, EDNRB, |
| | ADRA1D, RHO, OPN1MW, ADRA1B, ADRA2B, ADGRV1, FZD5, |
| | CHRM2, P2RY1, PTGFR, ADRB1, ADRA2A, ADRA2C, P2RY6, |
| | CHRM1 |
| hematologic | P2RY12, MC2R, CXCR4, TBXA2R, OPRM1, DRD4, AVPR2, |
| disease | AVPR1B, AVPR1A, SMO, DRD3 |
| idiopathic | HTR2A, CASR, HRH1, CNR1, GABBR2, EDNRB, EDNRA, HTR2C |
| disease | |
| immune system | ADRB3, CALCR, ADRA1A, S1PR4, GABBR2, TSHR, CHRM3, |
| disease | S1PR3, CXCR4, HRH1, S1PR2, GCGR, ADRA1D, CYSLTR1, |
| | CELSR1, GABBR1, ADRA1B, ADRA2B, GLP1R, CCR5, S1PR1, |
| | MC2R, CHRM2, S1PR5, PTGFR, ADRA2A, ADRA2C, CHRM1 |
| inflammatory | ADRB3, OPRD1, ADRB2, ADRA1A, AGTR1, P2RY2, TSHR, |
| disease | CHRM3, P2RY4, HRH1, PTGER3, ADRA1D, CYSLTR1, ADRA1B, |
| | BDKRB2, OPRM1, ADRA2B, S1PR1, MC2R, OPRK1, CHRM2, |
| | P2RY1, ADGRE2, PTGFR, ADRB1, ADRA2A, ADRA2C, P2RY6, |
| | CHRM1 |
| injury | PTH1R, HRH1, GABBR1, PTGER3, GABBR2, AVPR2, AVPR1B, |
| | AVPR1A, HRH2, CHRM1 |
| integumentary | ADRB3, HRH1, ADRA1A, GNRHR, ADRA1B, BDKRB2, ADGRE2, |
| system disease | LPAR6, EDNRA, ADRA2A, ADRA2B, EDNRB, MC1R, PTGFR, |
| | ADRA1D, ADRA2C, SMO, FZD6 |
| metabolic | ADRB3, OPRD1, CALCR, HTR2A, OXTR, CNR1, GPR143, AGTR1, |
| disease | GABBR2, MC4R, MTNR1A, GIPR, CHRM3, TSHR, MTNR1B, |
| | SSTR3, SSTR1, DRD2, CASR, GCGR, DRD3, ADORA2A, SSTR4, |
| | OPRM1, GRM1, GLP1R, HTR2C, P2RY12, OPRK1, SSTR2, |
| | CHRM2, DRD4, ADRA2A, MC1R, EDNRA, CHRM1, SSTR5 |
| musculoskeletal | ADRB3, OPRD1, ADRB2, CALCR, HTR2A, ADRA1A, AGTR1, |
| system disease | GABBR2, FZD2, PTH1R, CASR, PTGER3, EDNRB, ADRA1D, |
| | GABBR1, ADRA1B, OPRM1, ADRA2B, SMO, HTR2C, MC2R, |
| | OPRK1, ADRB1, ADRA2A, ADRA2C, EDNRA |
| nervous system | OPRD1, HCRTR1, DRD1, GRM3, CNR1, GABBR2, SSTR3, ADGRG1, |
| disease | SSTR1, GHRHR, HTR1F, HTR7, ADRA2B, GRM1, HCRTR2, P2RY12, |
| | HTR1A, S1PR5, OPN1MW, ADRB2, HTR2B, ADRA1A, AGTR1, MTNR1B, |
| | OPN1LW, HTR6, CHRM3, GRM7, HTR1D, S1PR3, S1PR2, RHO, |
| | ADORA2A, ADORA3, ADORA2B, SSTR4, DRD5, CALCRL, ADGRV1, |
| | HTR1E, S1PR1, SSTR2, CHRM2, HTR5A, HRH3, HTR2A, OXTR, |
| | GPR143, MTNR1A, HTR4, GRM6, CASR, HRH1, HTR1B, ADRA1D, |
| | GABBR1, ADRA1B, OPRM1, SMO, MC2R, OPRK1, ADRA2A, ADRA2C, |
| | CHRM1, SSTR5, GPR179, S1PR4, ADORA1, OPN1SW, DRD2, FZD4, |
| | DRD3, CYSLTR1, CELSR1, HTR2C, DRD4, ADRB1 |
| obstetric | ADRB3, OXTR, ADRA1A, PTGER3, ADRA1B, TSHR, ADRA2A, |
| disorder | ADRA2B, GLP1R, ADRA1D, ADRA2C |
| otorhinolaryngologic | ADRB3, ADRB2, CYSLTR1, HRH1, ADRA1A, CHRM2, ADRA1B, |
| disease | CHRM3, ADRA2A, ADRA2B, ADRB1, ADRA1D, ADRA2C, |
| | EDNRA, CHRM1 |
| psychiatric | OPRD1, HCRTR1, HTR2A, DRD1, OXTR, HTR2B, ADRA1A, |
| disorder | HRH3, GRM3, GABBR2, MTNR1A, HTR6, MTNR1B, HTR1D, |
| | HTR4, DRD2, HRH1, HTR1B, AVPR1B, DRD3, HTR1F, CYSLTR1, |
| | DRD5, GABBR1, OPRM1, HTR7, ADRA2B, GRM1, HCRTR2, |
| | AVPR1A, HTR2C, HTR1E, OPRK1, HTR1A, DRD4, ADRA2A, |
| | AVPR2, HTR5A, ADRA2C, CHRM1 |
| reproductive | ADRA1A, SSTR3, SSTR1, TACR3, GNRHR, FSHR, KISS1R, ADRA1D, |
| system disease | LHCGR, ADGRG2, DRD3, SSTR4, PTGER2, ADRA1B, PTGER1, CCR5, |
| | TACR1, SSTR2, PROKR2, DRD4, AVPR2, SSTR5 |
| respiratory | ADRB3, ADRB2, ADRA1A, AGTR1, ADORA1, CHRM3, PTGIR, CASR, |
| system disease | HRH1, EDNRB, ADRA1D, ADORA2A, ADORA3, ADORA2B, ADGRG6, |
| | CYSLTR1, ADRA1B, ADRA2B, CHRM2, ADRB1, ADRA2A, ADRA2C, |
| | EDNRA, CHRM1 |
| syndromic | HTR2A, P2RY2, GABBR2, CHRM3, SSTR3, P2RY4, SSTR1, HTR4, |
| disease | GNRHR, FSHR, KISS1R, DRD2, FZD2, CASR, EDNRB, LHCGR, DRD3, |
| | CYSLTR1, SSTR4, GABBR1, OPRM1, ADGRV1, HTR2C, P2RY12, MC2R, |
| | SSTR2, HTR1A, PROKR2, P2RY1, DRD4, P2RY6, CHRM1, SSTR5 |
| upper digestive | HTR4, HRH2 |
| tract disorder | |
| urinary system | ADRB3, ADRA1A, AGTR1, TSHR, CHRM3, CASR, EDNRB, |
| disease | AVPR1B, ADRA1D, ADORA2A, ADORA2B, ADRA1B, OPRM1, |
| | ADRA2B, AVPR1A, MC2R, CHRM2, ADRA2A, AVPR2, ADRA2C, |
| | EDNRA |

Agents that Modulate Target Proteins

[0048] Provided herein are agents that modulate the expression of a target protein disclosed herein, such as a target protein in the Sequence Listing, Table A, or a variant of the foregoing, or a fragment of the foregoing (e.g., a biologically active fragment of a target protein). The expression of the target protein or variant or fragment thereof can be modulated by a wide range of processes, directly or indirectly, leading to an increase or a decrease of the target protein level. Non-limiting examples include altering: the copy number of the gene encoding the target protein, transcriptional initiation, elongation or termination, RNA processing, RNA stability (e.g., mRNA stability), RNA degradation, translation initiation, post-translational modification of a protein, protein stability, protein degradation (e.g., cleavage, such as protease cleavage), or a combination of the foregoing.

[0049] In some embodiments, the agent modulates (e.g., increases or decreases) the expression of a gene or gene transcript encoding the target protein. In some embodiments, the agent modulates the expression or activity of the target protein. In some embodiments, the agent decreases (e.g., inhibits, reduces or neutralizes) the activity of the target protein. In some embodiments, the agent increases (e.g., activates) the activity of the target protein. In some embodiments, the agent decreases (e.g., inhibits or downregulates) the expression of the target protein. In other embodiments, the agent increases (e.g., activates or upregulates) the expression of the target protein.

[0050] As used herein, the term “increasing” or “increase” refers to modulation that results in a higher level of expression, activity, function or a combination thereof of the target protein, or a metric (e.g., cancer cell death or DNA methylation of a target site), relative to a reference (e.g., the level prior to or in an absence of modulation by the agent). In some embodiments, the agent increases the expression or activity of the target protein, or the metric, by at least about 5% relative to the reference, e.g., by at least about: 10%, 15%, 20%, 25%, 30%, 35%, 40%, 45%, 50%, 55%, 60%, 65%, 70%, 75%, 80%, 85%, 90%, 95% or 98% relative to the reference.

[0051] As used herein, the term “decreasing” or “decrease” refers to modulation that results in a lower level of expression, activity, function or a combination thereof of the target protein, or a metric (e.g., cancer cell death or DNA methylation of a target site), relative to a reference (e.g., the level prior to or in an absence of modulation by the agent). In some embodiments, the agent decreases the expression or activity of the target protein, or the metric, by at least about 5% relative to the reference, e.g., by at least about: 10%, 15%, 20%, 25%, 30%, 35%, 40%, 45%, 50%, 55%, 60%, 65%, 70%, 75%, 80%, 85%, 90%, 95% or 98% relative to the reference.

[0052] Non-limiting examples of the metric include energy production or energy conversion in the liver (e.g., modulating ATP synthesis, B-oxidation, oxidation of metabolites derived from glycolysis, oxidation of metabolites derived from amino acids), mitochondrial transcription, mitochondrial ribosome assembly, mitochondrial translation, mitochondrial thermogenesis, hormonal signaling (e.g., mitochondrial estrogen receptor (mtER) signaling), redox maintenance (e.g., NADH and/or FADH₂), cell cycle regulation, cell migration, cell morphology, apoptosis, necrosis, membrane potential, ion (e.g., calcium or zinc) storage, ion (e.g., calcium or zinc) homeostasis, metabolite synthesis (e.g., heme biosynthesis or steroid biosynthesis), nutrient sensing, unfolded protein stress response pathway, signaling processes (e.g., calcium signaling).

[0053] In some embodiments, the level of expression, activity, function or a combination thereof of the target protein, or the metric, is measured after the agent is contacted with (e.g., a cell) or administered (e.g., to a subject) for at least about 1 day, e.g., at least about: 2 days, 3 days, 4 days, 5 days, 6 days, 8 days, 9 days, 10 days, 1 week, 2 weeks, 3 weeks, 1 month, 2 months, 3 months, 4 months, 5 months or 6 months, e.g., after a treatment regimen has begun.

[0054] In some embodiments, the agent comprises, consists essentially of or consists of a polypeptide, a polynucleotide, a gene editing system, a small molecule, or a cell (e.g., a cell therapy).

[0055] In some embodiments, the target protein is a tumor suppressor, and the agent increases the level of expression, activity, function (e.g., tumor suppressor function) or a combination thereof, of the target protein. In other embodiments, the target protein is an oncogene, and the agent decreases the level of expression, activity (e.g., oncogenic activity), function or a combination thereof of the target protein.

[0056] In certain embodiments, the agent modulates the level of expression, activity, function, or a combination thereof, of the target protein in a cancer cell (e.g., a metastatic cancer cell), a cell (e.g., stromal cell) in a tumor micro-environment, a non-malignant cell, or a combination of the foregoing. In certain embodiments, the agent modulates the level of expression, activity, function or a combination thereof of the target protein in a tumor, a tumor microenvironment, a site of metastasis, a stromal cell, or a combination of the foregoing.

[0057] In some embodiments, the agent induces downregulation of the target protein (e.g., increases target-protein degradation); prevents multimerization (e.g., dimerization) of the target protein; sequesters a target protein (e.g., a secreted target protein); modulates (e.g., agonizes, antagonizes or disrupts) a known function of the target protein; decreases binding between the target protein and a binding partner (e.g., via steric hinderance); induces antibody-dependent cell killing, phagocytosis, and/or opsonization of a cell expressing the target protein; or a combination of the foregoing. In certain embodiments, the agent lacks agonistic activity toward the target protein. In certain embodiments, the agent has agonistic activity toward the target protein. In some embodiments, the agent lacks antagonistic activity toward the target protein. In some embodiments, the agent has antagonistic activity toward the target protein. In particular embodiments, the agent binds to at least one residue of the target protein that is involved in binding to a binding partner. In some embodiments, the agent binds to one or more binding sites and/or domains of the target protein involved in binding of the target protein to the binding partner.

[0058] In some embodiments, the agent induces downregulation of a binding partner of the target protein; sequesters a binding partner (e.g., a secreted binding partner) of the target protein; prevents multimerization (e.g., dimerization) of a binding partner of the target protein; sequesters a binding partner of the target protein (e.g., a secreted binding partner); modulates (e.g., agonizes, antagonizes or disrupts) a known function of a binding partner of the target protein; decreases binding between the target protein and a binding partner (e.g., via steric hinderance); induces antibody-dependent cell killing, phagocytosis, and/or opsonization of a cell expressing a binding partner of the target protein; or a combination of the foregoing. In certain embodiments, the agent lacks agonistic activity toward a binding partner of the target protein. In certain embodiments, the agent has agonistic activity toward a binding partner of the target protein. In some embodiments, the agent lacks antagonistic activity toward a binding partner of the target protein. In some embodiments, the agent has antagonistic activity toward a binding partner of the target protein. In particular embodiments, the agent further binds to at least one residue of a binding partner of the target protein that is involved in binding between the target protein and the binding partner. In more particular embodiments, the agent further binds to one or more binding sites and/or domains of a binding partner of the target protein involved in binding between the target protein and the binding partner.

[0059] In certain embodiments, the agent modulates (e.g., increases or decreases) the level of expression, activity, function, or a combination thereof, of a variant of a target protein disclosed herein. In some embodiments, the variant comprises an amino acid sequence that is at least 70% identical to the amino acid sequence of a target protein disclosed herein. For example, the sequence identity to the variant can be at least about: 75%, 80%, 85%, 90%, 91%, 92%, 93%, 94%, 95%, 96%, 97%, 98% or 99%. In some embodiments, the sequence identity is about: 70%, 75%, 80%, 85%, 90%, 91%, 92%, 93%, 94%, 95%, 96%, 97%, 98% or 99%. In some embodiments, the sequence identity is about: 70-99%, 75-99%, 75-95%, 80-99%, 80-98%, 80-95%, 80-90%, 85-98%, 85-97%, 85-90%, 90-97%, 90-96%, 90-85%, 90-80% or 95-99%. In some embodiments, a variant comprises an amino acid sequence that is at least about 75%, at least about 80%, at least about 85%, at least about 90%, at least about 95%, or at least about 98% identical to the amino acid sequence of a target protein disclosed herein.

[0060] As used herein, the term “sequence identity,” refers to the extent to which two nucleotide sequences, or two amino acid sequences, have the same residues at the same positions when the sequences are aligned to achieve a maximal level of identity, expressed as a percentage. For sequence alignment and comparison, typically one sequence is designated as a reference sequence, to which a test sequences are compared. The sequence identity between reference and test sequences is expressed as the percentage of positions across the entire length of the reference sequence where the reference and test sequences share the same nucleotide or amino acid upon alignment of the reference and test sequences to achieve a maximal level of identity. As an example, two sequences are considered to have 70% sequence identity when, upon alignment to achieve a maximal level of identity, the test sequence has the same nucleotide or amino acid residue at 70% of the same positions over the entire length of the reference sequence.

[0061] Alignment of sequences for comparison to achieve maximal levels of identity can be readily performed by a person of ordinary skill in the art using an appropriate alignment method or algorithm. In some instances, the alignment can include introduced gaps to provide for the maximal level of identity. Examples include the local homology algorithm of Smith & Waterman, Adv. Appl. Math. 2:482 (1981), the homology alignment algorithm of Needleman & Wunsch, J. Mol. Biol. 48:443 (1970), the search for similarity method of Pearson & Lipman, Proc. Nat'l. Acad. Sci. USA 85:2444 (1988), computerized implementations of these algorithms (GAP, BESTFIT, FASTA, and TFASTA in the Wisconsin Genetics Software Package, Genetics Computer Group, 575 Science Dr., Madison, Wis.), and visual inspection (see generally Ausubel et al., Current Protocols in Molecular Biology).

[0062] When using a sequence comparison algorithm, test and reference sequences are input into a computer, subsequent coordinates are designated, if necessary, and sequence algorithm program parameters are designated. The sequence comparison algorithm then calculates the percent sequence identity for the test sequence(s) relative to the reference sequence, based on the designated program parameters. A commonly used tool for determining percent sequence identity is Protein Basic Local Alignment Search Tool (BLASTP) available through National Center for Biotechnology Information, National Library of Medicine, of the United States National Institutes of Health. (Altschul et al., 1990).

[0063] In some embodiments, the amino acid sequence of a variant of a target polypeptide disclosed herein comprises at least one amino acid substitution relative to the amino acid sequence of the target protein. In some embodiments, the number of amino acid substitutions in a variant relative to the amino acid sequence of a target protein disclosed herein is at least about: 2, 3, 4, 5, 6, 7, 8, 9, 10, 11, 12, 13, 14, 15, 16, 17, 18, 19, 20, 21, 22, 23, 24, 25, 26, 27, 28, 29, 30, 31, 32, 33, 34, 35, 36, 37, 38, 39, 40, 41, 42, 43, 44, 45, 46, 47, 48, 49, 50, 51, 52, 53, 54, 55, 56, 57, 58, 59 or 60. In some embodiments, the number of amino acid substitutions is at least about: 5, 6, 10, 15, 20, 25, 30, 35, 40, 45, 50, 55 or 60. In some embodiments, the number of amino acid substitutions is up to about: 60, 55, 50, 45, 40, 35, 30, 25, 20, 15, 10, 6 or 5. In some embodiments, the number of amino acid substitutions is about: 1-60, 1-55, 2-55, 2-50, 3-50, 3-45, 4-45, 4-40, 5-40, 5-35, 6-35, 6-30, 7-30, 7-25, 8-25, 8-20, 9-20, 9-15, 10-15, 5-60, 10-60, 10-55, 15-55, 15-50, 20-50, 20-45, 25-45, 25-40 or 30-40. In some embodiments, the number of amino acid substitutions is about: 10-35, 10-33, 11-33, 11-31, 12-31, 12-29, 13-29, 13-27, 14-27 or 14-25.

[0064] The amino acid substitution(s) in a variant can be substitutions with a canonical amino acid or a non-canonical amino acid. Non-canonical amino acids include, but are not limited to D amino acids, such as D versions of the canonical L-amino acids.

[0065] In some embodiments, an amino acid substitution is a conservative substitution. The term “conservative amino acid substitution(s)” or “conservative substitution(s)” refers to an amino acid substitution having a value of 0 or greater in BLOSUM62.

[0066] In some embodiments, an amino acid substitution is a highly conservative substitution. The term “highly conservative amino acid substitution(s)” or “highly conservative substitution(s)” refers to an amino acid substitution having a value of at least 1 (e.g., at least 2) in BLOSUM62.

[0067] In some embodiments, a variant of a target protein of the disclosure comprises about 5-60 amino acid substitutions, relative to the amino acid sequence of a target protein disclosed herein. In some embodiments, the amino acid substitutions include at least one conservative substitution. In some embodiments, the amino acid substitutions include at least one highly conservative substitution.

### A. Polypeptide Agents

[0068] The term “polypeptide” “peptide” or “protein” denotes a polymer of at least two amino acids covalently linked by an amide bond, regardless of length or post-translational modification (e.g., glycosylation or phosphorylation). A protein, peptide or polypeptide can comprise any suitable L- and/or D-amino acid, for example, common α-amino acids (e.g., alanine, glycine, valine), non-α-amino acids (e.g., β-alanine, 4-aminobutyric acid, 6-aminocaproic acid, sarcosine, statine), and unusual amino acids (e.g., citrulline, homocitruline, homoserine, norleucine, norvaline, ornithine). The amino, carboxyl and/or other functional groups on a peptide can be free (e.g., unmodified) or protected with a suitable protecting group. Suitable protecting groups for amino and carboxyl groups, and methods for adding or removing protecting groups are known in the art and are disclosed in, for example, Green and Wuts, “Protecting Groups in Organic Synthesis,” John Wiley and Sons, 1991. The functional groups of a protein, peptide or polypeptide can also be derivatized (e.g., alkylated) or labeled (e.g., with a detectable label, such as a fluorogen or a hapten) using methods known in the art. A protein, peptide or polypeptide can comprise one or more modifications (e.g., amino acid linkers, acylation, acetylation, amidation, methylation, terminal modifiers (e.g., cyclizing modifications), N-methyl-«-amino group substitution), if desired. In addition, a protein, peptide or polypeptide can be an analog of a known and/or naturally-occurring peptide, for example, a peptide analog having conservative amino acid residue substitution(s).

[0069] In some embodiments, the agent comprises a polypeptide. In some embodiments, the polypeptide is an isolated polypeptide (e.g., isolated or extracted from a biological sample or source). In some embodiments, the polypeptide is a recombinant polypeptide. In some embodiments, the polypeptide is an inhibitor (e.g., a direct inhibitor or an indirect inhibitor) of the expression and/or activity of a target protein disclosed herein. In some embodiments, the polypeptide is an activator (e.g., a direct activator or an indirect activator) of the expression and/or activity of a target protein disclosed herein. In some embodiments, the polypeptide decreases the expression or activity of the target protein disclosed herein. In other embodiments, the polypeptide increases the expression or activity of the target protein disclosed herein. In some embodiments, the polypeptide is a target protein disclosed herein, or a portion thereof (e.g., a biologically active portion thereof, such as a biologically active fragment of the target protein).

[0070] In some embodiments, the polypeptide is an immunoglobulin molecule, such as an antibody (e.g., a whole antibody, an intact antibody) or an antigen-binding fragment of an antibody. In some embodiments, the antibody or antigen-binding fragment thereof binds to the target protein. In some embodiments, the antibody or antigen-binding fragment thereof binds to a protein capable of modulating the expression or activity of the target protein.

[0071] In some embodiments, the polypeptide is an antibody. As used herein, the term “antibody” refers to an immunoglobulin molecule capable of specific binding to a target, such as a carbohydrate, polynucleotide, lipid, polypeptide, etc., through at least one antigen recognition site, located in the variable region of the immunoglobulin molecule. As used herein, the term “antibody” refers to a full-length antibody comprising two heavy (H) chains and two light (L) chains inter-connected by disulfide bonds or multimers thereof (for example, IgM). Each heavy chain comprises a heavy chain variable region (V_{H}) and a heavy chain constant region (comprising domains CH1, hinge CH2 and CH3). Each light chain comprises a light chain variable region (V_{L}) and a light chain constant region (CL). The V_{H} and the V_{L} regions may be further subdivided into regions of hypervariability, termed complementarity determining regions (CDR), interspersed within framework regions (FR). V_{H} and V_{L} each comprises three CDRs and four FR segments, arranged from the amino-terminus to the carboxy-terminus in the following order: FR1, CDR1, FR2, CDR2, FR3, CDR3, and FR4. The antibody can be of any species, such as a rodent (e.g., murine, rat, guinea pig) antibody, a human antibody, or the antibody can be a humanized antibody or chimeric antibody.

[0072] In some embodiments, the antibody comprises an IgA (e.g., IgA1 or IgA2) heavy chain constant region, an IgD heavy chain constant region, an IgE heavy chain constant region, an IgG (e.g., IgG1, IgG2 (e.g., IgG2a, IgG2b or IgG2c), IgG3 or IgG4) heavy chain constant region or an IgM heavy chain constant region. In some embodiments, the antibody comprises an IgG heavy chain constant region. In some embodiments, the antibody comprises a k light chain constant region. In some embodiments, the antibody comprises a λ light chain constant region.

[0073] In some embodiments, the antibody is a polyclonal antibody. In some embodiments, the antibody is a monoclonal antibody. In some embodiments, the antibody is human or chimeric. In some embodiments, the antibody is primatized (e.g., humanized). In some embodiments, the antibody is multispecific, e.g., bi-, tri-, or quad-specific. In some embodiments, the antibody is a heteroconjugate antibody.

[0074] In some embodiments, the polypeptide agent is an antigen-binding fragment of an immunoglobulin molecule (e.g., antibody). The term “antigen-binding fragment” refers to a portion of an immunoglobulin molecule (e.g., antibody) that retains the antigen binding properties of the parental full-length antibody. Non-limiting examples of antigen-binding fragments include a V_{H} region, a V_{L} region, an Fab fragment, an F(ab′)₂ fragment, an Fd fragment, an Fv fragment, and a domain antibody (dAb) consisting of one Vu domain or one V_{L} domain, etc. V_{H} and V_{L} domains may be linked together via a synthetic linker to form various types of single-chain antibody designs in which the V_{H}/V_{L} domains pair intramolecularly, or intermolecularly in those cases when the V_{H} and V_{L} domains are expressed by separate chains, to form a monovalent antigen binding site, such as single chain Fv (scFv) or diabody. In some embodiments, the polypeptide disclosed herein is an antigen binding fragment selected from Fab, Fab′, F(ab′)₂, Fd, Fv, disulfide-linked Fvs (sdFv, e.g., diabody, triabody or tetrabody), scFv, SMIP or rlgG. In some embodiments, the polypeptide is a scFv. Antigen-binding fragments can be produced by recombinant DNA techniques, enzymatic or chemical cleavage of intact immunoglobulins, or, in certain cases, by chemical peptide synthesis procedures known in the art.

[0075] Polypeptide agents (e.g., monoclonal antibodies) can be monovalent, bivalent or multivalent. A monoclonal antibody can be monospecific or multispecific (e.g., bispecific). Monospecific antibodies bind one antigenic epitope. A multispecific antibody, such as a bispecific antibody or a trispecific antibody, is included in the term monoclonal antibody.

[0076] “Multispecific” refers to an antibody that specifically binds at least two distinct antigens or at least two distinct epitopes within the antigens, for example three, four or five distinct antigens or epitopes. “Bispecific” refers to an antibody that specifically binds two distinct antigens or two distinct epitopes within the same antigen.

[0077] “Isolated antibody” refers to an antibody or an antigen-binding fragment thereof that is substantially free of other antibodies having different antigenic specificities (e.g., an isolated anti-target protein antibody is substantially free of antibodies that specifically bind antigens other than the target protein). In the case of a bispecific antibody, the bispecific antibody specifically binds two antigens of interest, and is substantially free of antibodies that specifically bind antigens other than the two antigens of interest. In some embodiments, the polypeptide agent (e.g., monoclonal antibody) is at least 80% pure, e.g., about: 80%, 81%, 82%, 83%, 84%, 85%, 86%, 87%, 88%, 89%, 90%, 91%, 92%, 93%, 94%, 95%, 96%, 97%, 98%, 99% or 100% pure.

[0078] In some embodiments, the polypeptide is an antagonist antibody that binds to the target protein (e.g., a target protein whose expression or activity is increased in a cancer state relative to a reference state). In some embodiments, the antibody described herein is an antagonist antibody that binds to a protein capable of modulating the expression or activity of the target protein. As used herein, the term “antagonist antibody” refers to an antibody that, upon binding to an antigen (e.g., the target protein or a protein capable of modulating the expression or activity of the target protein), reduces (e.g., inhibits) the function of the antigen. In some embodiments, the antigen is a receptor, and the antagonist antibody binds to the ligand-binding domain of the receptor. In some embodiments, the antigen is a transmembrane protein, and the antagonist antibody binds to the extracellular region of the transmembrane protein. In some embodiments, the antigen is an enzyme or a signaling molecule, and the antagonist antibody reduces the activity of the enzyme or attenuate a signal transduction pathway mediated by the signaling molecule. In some embodiments, the antagonist antibody reduces antigen function by at least about 10%, e.g., by at least about: 15%, 20%, 25%, 30%, 35%, 40%, 45%, 50%, 55%, 60%, 65%, 70%, 75%, 80%, 90%, 95%, 98% or 99%.

[0079] In some embodiments, the polypeptide is an agonist antibody that binds to the target protein (e.g., a target protein whose expression or activity is decreased in a cancer state relative to a reference state). In some embodiments, the antibody is an agonist antibody that binds to a protein capable of modulating the expression or activity of the target protein. As used herein, the term “agonist antibody” refers to an antibody that, upon binding to an antigen (e.g., the target protein or a protein capable of modulating the expression or activity of the target protein), increases the function of the antigen. In some embodiments, the antigen is a receptor, and the agonist antibody binds to the ligand-binding domain of the receptor. In some embodiments, the antigen is a transmembrane protein, and the agonist antibody binds to the extracellular region of the transmembrane protein. In some embodiments, the antigen is an enzyme or a signaling molecule, and the agonist antibody increases the activity of the enzyme or activates a signal transduction pathway mediated by the signaling molecule. In some embodiments, the agonist antibody increases antigen function by at least about 10%, e.g., by at least about: 15%, 20%, 25%, 30%, 35%, 40%, 45%, 50%, 55%, 60%, 65%, 70%, 75%, 80%, 90%, 95%, 100%, 200%, 300%, 400%, 500%, 600%, 700%, 800%, 900% or 1,000%.

[0080] In some embodiments, the agonist antibody does not exert at least one of the following functional properties: reducing (e.g., inhibiting) the activity of the antigen; inducing antibody-dependent cell killing of a cell expressing the antigen (e.g., by natural killer (NK) cells, monocytes, macrophages, neutrophils, dendritic cells, or eosinophils); inducing phagocytosis of a cell expressing the antigen (e.g., by macrophage); inducing opsonization of a cell expressing the antigen; and inducing downregulation of the antigen on a cell surface (e.g., by hyper-crosslinking or clustering the antigen to induce internalization and degradation).

[0081] Suitable techniques, assays and reagents for making and using therapeutic antibodies against an antigen are known in the art. See, for example, Therapeutic Monoclonal Antibodies: From Bench to Clinic (Zhiqiang An eds., 1st ed. 2009); Antibodies: A Laboratory Manual (Edward A. Greenfield eds., 2d ed. 2013); Ferrara et al., Using Phage and Yeast Display to Select Hundreds of Monoclonal Antibodies: Application to Antigen 85, a Tuberculosis Biomarker, PLoS ONE 7 (11): e49535 (2012), for methods of making recombinant antibodies, including antibody engineering, use of degenerate oligonucleotides, 5′-RACE, phage display, and mutagenesis; antibody testing and characterization; antibody pharmacokinetics and pharmacodynamics; antibody purification and storage; and screening and labeling techniques.

[0082] In some embodiments, the polypeptide is an antibody mimetic that binds a target protein disclosed herein. The term “antibody mimetic” refers to polypeptides capable of mimicking an antibody's ability to bind an antigen, but structurally differ from native antibody structures. Non-limiting examples of antibody mimetics include Adnectins, Affibodies, Affilins, Affimers, Affitins, Alphabodies, Anticalins, Avimers, DARPins, Fynomers, Kunitz domain peptides, monobodies, nanobodies, nanoCLAMPs, and Versabodies.

[0083] In some embodiments (e.g., when the expression or activity of the target protein is decreased in a cancer state relative to a reference state), the agent is a polypeptide (e.g., isolated polypeptide) that comprises an amino acid sequence that is at least 70% identical to at least a portion (e.g., a biologically active portion or fragment) of the target protein. For example, the percent identity can be at least about: 70%, 71%, 72%, 73%, 74%, 75%, 76%, 77%, 78%, 79%, 80%, 81%, 82%, 83%, 84%, 85%, 86%, 87%, 88%, 89%, 90%, 91%, 92%, 93%, 94%, 95%, 96%, 97%, 98% or 99% to the full-length target protein or a biologically active portion or fragment thereof. In some embodiments, the polypeptide comprises the amino acid sequence of a full-length target protein. In some embodiments, the polypeptide comprising the amino acid sequence of a full-length target protein is a recombinant polypeptide. In some embodiments, the polypeptide comprising the amino acid sequence of a full-length target protein is a synthetic polypeptide.

[0084] In some embodiments, the polypeptide (e.g., isolated polypeptide) comprises an amino acid sequence having at least 1 amino acid substitution relative to the target protein. For example, the number of amino acid substitutions can be at least about: 2, 3, 4, 5, 6, 7, 8, 9, 10, 11, 12, 13, 14, 15, 16, 17, 18, 19 or 20, or about: 1-20, 1-19, 2-19, 2-18, 2-17, 3-17, 3-16, 4-16, 4-15, 5-15, 5-14, 6-14, 6-13, 7-13, 7-12, 8-12, 8-11 or 9-11. In some embodiments, the amino acid substitutions are conservative substitutions. In some embodiments, the amino acid substitutions are highly conservative substitutions.

[0085] In some embodiments, the polypeptide (e.g., isolated polypeptide) comprises an amino acid sequence that is at least 70% identical to at least a portion of a protein capable of modulating the expression or activity of the target protein. For example, the percent identity can be at least about: 71%, 72%, 73%, 74%, 75%, 76%, 77%, 78%, 79%, 80%, 81%, 82%, 83%, 84%, 85%, 86%, 87%, 88%, 89%, 90%, 91%, 92%, 93%, 94%, 95%, 96%, 97%, 98% or 99%. In some embodiments, the polypeptide comprises the amino acid sequence of a protein capable of modulating the expression or activity of the target protein.

[0086] In some embodiments, the polypeptide (e.g., isolated polypeptide) comprises an amino acid sequence having at least 1 amino acid substitution relative to a protein capable of modulating the expression or activity of the target protein. For example, the number of amino acid substitutions can be at least about: 2, 3, 4, 5, 6, 7, 8, 9, 10, 11, 12, 13, 14, 15, 16, 17, 18, 19 or 20, or about: 1-20, 1-19, 2-19, 2-18, 2-17, 3-17, 3-16, 4-16, 4-15, 5-15, 5-14, 6-14, 6-13, 7-13, 7-12, 8-12, 8-11 or 9-11. In some embodiments, the amino acid substitutions are conservative substitutions. In some embodiments, the amino acid substitutions are highly conservative substitutions.

[0087] In some embodiments, the polypeptide is a cell-penetrating peptide. In certain embodiments, the polypeptide is linked to a cell-penetrating peptide. Suitable cell-penetrating peptide sequences can be protein-derived, designed or, chimeric (modified). See, e.g., Regberg, et al., Applications of cell-penetrating peptides for tumor targeting and future cancer therapies, Pharmaceuticals 5 (9): 991-1007 (2012). Non-limiting examples of cell-penetrating peptides include TAT (48-60), Penetratin, pVEC, MPG8, Transportan, Transportan10, PepFect3, PepFect 6, PepFect 14, Polyarginine, Stearyl-polyarginine, Pep-1, Pep-3, CADY, YTA2, YTA4, SynB1, SynB3, Maurocalcine and PTD4.

[0088] In some embodiments, the polypeptide is a circulating factor (e.g., a cytokine).

[0089] In some embodiments, the biological properties (e.g., biological activities or half-life) of the polypeptide (e.g., isolated polypeptide) and the target protein are similar. Non-limiting examples of biological activities include enzymatic activities or properties (e.g., selectivity, steady-state or kinetics), binding activities (e.g., nucleic acid (DNA, RNA) binding protein binding) or properties (e.g., specificity, affinity or kinetics), cell signaling activities, immunological activities, and structural activity (e.g., cell adhesion), among others. Non-limiting examples of enzyme activities include transferase activity (e.g., transfers functional groups from one molecule to another), oxioreductase activity (e.g., catalyzes oxidation-reduction reactions), hydrolase activity (e.g., cleaves chemical bonds via hydrolysis), lyase activity (e.g., generate a double bond), ligase activity (e.g., joining two molecules via a covalent bond), and isomerase activity (e.g., catalyzes structural changes within a molecule from one isomer to another).

[0090] In some embodiments, the polypeptide (e.g., isolated polypeptide) is a recombinant protein. In other embodiments, the polypeptide (e.g., isolated polypeptide) is a synthetic protein. Methods of producing therapeutic polypeptides are known in the art. See, e.g., Therapeutic Proteins: Methods and Protocols (Mark C. Smales & David C James eds., 2005); Pharmaceutical Biotechnology: Fundamentals and Applications (Daan J. A. Crommelin, Robert D. Sindelar & Bernd Meibohm eds., 2013). Polypeptides can be expressed recombinantly using mammalian cells, insect cells, yeast or bacteria etc., under the control of appropriate promoters.

[0091] In some embodiments, the polypeptides described herein (e.g., target proteins, or a portion thereof, polypeptide agents that modulate target proteins) are modified, for example, by cleavage (e.g., protease cleavage) or post-translational modification. In certain embodiments, the modification(s) will affect the activity of the polypeptide, for example, by making an inactive polypeptide active or by altering (e.g., increasing, decreasing) the level of activity of a polypeptide. In particular embodiments, a polypeptide described herein is provided as a prodrug, e.g., that can be converted (e.g., by proteolytic cleavage, post-translational modification) to an active polypeptide in vivo. In some embodiments, the polypeptide includes a post-translational modification or other chemical modification. Non-limiting examples of post-translational modifications include acetylation, amidation, formylation, glycosylation, hydroxylation, methylation, myristoylation, phosphorylation, deamidation, prenylation (e.g., farnesylation, geranylation, etc.), ubiquitylation, ribosylation and sulphation. Phosphorylation can occur on an amino acid such as tyrosine, serine, threonine, or histidine.

[0092] In some embodiments, the polypeptide is joined to a heterologous peptide or protein (e.g., via a covalent bond such as a peptide bond, or a non-covalent bond), such as in a conjugate or fusion protein. In some embodiments, the polypeptide comprises a tag (e.g., a detectable label, such as a fluorophore or enzyme, or a purification tag, such as an epitope tag).

[0093] In some embodiments, the polypeptide comprises one or more neoantigens selected from the Sequence Listing, Table A, or a variant thereof. As used herein, the term “neoantigen” refers to a tumor antigen that arises from a target protein described herein. In some embodiments, the neoantigen is a cancer-specific neoantigen. There are a variety of ways to produce a neoantigen. For example, a neoantigen may be produced in vitro as a polypeptide before being formulated into a neoplasia vaccine or immunogenic pharmaceutical composition. In some embodiments, the immunogenic pharmaceutical composition comprises an effective amount of one or more neoantigens or pharmaceutically acceptable salt(s) thereof. In some embodiments, the immunogenic pharmaceutical composition further comprises a pharmaceutically acceptable carrier, excipient, adjuvant or additive.

[0094] Alternatively, a neoantigen may be produced in vivo by introducing a polynucleotide or an expression vector (e.g., a viral expression vector) encoding the neoantigen into a cell or tissue (e.g., of a subject in need). In certain embodiments, the polypeptide comprises at least two neoantigens. In some embodiments, the polypeptide comprises a T cell enhancer amino acid sequence. In some embodiments, the T cell enhancer is selected from the group consisting of an invariant chain, a leader sequence of tissue-type plasminogen activator, a PEST sequence, a cyclin destruction box, a ubiquitination signal, and a SUMOylation signal.

### B. Polynucleotide Agents

[0095] In some embodiments, the agent comprises a polynucleotide, or an analog or derivative thereof. In some embodiments, the polynucleotide, or the analog or derivative thereof, is an inhibitor of the target protein. In some embodiments, the polynucleotide, or the analog or derivative thereof, is an activator of the target protein. In some embodiments, the polynucleotide, or the analog or derivative thereof, decreases (e.g., reduces or neutralizes) the expression or activity of the target protein. In other embodiments, the polynucleotide, or the analog or derivative thereof, increases the expression or activity of the target protein.

[0096] The polynucleotides can have sequences containing naturally occurring ribonucleotide or deoxyribonucleotide monomers, non-naturally occurring nucleotides, or combinations thereof. Accordingly, polynucleotides can include, for example, nucleotides comprising naturally occurring bases (e.g., A, G, C, or T) and nucleotides comprising modified bases (e.g., 7-deazaguanosine, inosine, or methylated nucleotides, such as 5-methyl dCTP and 5-hydroxymethyl cytosine). In some embodiments, the polynucleotide comprises at least one modified nucleotide. Non-limiting examples of modified nucleotides include 2′-fluoro, 2′-o-methyl, 2′-deoxy, unlocked nucleic acid, 2′-hydroxy, phosphorothioate, 2′-thiouridine, 4′-thiouridine and 2′-deoxyuridine. In some embodiments, the modification increases nuclease resistance, increases serum stability, decrease immunogenicity, or a combination of the foregoing.

[0097] In some embodiments, the polynucleotide is a DNA molecule. In some embodiments, the polynucleotide is an RNA molecule. In some embodiments, the polynucleotide is a vector (e.g., expression vector, plasmid).

[0098] In some embodiments, the polynucleotide comprises an analog or a derivative of a polynucleotide. In some embodiments, the analog or derivative is a peptide nucleic acid (PNA). In some embodiments, the analog or derivative is a locked nucleic acid (LNA). In some embodiments, the analog or derivative is a morpholino oligonucleotide. In some embodiments, the analog or derivative comprises one or more phosphorothioate-linkages. In some embodiments, the agent comprises a deoxyribonucleic guanidine (DNG) nucleotide. In some embodiments, the agent comprises ribonucleic guanidine (RNG) nucleotide.

[0099] In some embodiments, the polynucleotide modulates the expression and/or activity of a nucleic acid encoding a target protein disclosed herein (e.g., a target protein in the Sequence Listing or Table A), a variant thereof, or a portion thereof (e.g., a biologically active portion or fragment thereof).

[0100] In some embodiments, the polynucleotide comprises a nucleotide sequence that is complementary (e.g., fully complementary or partially complementary) to at least a portion of a gene or gene transcript encoding a target protein disclosed herein, such that the polynucleotide sequence is capable of hybridizing or annealing to the gene or gene transcript (e.g., under physiological conditions). In other embodiments, the polynucleotide comprises a nucleotide sequence that is complementary to at least a portion of a gene or gene transcript encoding a protein that is capable of modulating the expression or activity of a target protein disclosed herein.

[0101] In some embodiments, the polynucleotide encodes a target protein disclosed herein, or a variant thereof (e.g., a biologically active variant thereof), or a portion thereof (e.g., a biologically active portion or fragment thereof).

[0102] In some embodiments, the nucleic acid that encodes the target protein, or variant thereof, or portion (e.g., fragment) thereof, is a gene sequence or a portion thereof. In some embodiments, the encoding nucleic acid is an unprocessed RNA transcript (e.g., pre-mRNA) or a portion thereof (e.g., a 5′-UTR, a 3′-UTR, an intron). In some embodiments the encoding nucleic acid is a mRNA molecule or a portion thereof. In some embodiments the encoding nucleic acid is present in a non-coding RNA (e.g., a long intergenic non-coding RNA (lincRNA), long noncoding RNA (lncRNA), or miRNA).

[0103] The encoding nucleic acid can comprise a canonical open reading frame (ORF) or a non-canonical ORF. In certain embodiments, the encoding nucleic acid comprises a non-canonical ORF.

[0104] The polynucleotides can be single stranded (ss) or double stranded (ds). In some embodiments, the polynucleotide is double stranded (ds). In some embodiments, the length of the ds polynucleotide is about 15-50 base pairs, e.g., about: 15-45, 15-40, 15-35, 15-30, 15-25, 18-50, 18-45, 18-40, 18-35, 18-30, 18-25, 20-50, 20-45, 20-40, 20-35, 20-30, 20-25, 25-50, 25-45, 25-40, 25-35, 25-30, 30-50, 30-45, 30-40, 30-35, 35-50, 35-45, 35-40 or 40-50 base pairs. In some embodiments, the length of the polynucleotide is about 19-23 base pairs. In some embodiments, the length of the polynucleotide is about 21 base pairs.

[0105] In some embodiments, the polynucleotide is single stranded (ss). In some embodiments, the length of the ss polynucleotide is about 15-50 nucleotides, e.g., about: 15-45, 15-40, 15-35, 15-30, 15-25, 18-50, 18-45, 18-40, 18-35, 18-30, 18-25, 20-50, 20-45, 20-40, 20-35, 20-30, 20-25, 25-50, 25-45, 25-40, 25-35, 25-30, 30-50, 30-45, 30-40, 30-35, 35-50, 35-45, 35-40 or 40-50 nucleotides.

[0106] In some embodiments, the polynucleotide prevents the maturation of a newly-generated nuclear RNA transcript into an mRNA for transcription. In some embodiments, the polynucleotide comprises a nucleotide sequence that is complementary to a sequence at the boundary of an intron and an exon.

[0107] In some embodiments, the polynucleotide (e.g., an antisense oligonucleotide) can hybridize to an mRNA encoding the target protein (e.g., under physiological conditions). In some embodiments, the length of the polynucleotide is at least about 10 nucleotides, e.g., at least about: 15, 16, 17, 18, 19, 20, 21, 22, 23, 24, 25, 26, 27, 28, 29 or 30 nucleotides or about: 10-30, 15-30, 15-25, 20-25 nucleotides. In some embodiments, the polynucleotide is at least 75% identical to an antisense sequence of identical the targeted transcript, e.g., at least about: 80%, 85%, 90%, 95%, 96%, 97%, 98% or 99%.

[0108] In some embodiments, the polynucleotide further comprises an overhang sequence (e.g., unpaired, overhanging nucleotides which are not directly involved in the formation of the double helical structure by the core sequences). In some embodiments, the polynucleotide comprises a 3′ overhang, a 5′ overhang, or both. In some embodiments, the overhang is about 1-5 nucleotides. In some embodiments, the overhang comprises a modified ribonucleotide or deoxynucleotide, e.g., a thiophosphate, phosphorothioate or deoxynucleotide inverted (3′ to 3′ linked) nucleotide.

[0109] Non-limiting examples of polynucleotide agents suitable for use in the compositions, kits and methods described herein include a small interfering RNA (siRNA), a short hairpin RNA (shRNA), a microRNA (miRNA), an antagomir, an antisense DNA, an antisense RNA, a morpholino nucleic acid (MNA), a locked nucleic acid (LNA), a peptide nucleic acid (PNA), an aptamer and a guide RNA (gRNA).

[0110] In some embodiments, the polynucleotide inhibits gene expression (e.g., through the biological process of RNA interference (RNAi)). Polynucleotides appropriate for RNA interference can be readily designed and produced by a person of ordinary skill using techniques, assays and reagents known in the art, including computational tools. See, e.g., Pei et al. 2006, Reynolds et al. 2004, Khvorova et al. 2003, Schwarz et al. 2003, Ui-Tei et al. 2004, Heale et al. 2005, Chalk et al. 2004, Amarzguioui et al. 2004.

[0111] In some embodiments, the polynucleotide is a miRNA. In some embodiments, the miRNA is about 22 nucleotides in length. miRNAs bind to target sites on mRNA molecules and silence the mRNA, e.g., by causing cleavage of the mRNA, destabilization of the mRNA, or inhibition of translation of the mRNA.

[0112] In some embodiments, the polynucleotide is a siRNA. In some embodiments, the siRNA comprises a nucleotide sequence that is identical to about a 15-25 contiguous mRNA sequence encoding the target protein. In some embodiments, the siRNA is a double-stranded RNA molecule having about 19-25 base pairs. In some embodiments, the siRNA commences with the dinucleotide AA. In some embodiments, the siRNA has a GC-content of about 30-70%, e.g., about: 30-65%, 30-60%, 30-55%, 30-50%, 40-70%, 40-65%, 40-60%, 40-55%, 45-70%, 45-65%, 45-60% or 45%-55%.

[0113] In some embodiments, the polynucleotide is a shRNA. A shRNA is an RNA molecule including a hairpin turn that decreases expression of target genes via RNAi. shRNAs can be delivered to cells in the form of plasmids, e.g., viral or bacterial vectors, e.g., by transfection, electroporation, or transduction.

[0114] siRNAs and shRNAs resemble intermediates in the processing pathway of the endogenous microRNA (miRNA) genes (see, e.g., Bartel, Cell 116:281-97 (2004)). In some embodiments, the siRNA functions as an miRNA; in other embodiments, the miRNA functions as an siRNA (see, e.g., Zeng et al., Mol Cell 9:1327-33 (2002); Doench et al., and Genes Dev 17:438-42 (2003)). MicroRNAs, like siRNAs, use RISC to downregulate target genes, but unlike siRNAs, most animal miRNAs do not cleave the mRNA. Instead, miRNAs reduce protein output through translational suppression or polyA removal and mRNA degradation (see, e.g., Wu et al., Proc Natl Acad Sci USA 103:4034-39 (2006)). Known miRNA binding sites are within mRNA 3′ UTRs; miRNAs seem to target sites with near-perfect complementarity to nucleotides 2-8 from the miRNA's 5′ end (see, e.g., Rajewsky, Nat Genet 38 Suppl: S8-13 (2006) and Lim et al., Nature 433:769-73 (2005)). This region is known as the seed region. Because siRNAs and miRNAs are interchangeable, exogenous siRNAs downregulate mRNAs with seed complementarity to the siRNA (see, e.g., Birmingham et al., Nat Methods 3:199-204 (2006)). Multiple target sites within a 3′ UTR give stronger downregulation (see, e.g., Doench et al., Genes Dev 17:438-42 (2003)).

[0115] In some embodiments, the polynucleotide is a messenger RNA (mRNA) or a circular RNA (circRNA) encoding a target protein disclosed herein or a variant thereof (e.g., a variant that is at least about 70% identical (e.g., at least about: 75%, 80%, 85%, 90%, 95%, 98% or 99% identical to the wild-type protein). In some embodiments, the mRNA is codon optimized (e.g., to improve efficacy of protein synthesis and limit mRNA destabilization by rare codons (see, e.g., Presnyak et al., Cell. 160 (6): 1111-24 (2015) and Thess et al., Mol Ther. 23 (9): 1456-64 (2015)).

[0116] In some embodiments, a polynucleotide comprising RNA is chemically synthesized. In some embodiments, a polynucleotide comprising RNA is expressed recombinantly. In some embodiments, the RNA is transcribed in vitro. The making and using of RNA therapeutics are known in the art. See, for example, RNA Therapeutics: Function, Design, and Delivery (Mouldy Sioud eds., 2010) and Kaczmarek et al., Advances in the delivery of RNA therapeutics: from concept to clinical reality, Genome Medicine 9:60 (2017).

[0117] In some embodiments, the mRNA is produced by in vitro transcription. In some embodiments, the mRNA is modified to optimize its activity. In some embodiments, the mRNA comprises a modified base, a 5′ cap, a 5′ cap analogue, an anti-reverse cap analog (ARCA), or a combination thereof.

[0118] In some embodiments, the mRNA comprises a poly(A) tail. In some embodiments, the poly(A) tail is about 100-200 nucleotides. In some embodiments, the poly (A) tail improves the expression and/or stability of the mRNA (see, e.g., Kaczmarek et al., Genome Medicine 9:60 (2017)).

[0119] In some embodiments, the mRNA comprises 5′ cap. In some embodiments, the mRNA comprises a 5′ cap analogue. In some embodiments, the 5′ cap analogue is a 1,2-dithiodiphosphate-modified cap (see, e.g., Strenkowska et al., Nucleic Acids Res. 44:9578-90 (2016)).

[0120] In some embodiments, the mRNA comprises a modified 3′ untranslated region (UTR), a 5′ UTR, or both. In some embodiments, the modified UTR comprises sequences responsible for recruiting RNA-binding proteins (RBPs) and miRNAs (e.g., to enhance the level of protein product (see, e.g., Kaczmarek et al., Genome Medicine 9:60 (2017)). In some embodiments, the 3′ UTR, 5′ UTR, or both are modified to encode a regulatory element. In some embodiments, the regulatory element comprises a K-turn motif, a miRNA binding site, or a combination thereof to control RNA expression in a cell-specific manner (see, e.g., Wroblewska et al., Nat Biotechnol. 33:839-41 (2015)).

[0121] In some embodiments, the mRNA comprises an RNA base modification. In some embodiments, the mRNA comprises a pseudouridine. In some embodiments, the mRNA comprises a N1-methyl-pseudouridine (e.g., to mask immune-stimulatory activity and enhance translation initiation (see, e.g., Andries et al., J Control Release 217:337-44 (2015) and Svitkin et al., Nucleic Acids Res. 45:6023-36 (2017)).

[0122] In some embodiments, the RNA (e.g., mRNA) is a circular RNA.

[0123] Compositions and methods for producing mRNA are disclosed, see, e.g., in WO2016011306, WO2016014846, WO2016022914, WO2016077123, WO2016164762, WO2016201377, WO2017049275, U.S. Pat. Nos. 9,937,233, 8,710,200, 10,022,425, 9,878,056, 9,572,897, WO2010084371, U.S. Pat. No. 9,353,153, WO2015034925 and WO2019236673. Also see, e.g., Jemielity et al., RNA 9 (9): 1108-22 (2003); Mockey et al., Biochem Biophys Res Commun. 340:1062-88 (2006); Strenkowska et al. Nucleic Acids Res. 44:9578-90 (2016); Presnyak et al., Cell 160:1111-24 (2015) and Kaczmarek et al., Genome Medicine 9:60 (2017)). In some embodiments, the mRNA is prepared in a lipid nanoparticle (LNP) formulation (e.g., for in vivo delivery, see, e.g., U.S. Pat. Nos. 9,764,036, 9,682,139, Kauffman et al., Nano Lett. 15:7300-6 (2015) and Fenton et al., Adv Mater. 28:2939-43 (2016)).

[0124] In some embodiments, the polynucleotide is an aptamer. In certain embodiments, the aptamer binds to a target protein disclosed herein. In particular embodiments, the aptamer binds to a binding partner of a target protein disclosed herein.

[0125] In some embodiments, the polynucleotide is linked (e.g., covalently) to a delivery polymer. In some embodiments, the link between the polynucleotide and the delivery polymer is reversible. In some embodiments, the polynucleotide is linked to the delivery polymer via a physiologically labile linker. In some embodiments, the physiologically labile linker is a disulfide bond.

[0126] In some embodiments, the polynucleotide is conjugated to the polymer in the presence of an excess of polymer. In some embodiments, the excess polymer is removed prior to administration (e.g., to a cell or a subject).

[0127] A person of ordinary skill in the art can readily make suitable polynucleotide agents for use in the compositions, kits and methods described herein using the gene locus information of the protein sequences contained in the Sequence Listing incorporated herein, and Table A, such as the chromosomal location, starting and ending nucleotide positions, and polymorphism identifications.

### C. Agents Comprising Gene Editing Systems

[0128] In some embodiments, the agent comprises a gene editing system. In some embodiments, the gene editing system produces a deletion of nucleotides, a substitution of nucleotides, an addition of nucleotides or a combination of the foregoing, in a gene encoding a target protein.

[0129] In some embodiments, the gene editing system is a CRISPR/Cas system, a transposon-based gene editing system, or a transcription activator-like effector nuclease (TALEN) system. In some embodiments, the gene editing system is a CRISPR/Cas system. In some embodiments, the gene editing system is a class II CRISPR/Cas system.

[0130] In some embodiments, the gene editing system (e.g., the CRISPR/Cas system) reduces (e.g., decreases, inhibits) or eliminates (e.g., via gene knockout) the expression of the target protein. In some embodiments, the gene editing system (e.g., the CRISPR/Cas system) reduces (e.g., decreases, inhibits) or eliminates (e.g., via gene knockout) the expression of a protein capable of modulating the expression or activity of the target protein. In some embodiments, the gene editing system (e.g., the CRISPR/Cas system) increases (e.g., via gene knock-in or gene replacement) the expression of the target protein. In some embodiments, the gene editing system (e.g., the CRISPR/Cas system) increases (e.g., via gene knock-in or gene replacement) the expression of a protein capable of modulating the expression or activity of the target protein.

[0131] In some embodiments, the CRISPR system specifically catalyzes cleavage in a gene encoding the target protein, thereby inactivating said gene. Repairing nucleic acid strand breaks through non-homologous end joining (NHEJ) often results in changes to the DNA sequence at the site of the cleavage, resulting in small insertions or deletions (Indels). In some embodiments, NHEJ is used to knock out the gene encoding the target protein. In some embodiments, homology directed repair (HDR) is used to concurrently inactivate a gene encoding the target protein and insert a heterologous sequence into the inactivated locus. Cells in which a knockout and/or knockin event has occurred can be identified and/or selected by well-known methods in the art.

[0132] In some embodiments, the gene editing system comprises a single Cas endonuclease or a polynucleotide encoding the single Cas endonuclease. In some embodiments, the single Cas endonuclease is Cas9, Cpf1, C2C1 or C2C3. In some embodiments, the single Cas endonuclease is Cas9 (e.g., of Streptococcus Pyogenes). In some embodiments, the single Cas endonuclease is Cpf1. In some embodiments, the Cpf1 is AsCpf1 (from Acidaminococcus sp.) or LbCpf1 (from Lachnospiraceae sp.). The choice of nuclease and gRNA(s) will typically be determined according to whether a deletion, a substitution, or an addition of nucleotide(s) to a targeted sequence is desired.

[0133] In some embodiments, the type II Cas endonuclease is Cas 9 (e.g., of Streptococcus pyogenes). In some embodiments, the modified Cas 9 is nickase Cas9, dead Cas9 (dCas9) or eSpCas9. In some embodiments, the nickase Cas9 is Cas9 D10A. In some embodiments, the dCas9 is D10A or H840A. In some embodiments, the gene editing system comprises a double nickase Cas9 (e.g., to achieve more accurate genome editing, see, e.g., Ran et al., Cell 154:1380-89 (2013). Wild-type Cas9 generates double-strand breaks (DSBs) at specific DNA sequences targeted by a gRNA. Nickase Cas9 generates only a single-strand break. dCas9 is catalytically inactive. In some embodiments, dCas9 is fused to a nuclease (e.g., a FokI to generate DSBs at target sequences homologous to two gRNAs). Various CRISPR/Cas9 plasmids are publicly available from the Addgene repository (Addgene, Cambridge, MA: addgene.org/crispr/).

[0134] In some embodiments, the gene editing system comprises:
[0135] a) a wild-type or modified type II Cas endonuclease or a polynucleotide encoding the wild-type or modified type II Cas endonuclease;
[0136] b) a CRISPR RNA (“crRNA”); and
[0137] c) a trans-activating crRNA (“tracrRNA”).

[0138] In some embodiments, the crRNA comprises at least 1 “guide RNA” (sgRNA), e.g., at least: 2, 3 or 4 gRNAs. In some embodiments, the gRNA comprises a sequence that is identical to a portion of the gene sequence of the target protein. In some embodiments, the gRNA comprises a sequence that is identical to a portion of the gene sequence of a protein capable of modulating the expression or activity of the target protein. In some embodiments, the gRNA is at least about 16 nucleotides, e.g., at least about: 17, 18, 19, 20, 21, 22, 23, 24 or 25 nucleotides; or about: 16, 17, 18, 19, 20, 21, 22, 23, 24 or 25 nucleotides; or about: 16-24, 17-24, 17-23, 18-23, 18-22, 19-22 or 19-21 or 19, 20 or 21 nucleotides. In some embodiments, the sgRNA is chemically modified.

[0139] Design of gRNA sequences for gene editing are known in the art. See, for example, Cong et al., Science, 339:819-23 (2013) and Ran et al., Nature Protocols 8:2281-308 (2013). Cas9 requires at least about 16 or 17 nucleotides of gRNA sequence to cleave DNA, and Cpf1 requires at least about 16 nucleotides of gRNA sequence to cleave DNA. In practice, a gRNA sequence has a length of about 17-24 nucleotides (e.g., about: 19, 20 or 21 nucleotides) and is complementary to a target gene. Custom gRNA generators and algorithms are commercially available. Chemically modified sgRNAs have also been demonstrated to be effective in genome editing (see, e.g., Hendel et al., Nature Biotechnol., 985-91 (2015)).

[0140] In some embodiments, the crRNA further comprises a sequence capable of binding to the tracrRNA. Upon binding, the partially double-stranded structure is cleaved by RNase III, the resulting crRNA/tracrRNA hybrid directs the Cas9 endonuclease to recognize and cleave a target DNA sequence.

[0141] In some embodiments, the target DNA sequence is approximate to a “protospacer adjacent motif” (“PAM”) that is specific for a Cas endonuclease. PAM sequences appear throughout a given genome. CRISPR endonucleases of various prokaryotic species have unique PAM sequence requirements. Non-limiting examples of PAM sequences include: 5′-NGG (Streptococcus pyogenes), 5′-NNAGAA (Streptococcus thermophilus CRISPR1), 5′-NGGNG (Streptococcus thermophilus CRISPR3) and 5′-NNNGATT (Neisseria meningiditis). Some endonucleases, e.g., Cas9 endonucleases, are associated with G-rich PAM sites, e.g., 5′-NGG, and perform blunt-end cleaving of the target DNA at a location that is 3 nucleotides upstream (5′) of the PAM site.

[0142] In some embodiments, the gene editing system comprises:
[0143] a) a wild-type or modified type II Cas endonuclease or a polynucleotide encoding the wild-type or modified type II Cas endonuclease; and
[0144] b) a crRNA.

[0145] Cpf1-associated CRISPR arrays are processed into mature crRNAs without the requirement of a tracrRNA. Cpf1 endonucleases, are associated with T-rich PAM sites, e.g., 5′-TTN. Cpf1 can also recognize a 5′-CTA PAM motif. Cpf1 cleaves the target DNA by introducing an offset or staggered double-strand break with a 4- or 5-nucleotide 5′ overhang, for example, cleaving a target DNA with a 5-nucleotide offset or staggered cut located 18 nucleotides downstream (3′) of the PAM site on the coding strand and 23 nucleotides downstream from the PAM site on the complimentary strand. The 5-nucleotide overhang that results from such offset cleavage allows more precise genome editing by DNA insertion by homologous recombination than by insertion at blunt-end cleaved DNA. See, e.g., Zetsche et al., Cell 163:759-71 (2015).

[0146] In some embodiments, the gene editing system activates or represses transcription of a target gene. In some embodiments, the gene editing system comprises:
[0147] a) a chimeric protein comprising dCas9 and one or more effector domains; and
[0148] b) one or more sgRNAs.

[0149] In some embodiments, the chimeric protein represses the expression of the target protein (CRISPRi). In some embodiments, the chimeric protein activates the expression of the target protein (CRISPRa). In some embodiments, the chimeric protein methylates a DNA sequence recognized by the sgRNA. In some embodiments, the chimeric protein demethylates a DNA sequence recognized by the sgRNA.

[0150] An effector domain comprises a biologically active portion of an effector protein (e.g., transcriptional activator or repressor). In some embodiments, the gene editing system comprises 1 effector domain. In some embodiments, the gene editing system comprises at least 2 effector domains, e.g., 2, 3 or 4 effector domains. In some embodiments, the effector domain comprises KRAB. In some embodiments, the effector domain comprises VP64. In some embodiments, the effector domain comprises VP64, p65 and Rta. In some embodiments, the dCas9 is D10A. In some embodiments, the dCas9 is H840A.

[0151] Because dCas9 is catalytically inactive, dCas9 does not cut the target DNA but interferes with transcription by steric hindrance. The dCas9 chimeric protein (e.g., dCas9-VPR), guided by the one or more gRNAs to the upstream sequence of a transcriptional start site (TSS) of the target gene, modulates transcription of the target gene. See, e.g., Gilbert et al., CRISPR-Mediated Modular RNA-Guided Regulation of Transcription in Eukaryotes, Cell 154, 442-51 (2013); Cheng et al., Multiplexed activation of endogenous genes by CRISPR-on, an RNA-guided transcriptional activator system, Cell Res. 23:1163-71 (2013); Gilbert et al., Genome-Scale CRISPR-Mediated Control of Gene Repression and Activation, Cell 159:647-61 (2014); Tanenbaum et al., A protein-tagging system for signal amplification in gene expression and fluorescence imaging, Cell 159:635-46 (2014); Konermann et al., Genome-scale transcriptional activation by an engineered CRISPR-Cas9 complex, Nature 517:583-88 (2015); Chavez et al., Highly efficient Cas9-mediated transcriptional programming, Nat. Methods. 12:326-28 (2015); Zalatan et al., Engineering complex synthetic transcriptional programs with CRISPR RNA scaffolds, Cell 160:339-50 (2015); Horlbeck et al., Compact and highly active next-generation libraries for CRISPR-mediated gene repression and activation, eLife. 5: e19760 (2016); Chavez et al., Comparison of Cas9 activators in multiple species, Nat Methods. 7:563-67 (2016).

[0152] CRISPR technology for editing the genes of eukaryotes is disclosed in US Patent Application Publications 2016/0138008A1 and US2015/0344912A1, and in U.S. Pat. Nos. 8,697,359, 8,771,945, 8,945,839, 8,999,641, 8,993,233, 8,895,308, 8,865,406, 8,889,418, 8,871,445, 8,889,356, 8,932,814, 8,795,965, and 8,906,616. Cpf1 endonuclease and corresponding guide RNAs and PAM sites are disclosed in US Patent Application Publication 2016/0208243 A1. CRISPR technology for generating mtDNA dysfunction in the mitochondrial genome is disclosed in Jo et al., BioMed Res. Int. 2015:305716 (2015). Co-delivery of Cas9 and sgRNA with nanoparticles is disclosed in Mout et al., ACS Nano 11 (3): 2452-58 (2017).

[0153] In some embodiments, the agent comprises a transposon-based gene editing system. An example of a suitable transposon-based gene editing system for use in the disclosure provided herein is the Gene Writer system described in International Publication Number WO 2020/047124, published on Mar. 5, 2020, the contents of which are incorporated herein by referenced in their entirety.

[0154] In some embodiments, the agent comprises a transcription activator-like effector nuclease (TALEN) system. TALEN-based systems comprise a protein comprising a TAL effector DNA binding domain and an enzymatic domain. They are made by fusing a TAL effector DNA-binding domain to a DNA cleavage domain (a nuclease which cuts DNA strands). The FokI restriction enzyme described above is an exemplary enzymatic domain suitable for use in TALEN-based gene-regulating systems.

[0155] TAL effectors are proteins that are secreted by Xanthomonas bacteria via their type III secretion system when they infect plants. The DNA binding domain contains a repeated, highly conserved, 33-34 amino acid sequence with divergent 12th and 13th amino acids. These two positions, referred to as the Repeat Variable Diresidue (RVD), are highly variable and strongly correlated with specific nucleotide recognition. Therefore, the TAL effector domains can be engineered to bind specific target DNA sequences by selecting a combination of repeat segments containing the appropriate RVDs. The nucleic acid specificity for RVD combinations is as follows: HD targets cytosine, NI targets adenine, NG targets thymine, and NN targets guanine (though, in some embodiments, NN can also bind adenine with lower specificity)

[0156] In some embodiments, the TAL effector domains bind to a target DNA sequence that is at least 90%, 95%, 96%, 97%, 98%, or 99% identical, or is 100% identical to a target DNA sequence of the target protein. In some embodiments, the TAL effector domains bind to a target DNA sequence that is at least 90%, 95%, 96%, 97%, 98%, or 99% identical, or is 100% identical to a target DNA sequence of a target protein defined by a set of genomic coordinates.

[0157] In some embodiments, the gene-regulating system comprises two or more TAL effector-fusion proteins each comprising a TAL effector domain, wherein at least one of the TAL effector domains binds to a target DNA sequence of the target protein. In some embodiments, at least one of the two or more TAL effector domains binds to a target DNA sequence that is at least 90%, 95%, 96%, 97%, 98%, or 99% identical, or is 100% identical to a target DNA sequence defined by a set of genomic coordinates.

[0158] Methods and compositions for assembling the TAL-effector repeats are known in the art. See e.g., Cermak et al, Efficient design and assembly of custom TALEN and other TAL effector-based constructs for DNA targeting, Nucleic Acids Res 39 (12): e82 (2011). Plasmids for constructions of the TAL-effector repeats are commercially available from e.g., Addgene.

[0159] In some embodiments, the agent comprises a zinc finger nuclease (ZFN) system. ZFN domains can be generated using commercially available plasmids, such as, for example, plasmid pairs (CSTZFN-1KT COMPOZR® Custom Zinc Finger Nuclease (ZFN) R-3257609) from Sigma Aldrich (St. Louis, MO). Plasmids can be prepared using the commercial system following manufacturer's protocol (e.g., NEB Monarch Miniprep (Cat #T1010), New England Biolabs, Ipswich, MA).

[0160] In some embodiments, the agent comprises a vector designed for delivering conventional gene therapy (e.g., gene knockout or knock-in via homologous recombination). Non-limiting examples of said vectors include retrovirus (e.g., Lentivirus 5), adenovirus, adeno-associated virus, Herpes Simplex Virus, nanoparticles and DNA Transposons.

### D. Small Molecule Agents

[0161] In some embodiments, the agent comprises a small molecule. In some embodiments, the small molecule binds to the target protein. In some embodiments, the small molecule binds to a protein capable of modulating the expression or activity of the target protein. In some embodiments, the small molecule is an inhibitor of the target protein (e.g., a direct inhibitor, an indirect inhibitor). In some embodiments, the small molecule is an activator of the target protein (e.g., a direct activator, and indirect activator).

[0162] Examples of small molecules include organic compounds, organometallic compounds, inorganic compounds, and salts of organic, organometallic or inorganic compounds. Atoms in a small molecule are typically linked together via covalent and/or ionic bonds. In certain embodiments, the small molecule is a small organic molecule. The arrangement of atoms in a small organic molecule may represent a chain (e.g. a carbon-carbon chain or a carbon-heteroatom chain), or may represent a ring containing carbon atoms, e.g. benzene or a polycyclic system, or a combination of carbon and heteroatoms, i.e., heterocycles such as a pyrimidine or quinazoline. Although small molecules can have a wide range of molecular weights, they generally include molecules that are less than about 5,000 daltons. For example, such small molecules can be less than about 1000 daltons and, preferably, are less than about 750 daltons or, more preferably, are less than about 500 daltons. Small molecules can be found in nature (e.g., identified, isolated, purified) and/or produced synthetically (e.g., by traditional organic synthesis, bio-mediated synthesis, or a combination thereof). See e.g. Ganesan, Drug Discov. Today 7 (1): 47-55 (January 2002); Lou, Drug Discov. Today, 6 (24): 1288-1294 (December 2001). Examples of naturally occurring small molecules include, but are not limited to, hormones, neurotransmitters, nucleotides, amino acids, sugars, lipids, and their derivatives.

[0163] In particular embodiments, the agent comprises a proteolysis targeting chimera (PROTAC).

[0164] A small molecule suitable for use in the compositions, kits and methods of this disclosure can be identified by a person of ordinary skill in the art using any of the screening methods disclosed herein.

### E. Therapeutic Cells and Cell-Based Therapies

[0165] In some embodiments, the agent comprises a therapeutic cell. In certain embodiments, the therapeutic cell expresses and/or is engineered to express a target protein (e.g., a target protein in the Sequence Listing, Table A, or a variant thereof), a polypeptide (e.g., an antibody, an antigen-binding fragment or a polypeptide that comprises an amino acid sequence that is at least 70% identical to at least a portion of the target protein), a polynucleotide (e.g., a recombinant DNA, an RNA such as mRNA or siRNA), and/or a gene editing system (e.g., a CRISPR/Cas system) described herein.

[0166] In some embodiments, a polypeptide disclosed herein (e.g., an antibody or antigen-binding fragment) is incorporated into a cell-based therapy. In some embodiments, the polypeptide is an engineered T cell receptor. In some embodiments, the polypeptide is a chimeric antigen receptor (CAR) (e.g., expressed on a T (CAR-T) cell, natural killer (CAR-NK) cell, or macrophage (CAR-M) cell). In some embodiments, the CAR comprises a transmembrane domain and an antigen-recognition moiety, wherein the antigen-recognition moiety binds the target protein.

[0167] A therapeutic cell suitable for use in the compositions, kits and methods of this disclosure can be generated, identified and/or enriched with methods known to a person of ordinary skill in the art. Non-limiting examples of said methods include purifying, propagating and/or differentiating cells from a subject (e.g., a human) to a specific cell product; engineering a somatic cell for gene therapy; cell immortalization; ex vivo gene modification of a cell (e.g., using viral vector and/or lipid nanoparticle delivery technologies); in vivo gene modification of a cell (e.g., using viral vector and/or lipid nanoparticle delivery technologies); genome editing; cell plasticity technologies; gene modifications; and flow cytometry. In some embodiments, the therapeutic cell is autologous or syngeneic. In other embodiments, the therapeutic cell is allogeneic.

### Expression Vectors and Hosts

[0168] In another aspect, the disclosure provides an expression vector comprising a polynucleotide described herein.

[0169] The term “expression vector” refers to a replicable nucleic acid from which one or more proteins can be expressed when the expression vector is transformed into a suitable expression host cell.

[0170] In some embodiments, the expression vector comprises an expression control polynucleotide sequence operably linked to the polynucleotide, a polynucleotide sequence encoding a selectable marker, or both. In some embodiments, the expression control polynucleotide sequence comprises a promoter sequence, an enhancer sequence, or both. In some embodiments, the expression control polynucleotide sequence comprises an inducible promoter sequence. The term “promoter” refers to a region of DNA to which RNA polymerase binds and initiates the transcription of a gene. The term “operably linked” means that the nucleic acid is positioned in the recombinant polynucleotide, e.g., vector, in such a way that enables expression of the nucleic acid under control of the element (e.g., promoter) to which it is linked. The term “selectable marker element” is an element that confers a trait suitable for artificial selection. Selectable marker elements can be negative or positive selection markers. Non-limiting examples of expression vectors for use with bacterial, fungal, yeast, and mammalian cellular hosts are described in Molecular Cloning: A Laboratory Manual (Michael R. Green & Joseph Sambrook eds., 4th ed. 2012).

[0171] In another aspect, the disclosure provides an expression host cell comprising any one or more of the polynucleotides or expression vectors described herein.

[0172] The term “expression host cell” refers to a cell useful for receiving, maintaining, reproducing and/or amplifying a vector.

[0173] Non-limiting examples of expression host cells include mammalian cells such as hybridoma cells, Baby Hamster Kidney fibroblasts (BHK cells), Chinese hamster ovary (CHO) cells, COS cells, HeLa cells, and human embryonic kidney (HEK), yeast cells such as Pichia pastoris cells, or bacterial cells such as DH5α, etc. See, e.g., Mammalian Cell Cultures for Biologics Manufacturing (Weichang Zhou & Anne Kantardjieff eds., 2014) for processes of host cell culture for production of protein therapeutics; Protein Biotechnology: Isolation, Characterization, and Stabilization (Felix Franks eds., 2013) and Protein Purification Protocols (Paul Cutler eds., 2010) for purification of protein therapeutics; and Therapeutic Protein Drug Products: Practical Approaches to formulation in the Laboratory, Manufacturing, and the Clinic (Brian K Meyer eds., 2012) for formulation of protein therapeutics.

[0174] A polynucleotide or expression vector described herein can be introduced into a suitable or desired host cell using techniques known in the art, including transformation, electroporation, and transduction. The introduced nucleic acid can be extrachromosomal in the host cell, or integrated into the host cell's genome.

### Pharmaceutical Compositions

[0175] In another aspect, the disclosure provides a pharmaceutical composition, wherein the pharmaceutical composition comprises an agent disclosed herein, and a pharmaceutically acceptable carrier. As used herein, the term “pharmaceutical composition” refers to a composition having pharmacological activity or other direct effect in mitigating, treating, or preventing cancer, or a finished dosage form or formulation thereof.

[0176] In some embodiments, the composition (e.g., pharmaceutical composition) comprises pharmaceutically acceptable carriers, excipients, stabilizers, diluents or tonifiers (Remington's Pharmaceutical Sciences 16th edition, Osol, A. Ed. (1980)). Suitable pharmaceutically acceptable carriers, excipients, or stabilizers are nontoxic to recipients at the dosages and concentrations employed. Non-limiting examples of pharmaceutically acceptable carriers, excipients, stabilizers, diluents or tonifiers include buffers (e.g., phosphate, citrate, histidine), antioxidants (e.g., ascorbic acid or methionine), preservatives, proteins (e.g., serum albumin, gelatin or immunoglobulins); hydrophilic polymers, amino acids, carbohydrates (e.g., monosaccharides, disaccharides, glucose, mannose or dextrins); chelating agents (e.g., EDTA), sugars (e.g., sucrose, mannitol, trehalose or sorbitol), salt-forming counter-ions (e.g., sodium), metal complexes (e.g., Zn-protein complexes); non-ionic surfactants (e.g., Tween), PLURONICS™ and polyethylene glycol (PEG).

[0177] In some embodiments, the agent of the pharmaceutical compositions (e.g., polypeptide, polynucleotide, or small molecule) is modified, e.g., conjugated to a heterologous moiety. The term “conjugated” refers to attached, via a covalent or noncovalent interaction. Conjugation can employ any of suitable linking agents; non-limiting examples include peptide linkers, compound linkers, and chemical cross-linking agents.

[0178] In some embodiments, the heterologous moiety is a marker (e.g., a fluorescent or radioactive marker), a molecule that stabilizes the agent, a molecule that targets the agent (e.g., to a particular cell or tissue, to facilitate or prevent from crossing the blood brain barrier), or a combination thereof.

[0179] In some embodiments, the heterologous moiety is polyethylene glycol (PEG), hexadecanoic acid, hydrogels, nanoparticles, multimerization domains and carrier peptides. In some embodiments, the nanoparticle is a lipid nanoparticle. In some embodiments, the nanoparticle is a polymer nanoparticle. In some embodiments, the polymer is an amphiphilic polymer. In other embodiments, the polymer is a hydrophobic or hydrophilic polymer. Non-limiting examples of polymers include poly(lactic acid)-poly(ethylene glycol), poly(lactic-co-glycolic acid)-poly(ethylene glycol), poly(lactic-co-glycolic) acid (PLGA), poly(lactic-co-glycolic acid)-d-α-tocopheryl polyethylene glycol succinate, poly(lactic-co-glycolic acid)-ethylene oxide fumarate, poly(glycolic acid)-poly(ethylene glycol), polycaprolactone-poly (ethylene glycol), or any salts thereof. In some embodiments, the polymer nanoparticle comprises poly(lactic-co-glycolic) acid (PLGA).

[0180] In some embodiments, the composition (e.g., pharmaceutical composition) is formulated for a suitable administration schedule and route. Non-limiting examples of administration routes include oral, rectal, mucosal, intravenous, intramuscular, subcutaneous and topical, etc. In some embodiments, the composition (e.g., pharmaceutical composition) is stored in the form of an aqueous solution or a dried formulation (e.g., lyophilized). In some embodiments, the composition is formulated to be administered by infusion (e.g., intravenous infusion).

[0181] In some embodiments, the composition is formulated to be administered with one or more additional therapeutic agents (e.g., with a second therapeutic agent) as a combination therapy. As used herein, a “combination therapy” or “administered in combination” means that two (or more) different agents or treatments are administered to a subject as part of a defined treatment regimen for a particular disease or condition. Non-limiting examples of additional agents or treatments include biologics (e.g., antibodies, peptides), cell therapies, gene therapies, immunotherapies, and small molecules used in oncology (e.g., chemotherapeutic agents).

[0182] The treatment regimen defines the doses and periodicity of administration of each agent such that the effects of the separate agents on the subject overlap. In some embodiments, the two or more agents are administered in a sequential manner as part of a prescribed regimen. In other embodiments, the delivery of the two or more agents is simultaneous or concurrent. In some embodiments, the two or more agents are co-formulated. In some embodiments, administration of two or more agents or treatments in combination is such that the reduction in a symptom, or other parameter related to the disorder is greater than what would be observed with one agent or treatment delivered alone or in the absence of the other. The effect of the two treatments can be partially additive, wholly additive, or greater than additive (e.g., synergistic). Each of the two or more therapeutic agents can be administered by any appropriate route including, but not limited to, oral routes, intravenous routes, intramuscular routes, and direct absorption through mucous membrane tissues. The two or more therapeutic agents can be administered by the same route or by different routes.

[0183] In some embodiments, the agent or pharmaceutical composition of the disclosure is delivered by a viral vector, e.g., by contacting a cell with a viral vector, locally administered (e.g., injected) to a tumor, or systemically (e.g., intravenously or orally) administered to a subject (e.g., a human patient).

[0184] Viral genomes provide a rich source of vectors that can be used for the efficient delivery of exogenous genes into a mammalian cell. Viral genomes are particularly useful vectors for gene delivery because the polynucleotides contained within such genomes are typically incorporated into the nuclear genome of a mammalian cell by generalized or specialized transduction. These processes occur as part of the natural viral replication cycle, and do not require added proteins or reagents to induce gene integration. Non-limiting examples of viral vectors include retrovirus (e.g., Retroviridae family viral vector), adenovirus (e.g., Ad5, Ad26, Ad34, Ad35, and Ad48), parvovirus (e.g., adeno-associated viruses), coronavirus, negative strand RNA viruses such as orthomyxovirus (e.g., influenza virus), rhabdovirus (e.g., rabies and vesicular stomatitis virus), paramyxovirus (e.g., measles and Sendai), positive strand RNA viruses, such as picornavirus and alphavirus, and double stranded DNA viruses including adenovirus, herpesvirus (e.g., Herpes Simplex virus types 1 and 2, Epstein-Barr virus, cytomegalovirus, replication deficient herpes virus), and poxvirus (e.g., vaccinia, modified vaccinia Ankara (MVA), fowlpox and canarypox). Additional non-limiting examples include Norwalk virus, togavirus, flavivirus, reoviruses, papovavirus, hepadnavirus, human papilloma virus, human foamy virus, and hepatitis virus, for example. Non-limiting examples of retroviruses include: avian leukosis-sarcoma, avian C-type viruses, mammalian C-type, B-type viruses, D-type viruses, oncoretroviruses, HTLV-BLV group, lentivirus, alpharetrovirus, gammaretrovirus, spumavirus (see, e.g., Coffin J M. Retroviridae: The viruses and their replication. In: Fields B N, Knipe D M, Howley P M et al, eds. Fundamental Virology. 3rd ed. Philadelphia: Lippincott-Raven Publishers, 1996:763-843). Additional non-limiting examples include murine leukemia viruses, murine sarcoma viruses, mouse mammary tumor virus, bovine leukemia virus, feline leukemia virus, feline sarcoma virus, avian leukemia virus, human T-cell leukemia virus, baboon endogenous virus, Gibbon ape leukemia virus, Mason Pfizer monkey virus, simian immunodeficiency virus, simian sarcoma virus, Rous sarcoma virus and lentiviruses. Additional non-limiting examples of vectors are described, for example, in U.S. Pat. No. 5,801,030, the teachings of which are incorporated herein by reference.

[0185] In some embodiments, the agent or pharmaceutical composition of the disclosure is formulated to be delivered by a membrane-based carrier in vivo, in vitro, ex vivo, or in situ. In some embodiments, the membrane-based carrier is a cell-based carrier (e.g., mammalian such as human cells). In some embodiments, the membrane-based carrier is a vesicle-based carrier. In some embodiments, the membrane-based carrier comprises one or more vectors described herein (e.g., a plasmid, virus, viral-like particle or a virosome).

[0186] In some embodiments, the agent or pharmaceutical composition of the disclosure is formulated to be delivered by one or more liposomes. Liposomes are spherical vesicle structures composed of a uni- or multilamellar lipid bilayer surrounding internal aqueous compartments and a relatively impermeable outer lipophilic phospholipid bilayer. Liposomes may be anionic, neutral or cationic. Liposomes are biocompatible, nontoxic, can deliver both hydrophilic and lipophilic drug molecules, protect their cargo from degradation by plasma enzymes, and transport their load across biological membranes and the blood brain barrier (BBB) (see, e.g., Spuch and Navarro, J Drug Deliv. 2011:469679 (2011)).

[0187] Vesicles can be made from several different types of lipids; however, phospholipids are most commonly used to generate liposomes as drug carriers. Methods for preparation of multilamellar vesicle lipids are known in the art (see for example U.S. Pat. No. 6,693,086, the teachings of which relating to multilamellar vesicle lipid preparation are incorporated herein by reference). Although vesicle formation can be spontaneous when a lipid film is mixed with an aqueous solution, it can also be expedited by applying force in the form of shaking by using a homogenizer, sonicator, or an extrusion apparatus (see, e.g., Spuch and Navarro, J Drug Deliv. 2011:469679 (2011)). Extruded lipids can be prepared by extruding through filters of decreasing size, as described in Templeton et al., Nature Biotech, 15:647-52 (1997), the teachings of which relating to extruded lipid preparation are incorporated herein by reference.

[0188] In some embodiments, the agent or pharmaceutical composition of the disclosure is formulated to be delivered by lipid nanoparticles (LNPs). In one embodiment, the LNP preparation comprising the agent or pharmaceutical composition of the disclosure has one or more of the following characteristics: (a) the LNP preparation comprises a cationic lipid, a neutral lipid, a cholesterol, and a PEG lipid, (b) the LNP preparation has a mean particle size of between 80 nm and 160 nm.

[0189] Nanostructured lipid carriers (NLCs) are modified solid lipid nanoparticles (SLNs) that retain the characteristics of the SLN, improve drug stability and loading capacity, and prevent drug leakage. Polymer nanoparticles (PNPs) are an important component of drug delivery. These nanoparticles can effectively direct drug delivery to specific targets and improve drug stability and controlled drug release. Lipid-polymer nanoparticles (PLNs), a new type of carrier that combines liposomes and polymers, may also be employed. These nanoparticles possess the complementary advantages of PNPs and liposomes. A PLN is composed of a core-shell structure; the polymer core provides a stable structure, and the phospholipid shell offers good biocompatibility. As such, the two components increase the drug encapsulation efficiency rate, facilitate surface modification, and prevent leakage of water-soluble drugs. See, e.g., Li et al., Nanomaterials 7 (6): 122 (2017).

[0190] In some embodiments, the agent or pharmaceutical composition of the disclosure is formulated to be delivered by a carbohydrate carrier (e.g., an anhydride-modified phytoglycogen or glycogen-type material). Non-limiting examples of carbohydrate carriers include phytoglycogen octenyl succinate, phytoglycogen beta-dextrin and anhydride-modified phytoglycogen beta-dextrin.

[0191] In some embodiments, the agent or pharmaceutical composition of the disclosure is formulated to be delivered by a protein carrier (e.g., a protein covalently linked to the circular polyribonucleotide). Non-limiting examples of protein carriers include human serum albumin (HSA), low-density lipoprotein (LDL), high-density lipoprotein (HDL) and globulin.

[0192] In some embodiments, the agent or pharmaceutical composition of the disclosure is formulated to be delivered by a cationic carrier (e.g., a cationic lipopolymer or transfection reagent). Non-limiting examples of cationic carriers include lipofectamine, polyethylenimine, poly(trimethylenimine), poly(tetramethylenimine), polypropylenimine, aminoglycoside-polyamine, dideoxy-diamino-b-cyclodextrin, spermine, spermidine, poly(2-dimethylamino)ethyl methacrylate, poly(lysine), poly(histidine), poly(arginine), cationized gelatin, dendrimers, chitosan, 1,2-Dioleoyl-3-Trimethylammonium-Propane (DOTAP), N-[1-(2,3-dioleoyloxy) propyl]-N,N,N-trimethylammonium chloride (DOTMA), 1-[2-(oleoyloxy)ethyl]-2-oleyl-3-(2-hydroxyethyl) imidazolinium chloride (DOTIM), 2,3-dioleyloxy-N-[2 (sperminecarboxamido)ethyl]-N,N-dimethyl-1-propanaminium trifluoroacetate (DOSPA), 3B—[N—(N\N′-Dimethylaminoethane)-carbamoyl]Cholesterol Hydrochloride (DC-Cholesterol HCl), diheptadecylamidoglycyl spermidine (DOGS), N,N-distearyl-N,N-dimethylammonium bromide (DDAB), N-(1,2-dimyristyloxyprop-3-yl)-N,N-dimethyl-N-hydroxyethyl ammonium bromide (DMRIE) and N,N-dioleyl-N,N-dimethylammonium chloride (DODAC).

[0193] In some embodiments, the agent or pharmaceutical composition of the disclosure is formulated to be delivered by exosomes, adipocytes and/or red blood cells. See, e.g., Ha et al., Acta Pharm Sin B. 6 (4): 287-96 (2016).

[0194] In some embodiments, the agent or pharmaceutical composition of the disclosure is formulated to be delivered by one or more Fusosomes. Fusosomes have been engineered to confer target cell specificity for the fusion and payload delivery, allowing the creation of delivery vehicles with programmable cell specificity. See, e.g., Patent Application WO2020014209, the teachings of which relating to fusosome design, preparation, and usage are incorporated herein by reference.

[0195] In some embodiments, the agent or pharmaceutical composition of the disclosure is formulated to be delivered by ex vivo differentiated red blood cells. See, e.g., WO2015073587; WO2017123646; WO2017123644; WO2018102740; WO2016183482; WO2015153102; WO2018151829; WO2018009838; Shi et al., PNAS, 111 (28): 10131-36 (2014); U.S. Pat. No. 9,644,180; Huang et al., Nature Communications 8:423 (2017).

[0196] In some embodiments, the agent or pharmaceutical composition of the disclosure is formulated to be delivered by one or more microsomes, virus-like particles (VLPs) or plant nanovesicles and plant messenger packs (PMPs). See, e.g., WO2011097480, WO2013070324, WO2017004526 and WO2020041784.

[0197] In some embodiments, the agent or pharmaceutical composition of the disclosure is formulated to be delivered by one or more anellosomes. The making and use of anellosomes used for delivery of therapeutic products is described in U.S. Pat. No. 11,166,996, the teachings of which relating to anellosome design, preparation, and usage are incorporated herein by reference.

### Methods

[0198] In another aspect, the disclosure provides a method of detecting a cancer or predicting a likelihood of (or risk level for) developing cancer in a subject, comprising quantifying an expression or activity of a target protein in a sample from the subject, wherein the level of expression or activity of the target protein in the sample is indicative of the likelihood of developing cancer in the subject.

[0199] In another aspect, the disclosure provides a method of classifying a subject based on a predicted likelihood of developing cancer, comprising quantifying an expression or activity of a target protein in a sample from the subject; predicting the likelihood of developing cancer based on the expression or activity of the target protein in the sample; and classifying the patient based on the predicted likelihood.

[0200] In another aspect, the disclosure provides a method of stratifying a set of subjects having cancer, comprising: quantifying an expression and/or activity of a target protein in samples from individual subjects in the set; and stratifying the set of subjects for treatment according to the individual subjects' levels of the expression and/or activity of the target protein in the samples.

[0201] In some embodiments, a higher expression or activity level of a target protein in a sample from the subject, relative to an appropriate control (e.g., reference standard) is indicative of the cancer or a likelihood of developing the cancer. In some embodiments, a lower expression or activity level of a target protein in a sample from the subject, relative to an appropriate control (e.g., reference standard) is indicative of the cancer or a likelihood of developing the cancer.

[0202] In some embodiments, the method further comprises administering to a subject who is determined to have or predicted to have a likelihood (or be at risk) of developing cancer, an effective amount of an agent disclosed herein or a pharmaceutical composition disclosed herein.

[0203] In some embodiments, the method further comprises administering to a subject who is determined to have or predicted to have a likelihood of developing cancer, an effective amount of an agent disclosed herein or a pharmaceutical composition disclosed herein.

[0204] In another aspect, the disclosure provides a method of preparing a sample that is useful for detecting a likelihood of developing cancer in a subject, comprising:
[0205] a) obtaining or having obtained a sample from the subject;
[0206] b) adding a protease inhibitor, a control peptide, a standard peptide, or a combination thereof to the sample to prepare a sample that is useful for detecting a likelihood of developing cancer; and
[0207] c) quantifying an expression or activity of a target protein in the sample prepared in step b).

[0208] In another aspect, the disclosure provides a method of treating a cancer in a subject in need thereof, comprising administering to the subject an effective amount of an agent disclosed herein or a pharmaceutical composition disclosed herein.

[0209] In another aspect, the disclosure provides a method of treating a cancer in a subject in need thereof, comprising administering to the subject an effective amount of an agent disclosed herein or a pharmaceutical composition disclosed herein, wherein the subject has an altered level of expression and/or activity of a target protein disclosed herein.

[0210] “Treatment” and “treating,” as used herein, refer to the medical management of a subject with the intent to improve, ameliorate, stabilize (i.e., not worsen), prevent or cure a disease, pathological condition, or disorder. “Treatment” includes active treatment (treatment directed to improve the disease, pathological condition, or disorder), causal treatment (treatment directed to the cause of the associated disease, pathological condition, or disorder), palliative treatment (treatment designed for the relief of symptoms), preventative treatment (treatment directed to minimizing or partially or completely inhibiting the development of the associated disease, pathological condition, or disorder); and supportive treatment (treatment employed to supplement another therapy). Treatment also includes diminishing the extent of the disease or condition; preventing spread of the disease or condition; delaying or slowing the progress of the disease or condition; ameliorating or palliating the disease or condition; and remission (whether partial or total), whether detectable or undetectable. “Ameliorating” or “palliating” a disease or condition means that the extent and/or undesirable clinical manifestations of the disease, disorder, or condition are lessened and/or time course of the progression is slowed or lengthened, as compared to the extent or time course in the absence of treatment. “Treatment” also includes prolonging survival as compared to expected survival if not receiving treatment. Those in need of treatment include those already with the condition or disorder, as well as those prone to have the condition or disorder or those in which the condition or disorder is to be prevented.

[0211] In some embodiments, the subject is an animal. In other embodiments the subject is a bird, e.g., a hen, rooster, turkey or parrot. In some embodiments, the subject is a mammal. In some embodiments the subject is a non-human mammal. Non-limiting examples of a non-human mammal include cattle (e.g., dairy or beef cattle), sheep, goat, pig, horse, dog, cat, mouse, rat, etc. In some embodiments, the subject is a human. In some embodiments, the human is a neonate. In some embodiments, the human is a pediatric patient. In some embodiments, the human is a juvenile. In some embodiments, the human is an adult. In some embodiments, the human is less than 18 years old. In some embodiments, the human is at least 18 years old. In some embodiments, the human is between 18 and 25 years old. In some embodiments, the human is at least 25 years old, e.g., at least 30, 35, 40, 45, 50, 55, 60, 65, 70, 75, or 80 years old.

[0212] As used herein, the term “effective amount,” “therapeutically effective amount,” or “sufficient amount” refers to a quantity sufficient to, when administered to a subject (e.g., a mammal such as a human cancer patient), effect treatment (e.g., produce beneficial or desired results), including effects at cellular, tissue or clinical levels, etc. As such, the term depends upon the context in which it is being applied. For example, in the context of treating cancer, it is an amount of an agent sufficient to achieve a response as compared to the response obtained without administration of the agent. The amount of a given composition described herein that will correspond to such an amount will vary depending upon various factors, such as the given agent, the pharmaceutical formulation, the route of administration, the type of disease or disorder, the identity of the subject (e.g., age, sex, weight) or host being treated, and the like, but can nevertheless be routinely determined by one skilled in the art. In some embodiments, a “therapeutically effective amount” of a composition of the present disclosure is an amount that results in a beneficial or desired result in a subject (e.g., as compared to a control). A therapeutically effective amount of a composition of the present disclosure may be readily determined by one of ordinary skill by routine methods known in the art. Dosage regimen may be adjusted to provide the optimum therapeutic response.

[0213] In some embodiments, the effective amount is sufficient to reduce cancer (e.g., tumor) growth, proliferation, metastasis, invasion, migration, innervation, or a combination of the foregoing. In certain embodiments, said reduction is by at least about 10%, e.g., by at least about: 15%, 20%, 25%, 30%, 35%, 40%, 45%, 50%, 55%, 60%, 65%, 70%, 75%, 80%, 85%, 90%, 91%, 92%, 93%, 94%, 95%, 96%, 97%, 98% or 99%. In particular embodiments, said reduction is about 10-99%, e.g., about: 10-98%, 15-98%, 15-97%, 20-97%, 20-96%, 25-96%, 25-95%, 30-95%, 30-94%, 35-94%, 35-93%, 40-93%, 40-92%, 45-92%, 45-91%, 50-91%, 50-90%, 55-90%, 55-85%, 60-85%, 60-80%, 65-80%, 65-75%, or 70-75%.

[0214] In certain embodiments, the effective amount is sufficient to reduce expression of the target protein. In some embodiments, said reduction is by at least about 10%, e.g., by at least about: 15%, 20%, 25%, 30%, 35%, 40%, 45%, 50%, 55%, 60%, 65%, 70%, 75%, 80%, 85%, 90%, 91%, 92%, 93%, 94%, 95%, 96%, 97%, 98% or 99%. In particular embodiments, said reduction is about 10-99%, e.g., about: 10-98%, 15-98%, 15-97%, 20-97%, 20-96%, 25-96%, 25-95%, 30-95%, 30-94%, 35-94%, 35-93%, 40-93%, 40-92%, 45-92%, 45-91%, 50-91%, 50-90%, 55-90%, 55-85%, 60-85%, 60-80%, 65-80%, 65-75%, or 70-75%.

[0215] In certain embodiments, the effective amount is sufficient to increase expression of the target protein. In some embodiments, said increase is by at least about 10%, e.g., by at least about: 15%, 20%, 25%, 30%, 35%, 40%, 45%, 50%, 55%, 60%, 65%, 70%, 75%, 80%, 85%, 90%, 91%, 92%, 93%, 94%, 95%, 96%, 97%, 98% or 99%. In particular embodiments, said increase is about 10-99%, e.g., about: 10-98%, 15-98%, 15-97%, 20-97%, 20-96%, 25-96%, 25-95%, 30-95%, 30-94%, 35-94%, 35-93%, 40-93%, 40-92%, 45-92%, 45-91%, 50-91%, 50-90%, 55-90%, 55-85%, 60-85%, 60-80%, 65-80%, 65-75%, or 70-75%. In some embodiments, said increase is by about 1-100 fold, e.g., by about: 1-75, 1-50, 1-25, 1-20, 1-15, 1-10, 1-8, 1-6, 1-5, 1-4, 1-3 or 1-2 fold.

[0216] In some embodiments, the effective amount is sufficient to prevent death of a subject thereby reducing the cancer (e.g., tumor) death rate. In certain embodiments, the reduction in cancer (e.g., tumor) death rate is by at least about 10%, e.g., by at least about: 15%, 20%, 25%, 30%, 35%, 40%, 45%, 50%, 55%, 60%, 65%, 70%, 75%, 80%, 85%, 90%, 91%, 92%, 93%, 94%, 95%, 96%, 97%, 98% or 99%. In particular embodiments, the reduction in cancer (e.g., tumor) death rate is about 10-99%, e.g., about: 10-98%, 15-98%, 15-97%, 20-97%, 20-96%, 25-96%, 25-95%, 30-95%, 30-94%, 35-94%, 35-93%, 40-93%, 40-92%, 45-92%, 45-91%, 50-91%, 50-90%, 55-90%, 55-85%, 60-85%, 60-80%, 65-80%, 65-75%, or 70-75%.

[0217] In some embodiments, the effective amount is sufficient to modulate tumor autophagy, for example, by increasing at least one tumor-inhibiting function of autophagy and/or reducing at least one tumor-promoting function of autophagy.

[0218] In some embodiments, the effective amount is sufficient to reduce cancer cell proliferation or tumor growth in the subject. In some embodiments, the reduction in cancer cell proliferation or tumor growth is by at least about 10%, e.g., by at least about: 15%, 20%, 25%, 30%, 35%, 40%, 45%, 50%, 55%, 60%, 65%, 70%, 75%, 80%, 85%, 90%, 91%, 92%, 93%, 94%, 95%, 96%, 97%, 98% or 99%. In some embodiments, the reduction in cancer cell proliferation or tumor growth is about 10-99%, e.g., about: 10-98%, 15-98%, 15-97%, 20-97%, 20-96%, 25-96%, 25-95%, 30-95%, 30-94%, 35-94%, 35-93%, 40-93%, 40-92%, 45-92%, 45-91%, 50-91%, 50-90%, 55-90%, 55-85%, 60-85%, 60-80%, 65-80%, 65-75%, or 70-75%.

[0219] In certain embodiments, the effective amount is sufficient to modulate expression of the target protein in an immune cell.

[0220] In some embodiments, the effective amount is sufficient to modulate the subject's immune system against cancer (e.g., modulate, such as increase, an immune response to the cancer in a subject). In certain embodiments, the effective amount is sufficient to modulate (e.g., increase or decrease) at least one immune cell-related readout. Non-limiting examples of immune cell-related readouts include immune-cell activation, degranulation, maturation, migration, polarization, proliferation and recruitment; lymph-node activation, differentiation, egress, homing, innervation and polarization; cytokine production; antigen presentation; antibody-dependent cellular cytotoxicity (ADCC); and antibody-dependent cellular phagocytosis (ADCP).

[0221] In some embodiments, the effective amount is sufficient to modulate development of high endothelial venules (HEVs) and/or tertiary lymphoid organs (TLOs); immune-cell activation, degranulation, differentiation, maturation, migration, polarization, proliferation, and/or recruitment; lymph-node activation, egress, homing, and/or polarization; cytokine production; antigen presentation; inflammation; auto-antibody levels; organ function; rate and/or number of relapses and/or flare-ups; viral load; infection, or a combination of the foregoing.

[0222] In particular embodiments, the effective amount is sufficient to inhibit cancer cell growth, proliferation, metastasis, invasion or migration, or a combination of the foregoing; promote cancer cell death; induce cancer cell autophagy, or a combination of the foregoing.

[0223] In some embodiments, the effective amount is sufficient to modulate (e.g., increase or decrease) the development of HEVs and/or TLOs, migration of an immune cell (e.g., an antigen presenting cell (such as a dendritic cell and/or a macrophage) and/or a T cell), proliferation of an immune cell, recruitment of an immune cell (e.g., an antigen presenting cell (such as a dendritic cell and/or a macrophage), a monocyte, a T cell, and/or a B cell), lymph node homing of an immune cell (e.g., a dendritic cell and/or a T cell), lymph node egress of an immune cell (e.g., a dendritic cell and/or a T cell), tumor homing of an immune cell (e.g. a T cell); increase tumor egress of an immune cell (e.g., a regulatory T cell) decrease tumor egress of an immune cell (e.g., a CD8⁺ T cell) or a combination of the foregoing.

[0224] In some embodiments, the effective amount is sufficient to modulate the body's response to cancer, for example, by inhibiting the growth of cancer, reducing malignancy of cancer, inhibiting metastasis of cancer, promoting remission, modulating (increasing and/or decreasing) immune-mediated responses related to cancer, or a combination of the foregoing.

[0225] In some embodiments, the effective amount is sufficient to modulate nuclear factor kappa B (NF-κB) signaling, growth-factor signaling, cell death (e.g., apoptosis), cell cycle (e.g., mitosis), cell migration, inflammation, or a combination of the foregoing.

[0226] A therapeutic agent described herein can be administered via a variety of routes of administration, including, for example, oral, dietary, topical, transdermal, rectal, parenteral (e.g., intra-arterial, intravenous, intramuscular, subcutaneous injection, intradermal injection), intravenous infusion and inhalation (e.g., intrabronchial, intranasal or oral inhalation, intranasal drops) routes of administration, depending on the compound and the particular disease or condition to be treated. Administration can be local or systemic as indicated. The preferred mode of administration can vary depending on the particular compound chosen.

[0227] In some embodiments, the method further comprises administering a therapeutically effective amount of one or more additional therapeutic agents (e.g., a second therapeutic agent) to the subject.

[0228] Administration of two or more therapeutic agents encompasses co-administration of the therapeutic agents in a substantially simultaneous manner, such as in a pharmaceutical combination. Alternatively, such administration encompasses co-administration in multiple containers, or separate containers (e.g., capsules, powders, and liquids) for each therapeutic agent. Such administration also encompasses use of the therapeutic agents in a sequential manner, either at approximately the same time or at different times. When two or more therapeutic agents are administered, the therapeutic agents can be administered via the same administration route or via different administration routes.

[0229] In another aspect, the disclosure provides a method of modulating the expression or activity of a target protein identified in the Sequence Listing, Table A, or a variant thereof in a cell, comprising contacting the cell with an agent disclosed herein or a pharmaceutical composition disclosed herein. In some embodiments, the cell is in a subject.

[0230] In another aspect, the disclosure provides a method of identifying an agent that modulates the expression and/or activity of a target protein (e.g., a target protein in the Sequence Listing, Table A, or a variant thereof), comprising:
[0231] a) contacting a sample (e.g., a biological sample, such as cells or a tissue) comprising the target protein with an agent (e.g., a candidate agent to be tested for its ability to modulate expression and/or activity of the target); and
[0232] b) determining whether the agent modulates the expression or activity of the target protein,
   wherein a difference in the expression or activity of the target protein that has been contacted with the agent compared to a reference indicates that the agent modulates the expression or activity of the target protein.

[0233] In some embodiments, a difference of at least about 10% in the expression or activity of the protein that has been contacted with the agent compared to the reference indicates that the agent modulates the expression or activity of the protein. In some embodiments, the difference is at least about: 15%, 20%, 25%, 30%, 35%, 40%, 45% or 50% or more.

[0234] In some embodiments, a decrease in the expression or activity of the target protein that has been contacted with the agent compared to the reference indicates the agent inhibits the expression or activity of the target protein. In some embodiments, an increase in the expression or activity of the protein compared to the reference indicates the agent activates the expression or activity of the protein.

### Cancer

[0235] A wide variety of cancers is treatable according to the methods described herein. In some embodiments, the cancer comprises a solid tumor (e.g., a tumor of the breast, lung, prostate, colon, bladder, ovary, kidney, stomach, colon, rectum, testes, head and/or neck, pancreas, brain, skin). Accordingly, in some embodiments, the cancer is a solid tumor cancer. Solid tumor cancers that can be treated according to the methods described herein include breast cancer, lung cancer, prostate cancer, colon cancer, bladder cancer, ovarian cancer, renal cancer, gastric cancer, colon cancer, rectal cancer, colorectal cancer, testicular cancer, head and neck cancer, pancreatic cancer, brain cancer and skin cancer. In some embodiments, the cancer is a hematologic cancer (e.g., leukemia, lymphoma, myeloma). Hematologic cancers that can be treated according to the methods described herein include leukemias (e.g., acute leukemias, chronic leukemias), lymphomas (e.g., B-cell lymphoma, T-cell lymphoma) and multiple myeloma.

[0236] Examples of cancers treatable according to the methods described herein include Acute Lymphoblastic Leukemia (ALL); Acute Myeloid Leukemia (AML); Adrenocortical Carcinoma; Adrenocortical Carcinoma, Childhood; AIDS-Related Cancer (e.g., Kaposi Sarcoma, AIDS-Related Lymphoma, Primary CNS Lymphoma); Anal Cancer; Appendix Cancer; Astrocytomas, Childhood; Atypical Teratoid/Rhabdoid Tumor, Childhood, Central Nervous System; Basal Cell Carcinoma of the Skin; Bile Duct Cancer; Bladder Cancer; Bladder Cancer, Childhood; Bone Cancer (including Ewing Sarcoma, Osteosarcoma and Malignant Fibrous Histiocytoma); Brain Tumors/Cancer; Breast Cancer; Burkitt Lymphoma; Carcinoid Tumor (Gastrointestinal); Carcinoid Tumor, Childhood; Cardiac (Heart) Tumors, Childhood; Embryonal Tumors, Childhood; Germ Cell Tumor, Childhood; Primary CNS Lymphoma; Cervical Cancer; Childhood Cervical Cancer; Cholangiocarcinoma; Chordoma, Childhood; Chronic Lymphocytic Leukemia (CLL); Chronic Myelogenous Leukemia (CML); Chronic Myeloproliferative Neoplasms; Colorectal Cancer; Childhood Colorectal Cancer; Craniopharyngioma, Childhood; Cutaneous T-Cell Lymphoma (e.g., Mycosis Fungoides and Sézary Syndrome); Ductal Carcinoma In Situ (DCIS); Embryonal Tumors, Central Nervous System, Childhood; Endometrial Cancer (Uterine Cancer); Ependymoma, Childhood; Esophageal Cancer; Childhood Esophageal Cancer; Esthesioneuroblastoma; Ewing Sarcoma; Extracranial Germ Cell Tumor, Childhood; Extragonadal Germ Cell Tumor; Eye (Ocular) Cancer; Childhood Intraocular Melanoma; Intraocular Melanoma; Retinoblastoma; Fallopian Tube Cancer; Fibrous Histiocytoma of Bone, Malignant, and Osteosarcoma; Gallbladder Cancer; Gastric (Stomach) Cancer; Childhood Gastric (Stomach) Cancer; Gastrointestinal Carcinoid Tumor; Gastrointestinal Stromal Tumors (GIST); Childhood Gastrointestinal Stromal Tumors; Germ Cell Tumors; Childhood Central Nervous System Germ Cell Tumors (e.g., Childhood Extracranial Germ Cell Tumors, Extragonadal Germ Cell Tumors, Ovarian Germ Cell Tumors, Testicular Cancer); Gestational Trophoblastic Disease; Hairy Cell Leukemia; Head and Neck Cancer; Heart Tumors, Childhood; Hepatocellular (Liver) Cancer; Histiocytosis, Langerhans Cell; Hodgkin Lymphoma; Hypopharyngeal Cancer; Intraocular Melanoma; Childhood Intraocular Melanoma; Islet Cell Tumors, Pancreatic Neuroendocrine Tumors; Kaposi Sarcoma; Kidney (Renal Cell) Cancer; Langerhans Cell Histiocytosis; Laryngeal Cancer; Leukemia; Lip and Oral Cavity Cancer; Liver Cancer; Lung Cancer (Non-Small Cell and Small Cell); Childhood Lung Cancer; Lymphoma; Male Breast Cancer; Malignant Fibrous Histiocytoma of Bone and Osteosarcoma; Melanoma; Childhood Melanoma; Melanoma, Intraocular (Eye); Childhood Intraocular Melanoma; Merkel Cell Carcinoma; Mesothelioma, Malignant; Childhood Mesothelioma; Metastatic Cancer; Metastatic Squamous Neck Cancer with Occult Primary; Midline Tract Carcinoma With NUT Gene Changes; Mouth Cancer; Multiple Endocrine Neoplasia Syndromes; Multiple Myeloma/Plasma Cell Neoplasms; Mycosis Fungoides; Myelodysplastic Syndromes, Myelodysplastic/Myeloproliferative Neoplasms; Myelogenous Leukemia, Chronic (CML); Myeloid Leukemia, Acute (AML); Myeloproliferative Neoplasms, Chronic; Nasal Cavity and Paranasal Sinus Cancer; Nasopharyngeal Cancer; Neuroblastoma; Non-Hodgkin Lymphoma; Non-Small Cell Lung Cancer; Oral Cancer, Lip and Oral Cavity Cancer and Oropharyngeal Cancer; Osteosarcoma and Malignant Fibrous Histiocytoma of Bone; Ovarian Cancer; Childhood Ovarian Cancer; Pancreatic Cancer; Childhood Pancreatic Cancer; Pancreatic Neuroendocrine Tumors; Papillomatosis (Childhood Laryngeal); Paraganglioma; Childhood Paraganglioma; Paranasal Sinus and Nasal Cavity Cancer; Parathyroid Cancer; Penile Cancer; Pharyngeal Cancer; Pheochromocytoma; Childhood Pheochromocytoma; Pituitary Tumor; Plasma Cell Neoplasm/Multiple Myeloma; Pleuropulmonary Blastoma; Pregnancy and Breast Cancer; Primary Central Nervous System (CNS) Lymphoma; Primary Peritoneal Cancer; Prostate Cancer; Rectal Cancer; Recurrent Cancer; Renal Cell (Kidney) Cancer; Retinoblastoma; Rhabdomyosarcoma, Childhood; Salivary Gland Cancer; Sarcoma (e.g., Childhood Rhabdomyosarcoma, Childhood Vascular Tumors, Ewing Sarcoma, Kaposi Sarcoma, Osteosarcoma (Bone Cancer), Soft Tissue Sarcoma, Uterine Sarcoma); Sézary Syndrome; Skin Cancer; Childhood Skin Cancer; Small Cell Lung Cancer; Small Intestine Cancer; Soft Tissue Sarcoma; Squamous Cell Carcinoma of the Skin; Squamous Neck Cancer with Occult Primary, Metastatic; Stomach (Gastric) Cancer; Childhood Stomach (Gastric) Cancer; T-Cell Lymphoma, Cutaneous (e.g., Mycosis Fungoides and Sèzary Syndrome); Testicular Cancer; Childhood Testicular Cancer; Throat Cancer (e.g., Nasopharyngeal Cancer, Oropharyngeal Cancer, Hypopharyngeal Cancer); Thymoma and Thymic Carcinoma; Thyroid Cancer; Transitional Cell Cancer of the Renal Pelvis and Ureter; Ureter and Renal Pelvis, Transitional Cell Cancer; Urethral Cancer; Uterine Cancer, Endometrial; Uterine Sarcoma; Vaginal Cancer; Childhood Vaginal Cancer; Vascular Tumors; Vulvar Cancer; and Wilms Tumor and Other Childhood Kidney Tumors.

[0237] Metastases of the aforementioned cancers can also be treated in accordance with the methods described herein. In some embodiments, the cancer is a metastatic cancer.

[0238] In some embodiments, the cancer is selected from lung cancer, breast cancer, Hodgkin's lymphoma, diffuse large B-cell lymphoma, follicular lymphoma, primary central nervous system lymphoma, chronic lymphocytic leukemia, epithelial ovarian cancer, prostate cancer, squamous cell carcinoma, non-melanoma skin cancer, nasal polyps, basal cell carcinoma, keratinocyte cancer, multiple myeloma, serous invasive ovarian cancer, hepatocellular carcinoma, small cell lung carcinoma, adenocarcinoma, lung adenocarcinoma, non-small cell lung cancer, ovarian cancer or colorectal cancer.

[0239] Unless otherwise defined, all terms of art, notations and other scientific terms or terminology used herein are intended to have the meanings commonly understood by those of skill in the art to which this disclosure pertains. In some cases, terms with commonly understood meanings are defined herein for clarity and/or for ready reference, and the inclusion of such definitions herein should not necessarily be construed to represent a substantial difference over what is generally understood in the art. It will be further understood that terms, such as those defined in commonly-used dictionaries, should be interpreted as having a meaning that is consistent with their meaning in the context of the relevant art and/or as otherwise defined herein.

[0240] The terminology used herein is for the purpose of describing particular embodiments only and is not intended to be limiting.

[0241] As used herein, the indefinite articles “a,” “an” and “the” should be understood to include plural reference unless the context clearly indicates otherwise.

[0242] Throughout this specification and the claims which follow, unless the context requires otherwise, the word “comprise,” and variations such as “comprises” and “comprising”, will be understood to imply the inclusion of, e.g., a stated integer or step or group of integers or steps, but not the exclusion of any other integer or step or group of integer or step. When used herein, the term “comprising” can be substituted with the term “containing” or “including.”

[0243] As used herein, “consisting of” excludes any element, step, or ingredient not specified in the claim element. When used herein, “consisting essentially of” does not exclude materials or steps that do not materially affect the basic and novel characteristics of the claim. Any of the terms “comprising,” “containing,” “including,” and “having,” whenever used herein in the context of an aspect or embodiment of the disclosure, can in some embodiments, be replaced with the term “consisting of,” or “consisting essentially of” to vary scopes of the disclosure.

[0244] As used herein, the conjunctive term “and/or” between multiple recited elements is understood as encompassing both individual and combined options. For instance, where two elements are conjoined by “and/or,” a first option refers to the applicability of the first element without the second. A second option refers to the applicability of the second element without the first. A third option refers to the applicability of the first and second elements together. Any one of these options is understood to fall within the meaning, and, therefore, satisfy the requirement of the term “and/or” as used herein. Concurrent applicability of more than one of the options is also understood to fall within the meaning, and, therefore, satisfy the requirement of the term “and/or.”

[0245] When a list is presented, unless stated otherwise, it is to be understood that each individual element of that list, and every combination of that list, is a separate embodiment. For example, a list of embodiments presented as “A, B, or C” is to be interpreted as including the embodiments, “A,” “B,” “C,” “A or B,” “A or C,” “B or C,” or “A, B, or C.”

### EXEMPLIFICATION

### Example 1: Validation of a Target Protein as an Oncogene in a Cell Cycle Assay

[0246] This example demonstrates the validation of a target protein of the disclosure as a contributor to tumor growth and/or accelerated cell cycle progression.

[0247] Stable tumor cell lines with increased or decreased levels of the target protein or controls are generated. The proliferation rates of the generated cell lines are compared. If the proliferation rate of the generated cell lines correlates with the level of target protein then the target protein is an oncogene.

### Materials and Methods:

[0248] Over-expression: Stable over-expression tumor cell lines are made by transfection using lipofectamine 3000 (ThermoFisher) of pcDNA3.1_Myc plasmids (GenScript Inc) containing: 1) no insert, 2) a target protein-encoding sequence, 3) a scrambled version of the target protein-encoding sequence (negative control), or 4) the Gfi-1 protein (positive control for cell proliferation; doi.org/10.1038/sj.one.1205216), into Jurkat E6-1 (T-cell line; ATCC). This vector adds a Myc-tag (EQKLISEEDL) to the C-terminus of the expressed protein. Post-transfection, stable cell mixed populations are selected for with neomycin for 6-10 days. Expression of the target protein and scramble protein are confirmed by immunoblot of 10 μg of cell lysate using an anti-myc-tag polyclonal antibody (Abcam). Clonal cell lines are produce by serial dilutions with continuous selection.

[0249] Target Protein Knock-out: The effects of target protein deletion in a disease relevant tumor cell line (Jurkat E6-1) are determined by Alt-R CRISPR-Cas9 knock-out via RNP particle transfected via electroporation (Idtdna.com). The target protein is knocked-out as well as the REL protein (positive control; ⋅ DOI: 10.1016/j.molimm.2020.06.029) and a no-guide (negative control). Neomycin resistance is conferred on the successfully transfected cells. Clonal cell lines are produced by serial dilutions with continuous selection. Knock-out is confirmed by genotype sequencing.

[0250] Proliferation: Clonal cell lines that over-express the target protein or control, wild-type Jurkat E6-1 cells, and clonal cell lines with the endogenous target protein and controls knocked out are plated at 10,000 or 40,000 cells per well, grown in standard media and then subjected to the MTT (3-(4,5-dimethylthiazol-2-yl)-2,5-diphenyltetrazolium bromide) assay. The MTT assay (Abcam) is a measure of the metabolic activity of group of cells. The higher the metabolic activity the higher the proliferation rate.

[0251] Cell Cycle Progression: Clonal cell lines that over-express the target protein or control, wild-type Jurkat E6-1 cells, and clonal cell lines with the endogenous target protein and controls knocked out are plated at 10,000 or 40,000 cells per well grown in both standard media and, separately, media supplemented with phorbol ester compound (at levels known to induce G1 cell cycle arrest) and then subjected to propridium iodide staining and cell cycle analysis by cytometer (doi.org/10.1038/sj.one.1205216).

[0252] Over-expression of Gfi-1 (positive control) leads to increased Jurkat cell proliferation and accelerates S-phase entry of Jurkat cells compared to wild-type and scramble over-expression. Knock-out of the c-REL oncogene leads to decreased proliferation compared to the no guide control. Interestingly, over-expression of the target protein, like the positive control oncogenes leads to increased proliferation and accelerates S-phase entry while knock out of the target protein leads to a decrease in proliferation. Taken together, these experiments demonstrate that the target protein is an oncogene and that targeting this protein may benefit patients suffering from cancer, specifically leukemias.

### Example 2: Validation of a Target Protein as an Oncogene Wherein the Target Protein has a Gain of Function Driver Mutation

[0253] This example demonstrates the validation of a target protein of the disclosure that contains mutations (determined by Genome Wide Association Studies (GWAS) and/or cataloged in The Cancer Genome Atlas (TCGA)) found in cancer tissue. These mutations can facilitate cancer progression by activating an oncogenic target protein.

[0254] Stable tumor cell lines over-expressing the target protein with wild type and cataloged TCGA or GWAS mutations are generated. Furthermore, in tumor cell lines that express the wild-type target protein, CRISPR-Cas9 is used to replace the wild type protein with the mutated target protein. The proliferation rate and apoptosis rate (basal and induced) of the generated cell lines are compared. If the target protein mutation increases the proliferation rate and/or slows the apoptosis rate, then the target protein is an oncogene and the mutation is a gain-of-function mutation with respect to the cancer disease phenotype.

### Materials and Methods:

[0255] Over-expression: Stable over-expression tumor cell lines are made by transfection using lipofectamine 3000 (ThermoFisher) of pcDNA3.1_Myc plasmids (GenScript Inc) containing: 1) no insert, 2) wild type target protein encoding sequence, 3) a mutant version of the target protein encoding sequence (a mutation found in cancers; TCGA and/or GWAS), or 4) the oncoprotein Gfi-1 protein (positive control for cell proliferation; doi.org/10.1038/sj.one.1205216), into Jurkat E6-1 (T-cell line; ATCC). This vector adds a Myc-tag (EQKLISEEDL) to the C-terminus of the expressed protein. Post-transfection, stable cell mixed populations are selected for with neomycin for 6-10 days. Expression of the target protein and mutant protein are confirmed by immunoblot of 10 μg of cell lysate using anti-myc-tag polyclonal antibody (Abcam). Clonal cell lines are produce by serial dilutions with continuous selection.

[0256] Mutant Target Protein Knock-in: The wild-type target protein is expressed in Jurkat E6 cells. To determine if mutations seen in some cancer patients confer disease associated phenotypes on cancer cells, CRISPR-Cas9 is used to replace the wild-type target protein with the mutant versions of the target protein. As a control for a CRISPR-Cas9 treated cell line having increased apoptosis, the FAU tumor suppressor is knocked-out separately. Clonal cell lines are produced by serial dilutions with continuous selection. Knock-out and replacement is confirmed by genotype sequencing.

[0257] Proliferation: Clonal cell lines are plated at 10,000 or 40,000 cells per well grown in standard media, and 24 hours later are subjected to the MTT (3-(4,5-dimethylthiazol-2-yl)-2,5-diphenyltetrazolium bromide) assay. The MTT assay (Abcam) is a measure of the metabolic activity of group of cells. The higher the metabolic activity the higher the proliferation rate.

[0258] Apoptosis: Clonal cell lines are plated at 10,000 or 40,000 cells per well, grown either in standard media or media supplemented with an apoptosis-inducing drug such as Venetoclax and then subjected to the RealTime-Glo™ Annexin 5 Apoptosis and Necrosis Assay (Promega).

[0259] Over-expression of GFI-1 oncoprotein (positive control) leads to increased Jurkat cell proliferation to wild-type and scramble over-expression. Knock-out of the FAU tumor suppressor also leads to increased proliferation and decrease in apoptosis compared to the no guide control. Interestingly, both over-expression of the mutant target protein and replacement of the wild-type target protein with mutant target protein, compared to wild-type Jurkat, lead to increased proliferation and/or a decrease in apoptosis. Taken together, these experiments may explain why the mutations observed in cancer patient GWAS/TCGA studies occur; as they lead to a selective advantage over other tumor cells in that they exhibit increased proliferation and decreased apoptosis.

### Example 3: Validation of a Target Protein as a Tumor Suppressor in an Apoptosis Assay

[0260] This example demonstrates the validation of a target protein of the disclosure as a tumor suppressor, specifically, a protein that induces apoptosis in tumor cells.

[0261] Stable tumor cell lines with increased or decreased levels of the target protein or controls are generated. The proliferation rate and apoptosis rate (basal and induced) of the generated cell lines are compared. If the proliferation rate slows and/or the apoptosis rate increases in the generated cell lines with an increase in target protein expression, then the target protein is a tumor suppressor and gain of function delivery of the target protein may provide a benefit in some types of cancer.

### Materials and Methods:

[0262] Over-expression: Stable over-expression tumor cell lines are made by transfection using lipofectamine 3000 (ThermoFisher) of pcDNA3.1_Myc plasmids (GenScript Inc) containing: 1) no insert, 2) target protein encoding sequence, 3) a scrambled version of the target protein encoding sequence (negative control), or 4) the Fau protein (positive control for cell proliferation; doi: 10.1016/j.bbadis.2011.04.009), into Jurkat E6-1 (T-cell line; ATCC). This vector adds a Myc-tag (EQKLISEEDL) (SEQ ID NO: 39018) to the C-terminus of the expressed protein. Post-transfection, stable cell mixed populations are selected for with neomycin for 6-10 days. Expression of the target protein and scramble protein are confirmed by immunoblot of 10 μg of cell lysate using anti-myc-tag polyclonal antibody (Abcam). Clonal cell lines are produced by serial dilutions with continuous selection.

[0263] Target Protein Knock-out: The effects of target protein deletion in a disease relevant tumor cell line (Jurkat E6-1) are determined by Alt-R CRISPR-Cas9 knock-out via RNP particle transfected via electroporation (Idtdna.com). The target protein is knocked-out as well as the SODD protein (positive control; ⋅ DOI dx.doi.org/10.4238/2014.March.24.6) and a no-guide (negative control). Neomycin resistance is conferred on successfully transfected cells. Clonal cell lines are produced by serial dilutions with continuous selection. Knock-out is confirmed by genotype sequencing.

[0264] Proliferation: Clonal cell lines that over-express the target protein or control, wild-type Jurkat E6-1 cells, and clonal cell lines with the endogenous target protein and controls knocked out are plated at 10,000 or 40,000 cells per well, grown in standard media, and then subjected to the MTT (3-(4,5-dimethylthiazol-2-yl)-2,5-diphenyltetrazolium bromide) assay. The MTT assay (Abcam) is a measure of the metabolic activity of group of cells. The higher the metabolic activity the higher the proliferation rate.

[0265] Apoptosis: Clonal cell lines that over-express the target protein or control, wild-type Jurkat E6-1 cells, and clonal cell lines with the endogenous target protein and controls knocked out are plated at 10,000 or 40,000 cells per well, grown either in standard media or media supplemented with an apoptosis-inducing drug such as Venetoclax and then subjected to the RealTime-Glo™ Annexin 5 Apoptosis and Necrosis Assay (Promega).

[0266] Mouse Xenograft Model: Over-expression and knock out stable cell lines produced above are used in a mouse xenograft model to determine the in vivo effect on tumor growth.

[0267] Results: Over-expression of FAU tumor suppressor (positive control) leads to decreased Jurkat cell proliferation and increased basal apoptosis levels compared to wild-type and scramble over-expression. Knock-out of the SODD also leads to decreased proliferation and increase in apoptosis compared to the no guide control. Interestingly, over-expression of the target protein, like the FAU positive control tumor suppressor leads to decreased proliferation and increased apoptosis while knock out of the target protein leads to an increase in proliferation and a decrease in apoptosis. These in vitro changes translate to decreases in tumor growth rate in a mouse xenograft model. Taken together, these experiments demonstrate that the target protein is a tumor suppressor and that delivering this protein to a tumor may provide a benefit to patients suffering from cancer.

### Example 4: Validation of a Target Protein as a Tumor Suppressor Wherein the Protein has a Loss of Function Mutation

[0268] This example demonstrates the validation of a target protein of the disclosure as a tumor suppressor. Specifically, a protein that has exhibited a loss-of-function mutation in cancer (determined by Genome Wide Association Studies (GWAS) and/or cataloged in The Cancer Genome Atlas (TCGA)) that increase tumor cell proliferation and/or apoptosis by inactivating the target protein.

[0269] Stable tumor cell lines over-expressing the target protein with wild type or one or more cataloged TCGA or GWAS mutations are generated. Furthermore, in tumor cell lines that express the wild-type target protein, CRISPR-Cas9 is used to replace the wild type protein with the mutated target protein. The proliferation rate and apoptosis rate (basal and induced) of the generated cell lines are compared. If the target protein over-expression decreases proliferation and/or increases apoptosis, and the over-expression of the mutated target protein shows no such effects, then the target protein is a tumor suppressor and the cancer-associated mutation is a loss-of-function mutation. Likewise, if the replacement of the wild type allele with the cancer-associated mutation by CRISPR-Cas9 increases proliferation and/or decreases apoptosis, then the target protein is a tumor suppressor.

### Materials and Methods:

[0270] Over-expression: Stable over-expression tumor cell lines are made by transfection using lipofectamine 3000 (ThermoFisher) of pcDNA3.1_Myc plasmids (GenScript Inc) containing: 1) no insert, 2) wild type target protein encoding sequence, 3) a mutant version of the target protein encoding sequence (a mutation found in cancers; TCGA and/or GWAS), or 4) the tumor suppressor protein FAU (positive control for decreased cell proliferation/increased apoptosis), into Jurkat E6-1 (T-cell line; ATCC). This vector adds a Myc-tag (EQKLISEEDL SEQ ID NO: 39018) to the C-terminus of the expressed protein. Post-transfection, stable cell mixed populations are selected for with neomycin for 6-10 days. Expression of the target protein and mutant protein are confirmed by immunoblot of 10 μg of cell lysate using anti-myc-tag polyclonal antibody (Abcam). Clonal cell lines are produce by serial dilutions with continuous selection.

[0271] Mutant Target Protein Knock-in: The wild-type target protein is expressed in Jurkat E6 cells. To determine if mutations seen in some cancer patients confer disease associated phenotypes on cancer cells, CRISPR-Cas9 is used to replace the wild-type target protein with the mutant versions of the target protein. As a control the FAU tumor suppressor protein is knocked-out which should lead an increase in proliferation and/or decrease in apoptosis. Clonal cell lines are produced by serial dilutions with continuous selection. Knock-out and replacement is confirmed by genotype sequencing.

[0272] Proliferation: Clonal cell lines are plated at 10,000 or 40,000 cells per well, grown in standard media, and 24 hours later are subjected to the MTT (3-(4,5-dimethylthiazol-2-yl)-2,5-diphenyltetrazolium bromide) assay. The MTT assay (Abcam) is a measure of the metabolic activity of group of cells. The higher the metabolic activity the higher the proliferation rate.

[0273] Apoptosis: Clonal cell lines are plated at 10,000 or 40,000 cells per well, grown either in standard media or media supplemented with an apoptosis-inducing drug such as Venetoclax and then subjected to the RealTime-Glo™ Annexin 5 Apoptosis and Necrosis Assay (Promega).

[0274] Results: Over-expression of the FAU tumor suppressor protein (positive control) leads to a decrease in Jurkat cell proliferation and/or an increase in apoptosis compared to wild-type and scramble over-expression. Knock-out of the FAU tumor suppressor leads to increased proliferation and decrease in apoptosis compared to the no guide control. Interestingly, over-expression of the target protein but not cancer-associated mutant target protein leads to a decrease in Jurkat cell proliferation and/or apoptosis. Likewise, replacement of the target protein with cancer-associated mutant target protein leads to an increase in proliferation and/or a decrease in apoptosis. Taken together, these experiments may explain why the mutations observed in cancer patient GWAS/TCGA studies occur; as they lead to a selective advantage over other tumor cells in that they exhibit increased proliferation and decreased apoptosis.

### Example 5: Validation of a Target Protein as an Oncogene or Tumor Suppressor by Cancer Growth and Proliferation

[0275] This example demonstrates the ability of a target protein of the disclosure to function as an oncogene or tumor suppressor in a cancer cell. In this example, a library of lentiviral-encoded guide RNAs (gRNA) that individually target proteins of interest genes is synthesized (Cellecta, Inc.) to obtain a library coverage of six unique gRNAs per gene.

### Materials and Methods:

[0276] Cancer cell lines (dtp.cancer.gov/discovery_development/nci-60/cell_list.htm) are transduced with a lentiviral-encoded Cas9 nuclease at a high multiplicity of infection (MOI), then transduced with the gRNA lentivirus library at a low MOI of 0.5 to ensure that individual cells received approximately one gRNA. The gRNA library vector also encodes puromycin resistance. One-day post-transduction, cells are incubated with puromycin for four days to select for successfully-transduced cells.

[0277] Following transduction and selection, 10×10⁶ cells are harvested to serve as the “baseline” population from which the growth effects of individual genes can be compared. 10×10⁶ cells are plated in manufacturer's recommended medium and split twice weekly for four weeks, by re-plating 10×10⁶ cells at each split.

[0278] Following the four weeks of cell/tumor growth, DNA from in vitro samples is isolated and lysedis using a DNA extraction kit (Qiagen DNeasy Blood and Tissue Kit), and concentrated by ethanol precipitation. The DNA samples are amplified by two rounds of PCR using manufacturer's recommended primers and analyzed by next-generation sequencing (BGIAmerica).

[0279] Sequencing results are analyzed to call hits using a Model-based Analysis of Genome-wide CRISPR-Cas9 Knockout (MAGeCK) algorithm as described by Li W et al., Genome Biology 2014 and Li W et al., Genome Biology 2015. In brief, sequencing reads are normalized to their medians, the variance of read counts for individual gRNAs are estimated and normalized, and individual gRNA read count differences are ranked against each other. Target genes are called based on whether multiple gRNAs targeting a single gene ranked near the top of the gRNA ranking list. gRNAs that are observed in the analysis are indicative of its corresponding target proteins acting as an oncogene.

[0280] Target genes are quantified along three parameters: the Beta score, essentially the magnitude of the effect (log-fold change in gRNA count); the p-value; and the false discovery rate (FDR). Beta scores <0 indicated that the six gRNAs targeting a single gene are absent from the late-stage sample compared to the baseline sample, and are a good indication that the gene is “dropping out” in the course of tumor growth. P-value and FDR both reflected the confidence that the result is not artifactual, with a lower value indicating higher confidence. Thresholds for calling hits are P-value<0.1 and FDR<0.5. gRNAs that are no longer observed in the analysis (dropout) are indicative of its corresponding target proteins acting as a tumor suppressor.

### Example 6: Validation of a Target Protein as a Tumor Suppressor in an Apoptosis Assay

[0281] This example demonstrates the validation of a target protein of the disclosure, SEQ ID NO: 37997, as a secreted tumor suppressor, and a potential target for the treatment of multiple cancers. Multiple tumor cell lines were treated with synthetically produced SEQ ID NO: 37997 protein. Twenty-four hours later basal levels of apoptosis were measured.

### Materials and Methods:

[0282] Cell Culture: Tumor cell lines HCT-116 (Colon Cancer Cell line, ATCC) and U2OS (Osteoscarcoma Cell line, ATCC) cells were grown adherently in ATCC-formulated McCoy's 5a medium supplemented with 10% FBS and 1× penicillin-streptomycin at 37° C. (5% CO2). Jurkat cells (acute T-cell leukemia cell line, ATCC) were grown as suspension cultures in ATCC-formulated RPMI-1640 supplemented with 10% FBS and 1× penicillin-streptomycin at 37° C. (5% CO2). HEP-G2 cells (Liver Cancer Cell line, ATCC) cells were grown adherently in ATCC-formulated Eagle's Minimum Essential Medium (EMEM) supplemented with 10% FBS and 1× penicillin-streptomycin at 37° C. (5% CO2).

[0283] Peptide Treatment: Target protein SEQ ID NO: 37997 was synthesized through Fluorenylmethyloxycarbonyl (Fmoc) protection group chemistry using Solid Phase Peptide Synthesis (SPPS). 5 μM of target peptide and control peptides were added to a 96 well plate containing 10,000 cells (100 μL/well). A white-walled 96-well plate adequate for cell culture and compatible with the luminometer was used. (Corning)

[0284] Apoptosis Assay: Following 24 hrs of peptide treatment, an equal volume reconstituted Caspase-Glo® 3/7 assay reagent mixture (Promega) was added to the cells. The contents of wells were gently mixed using a plate shaker at 300-500 rpm for 30 seconds. The plate was then Incubate at room temperature for 3 hours. The treated plates were then read for luminescence on Promega™ GloMax® Plate Reader. A blank reaction that contained caspase-Glo® 3/7 reagent, vehicle and cell culture medium without cells was used to measure background luminescence. The blank reaction values were subtracted from experimental values. A negative control that contained caspase-Glo® 3/7 reagent and vehicle-treated cells in medium was included to determine the basal caspase activity of the cell culture system. Significant difference in apoptosis was determined using ANOVA analysis by comparing cells treated with SEQ ID NO: 37997 peptide to cells treated with an irrelevant control peptide, or vehicle control treated cells.

### Results:

[0285] Treatment of multiple cell lines with SEQ ID NO: 37997 peptide led to an increase in basal apoptosis levels. SEQ ID NO: 37997 is a tumor suppressor and is suitable for the treatment of multiple cancers (FIG. 1, FIG. 2, and Table C).

TABLE C
List of ORF peptides inducing significant apoptosis in
multiple cell lines. Peptides with z-score >2 compared
to vehicle control were considered as significant.

| | |
|---|---|
| HCT-116 | Jurkat |
| SEQ ID NO: 29485 | SEQ ID NO: 34296 |
| SEQ ID NO: 27000 | SEQ ID NO: 34224 |
| SEQ ID NO: 27193 | SEQ ID NO: 37407 |
| HepG2 | SEQ ID NO: 34229 |
| SEQ ID NO: 34224 | SEQ ID NO: 36828 |
| SEQ ID NO: 26966 | SEQ ID NO: 33599 |
| SEQ ID NO: 39056 | SEQ ID NO: 29485 |
| U2OS | SEQ ID NO: 27000 |
| SEQ ID NO: 34229 | SEQ ID NO: 33579 |
| SEQ ID NO: 36828 | SEQ ID NO: 35814 |
| SEQ ID NO: 38076 | SEQ ID NO: 34508 |
| SEQ ID NO: 33599 | SEQ ID NO: 39056 |
| SEQ ID NO: 27000 | SEQ ID NO: 27193 |
| SEQ ID NO: 27193 | |

### Example 7: Validation of a Target Protein as a Tumor Suppressor Wherein the Protein has a Loss of Function Mutation

[0286] This example demonstrates the validation of target proteins SEQ ID NO: 27301 and SEQ ID NO: 30462, as contributors to tumor growth. Stable tumor cell lines with increased levels of each target protein or controls were generated. The proliferation rate of the generated cell lines were compared. If the proliferation rate of the generated cell lines was increased with increased level of target protein, then the target protein is an oncogene.

[0287] Stable tumor cell lines over-expressing the target protein with wild type or one or more cataloged TCGA or GWAS mutations are generated. Furthermore, in tumor cell lines that express the wild-type target protein, CRISPR-Cas9 is used to replace the wild type protein with the mutated target protein. The proliferation rate and apoptosis rate (basal and induced) of the generated cell lines are compared. If the target protein over-expression decreases proliferation and/or increases apoptosis, and the over-expression of the mutated target protein shows no such effects, then the target protein is a tumor suppressor and the cancer-associated mutation is a loss-of-function mutation. Likewise, if the replacement of the wild type allele with the cancer-associated mutation by CRISPR-Cas9 increases proliferation and/or decreases apoptosis, then the target protein is a tumor suppressor.

### Materials and Methods:

[0288] Over-expression: Stable over-expression tumor cell lines were made by transduction using lentivirus. For virus production, HEK-293T cells were cultured in DMEM with high glucose and GlutaMAX™ medium (ThermoFisher) supplemented with 10% FBS. After 24 h, cells were transfected using lipofectamine 3000 (ThermoFisher) of Lentiviral packaging plasmid mix (CELLECTA) and pGenLenti plasmids (GenScript Inc) containing: 1) no insert, 2) Target Protein encoding sequence, and 3) the AP2A1 protein (positive control for cell proliferation; https://doi.org/10.1038/sj.one.1205216), into HCT116 (Colon cancer cell line; ATCC). A Myc-tag (EQKLISEEDL) was added to the c-terminus of the expressed protein. After 48 hr post-transfection, culture media containing viruses was collected, loaded onto a 10 ml syringe and filtered through a 0.45 μm filter. For cell transduction, HCT116 colorectal cancer cells were seeded in 6-well plates, the virus was added to the cells. After post-transduction, stable cell mixed populations are selected for with puromycin for 14 days. Expression of the Target Protein and controls are confirmed by immunoblot of 50 μg of cell lysate using anti-myc-tag polyclonal antibody (CST).

[0289] Western Blot: 50 μg of cell lysate from control and Target Protein stable cell lines were separated by NuPAGE 4-12% Bis-Tris Gel (invitrogen), transferred to PVDF membrane (Thermofisher) and subjected to anti-Myc-tag (CST) and anti-GAPDH (CST) primary antibodies followed by anti-Rabbit HRP secondary antibodies (CST). The HRP signal is visualized with the iBright system.

[0290] Proliferation: Polyclonal cell lines that over-express the Target Protein or control, wild-type HCT-116 cells, were plated in 96 well plate (10,000 or 5,000 cells per well) grown in standard media in both low serum (0.1% FBS) and high serum (10% FBS) conditions, respectively. After 48 hours, the cells are subjected to the WST-1 (3-(4,5-dimethylthiazol-2-yl)-2,5-diphenyltetrazolium bromide) assay. The WST-1 assay (Sigma) is a measure of the metabolic activity of group of cells. The higher the metabolic activity the higher the proliferation rate. Significant differences in proliferation are determined by comparing protein-expressing cell lines with a stable cell line of the empty expression vector (control) using ANOVA analysis.

[0291] Maestro Z Impedance-based assay: The Maestro Z platform (Axion Biosystems) uses impedance measurements (ohms, (2) to quantify the presence of cells on the electrode. Since impedance is noninvasive and label-free, impedance assay is used to quantify dynamic cellular growth over time. For impedance recording, cells were seeded in 96 well assay plate, and the plate was docked in the Maestro Z and the automatic environment controls set the chamber to 37° C. and 5% CO2. Impedance measurements were recorded every minute for the 2 days.

### Results:

[0292] Over-expression of AP2A (positive control oncogene) leads to increased HCT-116 cell proliferation compared to control cells. Interestingly, over-expression of the target protein, like the positive control oncogenes leads to increased proliferation. These experiments demonstrate that the target protein is an oncogene and that targeting this protein could have benefits to patients suffering from cancer such as colon cancer (FIG. 3, FIG. 4, FIG. 5, Table D).

TABLE D

| | |
|---|---|
| SEQ ID NO: 33586 | *** |
| SEQ ID NO: 36829 | ** |
| SEQ ID NO: 38556 | ** |

### Example 8: Validation of a Target Protein as an Oncogene or Tumor Suppressor by Cancer Growth and Proliferation

[0293] Proliferation: HCT-116 cells were plated in 96 well plate (5,000 cells/well) grown in standard media supplemented with 10% FBS. After 48 hours incubation at 37° C. (5% CO₂), the cells are subjected to the WST-1 (3-(4,5-dimethylthiazol-2-yl)-2,5-diphenyltetrazolium bromide) assay. The WST-1 assay (Sigma) is a measure of the metabolic activity (i.e. proliferative rate) of cells. Significant differences in proliferation are determined by comparing cells treated with 10 μM SEQ ID NO: 37997 protein to cells treated with 10 uM of an irrelevant control peptide, or untreated cells using ANOVA analysis (FIG. 6, Table E).

TABLE E
Other Hits from high sera and low sera experiments. In blue: tumor suppressors. In Red: tumor activators.

| High sera | | | | | | | | |
|---|---|---|---|---|---|---|---|---|
| U2OS | HCT116 | U2OS | HCT116 | U2OS | HCT116 | HCT116 | HCT116 | |
| 10 uM | 10 uM | 5 uM | 5 uM | 1 uM | 1 uM | 0.5 uM | 0.1 uM | |
| 8 SD | 4 SD | 5 SD | 3 sd | 5 SD | 2 SD | 3 SD | 3 SD | |
| −12.108362 | −5.8562373 | | | −1.710525 | −2.8670694 | | −5.0965093 | SEQ ID NO: |
| | | | | | | | | 34508 |
| −11.845722 | −7.1767171 | | | −2.3435539 | −0.1040104 | | −0.7167673 | SEQ ID NO: |
| | | | | | | | | 27000 |
| −10.62007 | −6.5368271 | | | 0.85526249 | 0.45900239 | | −1.0875869 | SEQ ID NO: |
| | | | | | | | | 27000 |
| −14.680884 | −4.8432666 | | | −2.5657875 | −0.6104958 | | 0.54266292 | SEQ ID NO: |
| | | | | | | | | 33599 |
| −6.3033519 | 0.06331067 | | | −5.7915413 | −0.8795661 | | 0.1989764 | SEQ ID NO: |
| | | | | | | | | 29485 |
| −4.0069384 | 0.27811475 | | | −15.926738 | −1.3521351 | | −4.6759455 | SEQ ID NO: |
| | | | | | | | | 29485 |
| −10.57293 | −8.6057295 | | | −0.8283251 | −3.6720191 | | 0.99262092 | SEQ ID NO: |
| | | | | | | | | 33681 |
| −3.6702209 | −0.5064854 | | | −15.18596 | −0.4883966 | | −0.495199 | SEQ ID NO: |
| | | | | | | | | 38081 |
| −5.7578695 | 0.27133146 | | | −5.7713382 | −0.4363914 | | 2.1593462 | SEQ ID NO: |
| | | | | | | | | 29230 |
| −13.232998 | −11.511237 | | | −5.9599 | −5.79971 | | −3.1135285 | SEQ ID NO: |
| | | | | | | | | 37997 |
| | | −0.8797654 | −0.0232911 | | | 0.20379745 | | SEQ ID NO: |
| | | | | | | | | 34508 |
| | | 15.3292461 | 0.83265817 | | | 1.07915604 | | SEQ ID NO: |
| | | | | | | | | 27193 |
| | | −6.824847 | 0.00873418 | | | 0.53375523 | | SEQ ID NO: |
| | | | | | | | | 34047 |
| | | 1.19968013 | −1.7798311 | | | −1.4663712 | | SEQ ID NO: |
| | | | | | | | | 28759 |
| | | −3.8123169 | −1.4566666 | | | −0.9491139 | | SEQ ID NO: |
| | | | | | | | | 38017 |
| | | −4.1322316 | −0.2232067 | | | 0.38139238 | | SEQ ID NO: |
| | | | | | | | | 38073 |
| | | −0.8797654 | −1.4760758 | | | −0.8520674 | | SEQ ID NO: |
| | | | | | | | | 38076 |
| | | 3.09250877 | −1.9108437 | | | −0.6812658 | | SEQ ID NO: |
| | | | | | | | | 26298 |
| | | −6.6915492 | −1.7012235 | | | −0.3144304 | | SEQ ID NO: |
| | | | | | | | | 26298 |

| Low sera | | | | | |
|---|---|---|---|---|---|
| U2OS | HCT116 | U2OS | HCT116 | U2OS | HCT116 |
| 10 uM | 10 uM | 5 uM | 5 uM | 1 uM | 1 uM |
| 6 SD | 3 SD | 2 SD | 2 SD | 5 SD | 3 SD |
| −11.737394 | −3.6284316 | | | 4.27543171 | −1.6002947 |
| −11.23299 | −3.5893498 | | | 5.68454946 | −0.0370248 |
| −12.97038 | −5.0538869 | | | 9.03122787 | −0.2447751 |
| −8.3907153 | −5.2904343 | | | 4.32346015 | −0.9914422 |
| 5.61249179 | −0.7363824 | | | 3.79503725 | −1.2650144 |
| 4.32346015 | −1.0572641 | | | 2.32185823 | −2.4086697 |
| −6.8614914 | −2.5835091 | | | 9.37550341 | 0.12547297 |
| −2.3218582 | −2.4765485 | | | 1.52121746 | −3.5893498 |
| 2.68214658 | −2.1618376 | | | 3.87510132 | −1.090175 |
| −16.092879 | −6.9154121 | | | 0.32025631 | −3.0154653 |
| | | 1.344095464 | 1.93163411 | | |
| | | 2.31945708 | 0.68968413 | | |
| | | −5.958031 | 0.32409968 | | |
| | | −4.9898064 | −3.3291519 | | |
| | | −2.7191174 | −1.5245649 | | |
| | | −1.5712835 | 0.11408309 | | |
| | | 0.29736629 | −0.2929861 | | |
| | | −0.0118947 | −1.1537949 | | |
| | | −1.3179274 | −1.7164319 | | |

| U2OS | HCT116 | U2OS | U2OS | |
|---|---|---|---|---|
| 0.5 uM | 0.5 uM | 0.1 uM | 0.1 uM | |
| 3 SD | 3 SD | 4 SD | 2 SD | |
| | | 3.47478094 | 1.33495017 | SEQ ID |
| | | | | NO: |
| | | | | 34508 |
| | | 7.75820905 | −1.0366947 | SEQ ID |
| | | | | NO: |
| | | | | 27000 |
| | | 7.54203604 | −1.1889079 | SEQ ID |
| | | | | NO: |
| | | | | 27000 |
| | | 2.00960833 | −0.8885955 | SEQ ID |
| | | | | NO: |
| | | | | 33599 |
| | | 2.02562115 | 0.15427005 | SEQ ID |
| | | | | NO: |
| | | | | 29485 |
| | | 1.92153785 | −2.5156303 | SEQ ID |
| | | | | NO: |
| | | | | 29485 |
| | | 4.98799199 | −1.0099546 | SEQ ID |
| | | | | NO: |
| | | | | 33681 |
| | | 2.081666 | −3.4700477 | SEQ ID |
| | | | | NO: |
| | | | | 38081 |
| | | 2.00960833 | −2.2955384 | SEQ ID |
| | | | | NO: |
| | | | | 29230 |
| | | 1.92153785 | −2.3593033 | SEQ ID |
| | | | | NO: |
| | | | | 37997 |
| 5.04333232 | 0.95674226 | | | SEQ ID |
| | | | | NO: |
| | | | | 34508 |
| 1.97451218 | 1.08119654 | | | SEQ ID |
| | | | | NO: |
| | | | | 27193 |
| 2.33135173 | 1.56086407 | | | SEQ ID |
| | | | | NO: |
| | | | | 34047 |
| −1.9340704 | 0.52115229 | | | SEQ ID |
| | | | | NO: |
| | | | | 28759 |
| 2.34324639 | −0.1996454 | | | SEQ ID |
| | | | | NO: |
| | | | | 38017 |
| 3.65165807 | 0.58597223 | | | SEQ ID |
| | | | | NO: |
| | | | | 38073 |
| 3.03313618 | 0.1011191 | | | SEQ ID |
| | | | | NO: |
| | | | | 38076 |
| 2.39082499 | 1.22120761 | | | SEQ ID |
| | | | | NO: |
| | | | | 26298 |
| 2.94987362 | −0.2800221 | | | SEQ ID |
| | | | | NO: |
| | | | | 26298 |

### Example 9: Validation of Two Target Proteins as Novel G Protein-Coupled Receptor (GPCR) Ligands

[0294] This example demonstrates the validation of two novel peptides SEQ ID NO: 30949 and SEQ ID NO: 34229 that act as a GPCR ligand. SEQ ID NO: 30949 blocks CXCR4 and cancer cell migration, making it suitable in the treatment of multiple cancers. Whereas SEQ ID NO: 34229 agonizes C3AR1, a key regulator of immune response and inflammation. The target proteins SEQ ID NO: 30949 and SEQ ID NO: 34229 were treated with gpcrMAX, which is a comprehensive panel covering 168 G protein-coupled receptors (GPCRs) from over 60 distinct receptor families. This panel utilizes PathHunter® β-Arrestin technology (Eurofins DiscoverX). PathHunter β-Arrestin GPCR cell lines are engineered to co-express the ProLink™ (PK) tagged GPCR and the Enzyme Acceptor (EA) tagged β-Arrestin. Activation of the GPCR-PK induces β-Arrestin-EA recruitment, forcing complementation of the two β-galactosidase enzyme fragments (EA and PK). The resulting functional enzyme hydrolyzes substrate to generate a chemiluminescent signal.

### Materials and Methods:

[0295] Cell Handling: PathHunter® cell lines were expanded from freezer stocks according to standard procedures. Cells were seeded in a total volume of 20 μL into white walled, 384-well microplates and incubated at 37° C. for the appropriate time prior to testing.

[0296] Peptide Treatment: Target proteins SEQ ID NO: 30949, SEQ ID NO: 34229 and irrelevant peptides were synthesized through Fluorenylmethyloxycarbonyl (Fmoc) protection group chemistry using Solid Phase Peptide Synthesis (SPPS). For screening: Target proteins SEQ ID NO: 30949, SEQ ID NO: 34229 and 8 irrelevant peptides were treated on gpcrMAX panel at a final top testing concentration of 0.12 μM. For hit-confirmation: Target protein SEQ ID NO: 30949 and irrelevant peptides were tested on CXCR4 Human Chemokine GPCR cell-based antagonist arrestin assay at top testing concentrations of 1 μM and 0.3 μM.

[0297] Assay Design: Agonist Format: For agonist determination, cells were incubated with sample to induce response. Intermediate dilution of sample stocks was performed to generate 5× sample in assay buffer. 5 μL of 5× sample was added to cells and incubated at 37° C. or room temperature for 90 to 180 minutes. Vehicle concentration was 1%. Antagonist Format: For antagonist determination, cells were pre-incubated with antagonist followed by agonist challenge at the EC80 concentration. Intermediate dilution of sample stocks was performed to generate 5× sample in assay buffer. 5 μL of 5× sample was added to cells and incubated at 37° C. or room temperature for 30 minutes. Vehicle concentration was 1%, 5 μL of 6×EC80 agonist in assay buffer was added to the cells and incubated at 37° C. or room temperature for 90 or 180 minutes.

[0298] CXCR4 Human Chemokine GPCR Cell Based Antagonist Arrestin Assay: For hit-confirmation, PathHunter® β-Arrestin cell line for CXCR4 human chemokine GPCR antagonist assay was used with CXCL12/SDF-1a as activator and Plerixafor as inhibitor.

[0299] C3aR Human Complement Peptide GPCR Cell Based Agonist Arrestin Assay: For hit-confirmation, PathHunter® β-Arrestin cell line for C3AR1 human complement peptide GPCR agonist assay was used with C3A Receptor Agonist (Short Fragment) as control activator.

[0300] Signal Detection: Assay signal was generated through a single addition of 12.5 or 15 μL (50% v/v) of PathHunter® Detection reagent cocktail, followed by a one-hour incubation at room temperature. Microplates were read following signal generation with a PerkinElmer Envision™ instrument for chemiluminescent signal detection.

[0301] Data Analysis: Compound activity was analyzed using CBIS data analysis suite (ChemInnovation, CA). For agonist mode assays, percentage activity was calculated using the following formula: % Activity=100%×(mean RLU of test sample−mean RLU of vehicle control)/(mean MAX control ligand−mean RLU of vehicle control). For antagonist mode assays, percentage inhibition was calculated using the following formula: % Inhibition=100%×(1−(mean RLU of test sample−mean RLU of vehicle control)/(mean RLU of EC80 control−mean RLU of vehicle control)).

[0302] Chemotaxis Assay: NAMALWA cells (human Burkitt lymphoma cell line, ATCC) were cultured in serum-free ATCC formulated RPMI for 24 hr prior to the assay. After starvation, harvest cells and centrifuge at 1,000×g, for 5 minutes to pellet them. Resuspend the cell in a serum-free media. Using Cell Migration/Chemotaxis Assay Kit (96-well, 8 μm) from Abcam, add 150 μL of serum-free media containing desired chemoattractant to the bottom chamber. Then add 50,000 cells and desired inhibitor (or peptides) to each well of the top chamber. Place the plate and incubate at 37° C. in CO2 incubator for 24 hours. After incubation, add 110 μL of Cell Dye+Cell Dissociation Solution mix to each bottom well and incubate at 37° C. in CO2 incubator for an hour. After incubation remove the top chamber and read the plate at Ex/Em=530/590 nm.

### Results:

[0303] Two target peptides, SEQ ID NO: 30949 and SEQ ID NO: 34229 were identified as novel GPCR ligands using Eurofins's gpcrMAX panel. The target peptide SEQ ID NO: 34229 is an agonist of C3AR1, a key anaphylatoxin receptor that plays a critical role in inflammation. The target peptide, SEQ ID NO: 30949 blocked CXCR4, a chemokine receptor involved in cell migration and homing. Additionally, SEQ ID NO: 30949 was able to significantly inhibit the chemotactic migration of human Burkitt lymphoma cells, suggesting its potential as a chemokine for the treatment of cancer (FIG. 7, FIG. 8, FIG. 9, FIG. 10).

[0304] The teachings of all patents, published applications and references cited herein are incorporated by reference in their entirety.

[0305] While example embodiments have been particularly shown and described, it will be understood by those skilled in the art that various changes in form and details may be made therein without departing from the scope of the embodiments encompassed by the appended claims.

What is claimed is:

1. An agent that comprises and/or modulates the expression or activity of a target protein identified in the Sequence Listing, in Table A, or a variant of the foregoing.

2. The agent of claim 1, wherein the agent comprises the target protein.

3. The agent of claim 1, wherein the agent modulates the expression of the target protein.

4. The agent of claim 2 or 3, wherein the agent modulates the expression of a gene or gene transcript encoding the target protein.

5. The agent of claim 1, wherein the agent modulates the activity of the target protein.

6. The agent of any one of claims 2-5, comprising a polypeptide, a polynucleotide, or a small molecule.

7. The agent of any one of claims 2-6, wherein the agent decreases the expression or activity of the target protein.

8. The agent of claim 7, wherein the agent comprises an inhibitor of the target protein.

9. The agent of claim 8, wherein the inhibitor is a polypeptide.

10. The agent of claim 9, wherein the polypeptide is an antagonist antibody, or an antigen-binding fragment thereof, that binds to the target protein.

11. The agent of claim 8, wherein the inhibitor is a polynucleotide.

12. The agent of claim 11, wherein the polynucleotide comprises a nucleotide sequence that is complementary to at least a portion of a gene or gene transcript encoding the target protein.

13. The agent of claim 11 or 12, wherein the polynucleotide comprises DNA.

14. The agent of claim 11 or 12, wherein the polynucleotide comprises RNA.

15. The agent of claim 11 or 12, wherein the polynucleotide is a small interfering RNA (siRNA), a short hairpin RNA (shRNA), an antisense DNA, an antisense RNA, a microRNA (miRNA), an antagomir, a guide RNA (gRNA), a locked nucleic acid (LNA) or a morpholino nucleic acid (MNA).

16. The agent of claim 8, wherein the inhibitor is a small molecule.

17. The agent of claim 16, wherein the small molecule binds to the target protein, thereby decreasing the activity of the target protein.

18. The agent of any one of claims 1-6, wherein the agent increases the expression or activity of the target protein.

19. The agent of claim 18, wherein the agent is an isolated polypeptide comprising the amino acid sequence of the target protein, or a variant thereof comprising an amino acid sequence having at least 80% sequence identity to the amino acid sequence of the target protein.

20. The agent of claim 19, wherein the isolated polypeptide or variant thereof is a recombinant protein or a synthetic protein.

21. The agent of claim 18, wherein the agent is a polynucleotide encoding the target protein or a variant thereof having at least 80% sequence identity to the amino acid sequence of the target protein.

22. The agent of claim 21, wherein the polynucleotide comprises DNA.

23. The agent of claim 21 or 22, wherein the polynucleotide comprises a vector.

24. The agent of claim 21, wherein the polynucleotide comprises RNA.

25. The agent of claim 24, wherein the RNA is messenger RNA (mRNA) and/or circular RNA (circRNA).

26. The agent of claim 18, wherein the agent comprises an activator of the target protein.

27. The agent of claim 26, wherein the activator is a polypeptide.

28. The agent of claim 27, wherein the polypeptide is an agonist antibody, or an antigen-binding fragment thereof, that binds to the target protein.

29. The agent of claim 26, wherein the activator is a small molecule.

30. The agent of claim 29, wherein the small molecule binds to the target protein, thereby increasing the activity of the target protein.

31. The agent of any one of claims 1-8, 18 and 26, comprising a gene editing system.

32. The agent of claim 31, wherein the gene editing system is a CRISPR/Cas system, a transposon-based gene editing system, and a transcription activator-like effector nuclease (TALEN) system.

33. The agent of any one of claims 1-32, wherein the target protein is translated from a non-coding RNA.

34. The agent of claim 33, wherein the non-coding RNA is a long intergenic non-coding RNA (lincRNA).

35. The agent of any one of claims 1-32, wherein the target protein is translated from a non-exonic element in an unprocessed precursor mRNA (pre-mRNA).

36. The agent of claim 35, wherein the non-exonic element is an intron in a pre-mRNA.

37. The agent of claim 35, wherein the non-exonic element is a 5′-untranslated region (5′-UTR) in a pre-mRNA.

38. The agent of claim 35, wherein the non-exonic element is a 3′-untranslated region (3′-UTR) in a pre-mRNA.

39. A pharmaceutical composition comprising the agent of any one of claims 1-38, and a pharmaceutically acceptable carrier.

40. The pharmaceutical composition of claim 39, wherein the pharmaceutically acceptable carrier is a vector.

41. A method for modulating the expression or activity of a target protein identified in the Sequence Listing, Table A, or a variant of the foregoing in a cell, comprising contacting the cell with the agent of any one of claims 1-38 or the pharmaceutical composition of claim 39 or 40.

42. The method of claim 41, wherein the agent decreases the expression or activity of the target protein in the cell.

43. The method of claim 41, wherein the agent increases the expression or activity of the target protein in the cell.

44. The method of any one of claims 41-43, wherein the cell is in a subject.

45. The method of claim 44, wherein the subject has cancer or a pre-cancerous condition.

46. The method of any one of claims 41-45, wherein the agent modulates the expression or activity of the target protein by at least 10%.

47. The method of any one of claims 41-46, wherein the agent modulates the expression of a gene encoding the target protein by at least 10%, thereby modulating the expression or activity of the target protein.

48. A method of predicting a likelihood of developing cancer in a subject, comprising quantifying an expression or activity of a target protein identified in the Sequence Listing, Table A, or a variant of the foregoing, in a sample from the subject, wherein the level of expression or activity of the target protein in the sample is indicative of the likelihood of developing cancer in the subject.

49. A method of preparing a sample that is useful for detecting a likelihood of developing cancer in a subject, comprising:
a) obtaining or having obtained a sample from the subject;
b) adding a protease inhibitor, a control peptide, a standard peptide, or a combination thereof to the sample to prepare a sample that is useful for detecting a likelihood of developing cancer; and
c) quantifying an expression or activity of a target protein identified in the Sequence Listing, Table A, or a variant of the foregoing, in the sample prepared in step b).

50. The method of claim 48 or 49, further comprising administering to the subject an effective amount of the agent of any one of claims 1-38, or the pharmaceutical composition of claim 39 or 40 if the subject is predicted to have a likelihood of developing cancer.

51. A method of treating a cancer in a subject in need thereof, comprising administering to the subject an effective amount of the agent of any one of claims 1-38, or the pharmaceutical composition of claim 39 or 40.

52. The method of any one of claims 48-51, wherein the cancer is a solid cancer.

53. The method of any one of claims 48-51, wherein the cancer is a hematologic cancer.

54. The method of claim 53, wherein the hematologic cancer is a leukemia.

55. The method of claim 53, wherein the hematologic cancer is a lymphoma.

56. The method of claim 53, wherein the hematologic cancer is multiple myeloma.

57. The method of any one of claims 48-51, wherein the cancer is selected from lung cancer, breast cancer, Hodgkin's lymphoma, diffuse large B-cell lymphoma, follicular lymphoma, primary central nervous system lymphoma, chronic lymphocytic leukemia, epithelial ovarian cancer, prostate cancer, squamous cell carcinoma, non-melanoma skin cancer, nasal polyps, basal cell carcinoma, keratinocyte cancer, multiple myeloma, serous invasive ovarian cancer, hepatocellular carcinoma, small cell lung carcinoma, adenocarcinoma, lung adenocarcinoma, non-small cell lung cancer, ovarian cancer or colorectal cancer.

58. A method for identifying an agent that modulates the expression or activity of a target protein identified in the Sequence Listing, Table A, or a variant of the foregoing, comprising:
a) contacting a protein identified in the Sequence Listing, Table A, or a variant of the foregoing, with an agent; and
b) determining whether the agent modulates the expression or activity of the target protein,
wherein a difference in the expression or activity of the target protein that has been contacted with the agent compared to a reference for the expression or activity of the target protein indicates that the agent modulates the expression or activity of the target protein.

59. The method of claim 58, wherein a difference of at least 10% in the expression or activity of the target protein that has been contacted with the agent compared to the reference indicates that the agent modulates the expression or activity of the target protein.

60. The method of claim 58 or 59, wherein a decrease in the expression or activity of the target protein that has been contacted with the agent compared to the reference indicates the agent inhibits the expression or activity of the target protein.

61. The method of claim 58 or 59, wherein an increase in the expression or activity of the target protein compared to the reference indicates the agent activates the expression or activity of the target protein.

The application's sequence listing, which the Patent Office published only in electronic form, follows.

SEQUENCE LISTING (39056 sequences)

SEQ ID NO: 1 - protein, 277 aa, Homo sapiens
MFPFYSCWRTGLLLLLLAVAVRESWQTEEKTCDLVGEKGKESEKELALVKRLKPLFNKSFESTVGQGSDTYIYIFRVCREAGNHTSGAGLVQINKSNGKETVVGRLNETHIFNGSNWIMLIYKGGDEYDNHCGKEQRRAVVMISCNRHTLADNFNPVSEERGKVQDCFYLFEMDSSLACSPEISHLSVGSILLVTFASLVAVYVVGGFLYQRLVVGAKGMEQFPHLAFWQDLGNLVADGCDFVCRSKPRNVPAAYRGVGDDQLGEESEERDDHLLPM

SEQ ID NO: 2 - protein, 512 aa, Homo sapiens
MLFEGLDLVSALATLAACLVSVTLLLAVSQQLWQLRWAATRDKSCKLPIPKGSMGFPLIGETGHWLLQGSGFQSSRREKYGNVFKTHLLGRPLIRVTGAENVRKILMGEHHLVSTEWPRSTRMLLGPNTVSNSIGDIHRNKRKVFSKIFSHEALESYLPKIQLVIQDTLRAWSSHPEAINVYQEAQKLTFRMAIRVLLGFSIPEEDLGHLFEVYQQFVDNVFSLPVDLPFSGYRRGIQARQILQKGLEKAIREKLQCTQGKDYLDALDLLIESSKEHGKEMTMQELKDGTLELIFAAYATTASASTSLIMQLLKHPTVLEKLRDELRAHGILHSGGCPCEGTLRLDTLSGLRYLDCVIKEVMRLFTPISGGYRTVLQTFELDGFQIPKGWSVMYSIRDTHDTAPVFKDVNVFDPDRFSQARSEDKDGRFHYLPFGGGVRTCLGKHLAKLFLKVLAVELASTSRFELATRTFPRITLVPVLHPVDGLSVKFFGLDSNQNEILPETEAMLSATV

SEQ ID NO: 3 - protein, 467 aa, Homo sapiens
MRPQELPRLAFPLLLLLLLLLPPPPCPAHSATRFDPTWESLDARQLPAWFDQAKFGIFIHWGVFSVPSFGSEWFWWYWQKEKIPKYVEFMKDNYPPSFKYEDFGPLFTAKFFNANQWADIFQASGAKYIVLTSKHHEGFTLWGSEYSWNWNAIDEGPKRDIVKELEVAIRNRTDLRFGLYYSLFEWFHPLFLEDESSSFHKRQFPVSKTLPELYELVNNYQPEVLWSDGDGGAPDQYWNSTGFLAWLYNESPVRGTVVTNDRWGAGSICKHGGFYTCSDRYNPGHLLPHKWENCMTIDKLSWGYRREAGISDYLTIEELVKQLVETVSCGGNLLMNIGPTLDGTISVVFEERLRQMGSWLKVNGEAIYETHTWRSQNDTVTPDVWYTSKPKEKLVYAIFLKWPTSGQLFLGHPKAILGATEVKLLGHGQPLNWISLEQNGIMVELPQLTIHQMPCKWGWALALTNVI

SEQ ID NO: 4 - protein, 785 aa, Homo sapiens
MLVAGLLLWASLLTGAWPSFPTQDHLPATPRVRLSFKELKATGTAHFFNFLLNTTDYRILLKDEDHDRMYVGSKDYVLSLDLHDINREPLIIHWAASPQRIEECVLSGKDVNGECGNFVRLIQPWNRTHLYVCGTGAYNPMCTYVNRGRRAQATPWTQTQAVRGRGSRATDGALRPMPTAPRQDYIFYLEPERLESGKGKCPYDPKLDTASALINEELYAGVYIDFMGTDAAIFRTLGKQTAMRTDQYNSRWLNDPSFIHAELIPDSAERNDDKLYFFFRERSAEAPQSPAVYARIGRICLNDDGGHCCLVNKWSTFLKARLVCSVPGEDGIETHFDELQDVFVQQTQDVRNPVIYAVFTSSGSVFRGSAVCVYSMADIRMVFNGPFAHKEGPNYQWMPFSGKMPYPRPGTCPGGTFTPSMKSTKDYPDEVINFMRSHPLMYQAVYPLQRRPLVVRTGAPYRLTTIAVDQVDAADGRYEVLFLGTDRGTVQKVIVLPKDDQELEELMLEEVEVFKDPAPVKTMTISSKRQQLYVASAVGVTHLSLHRCQAYGAACADCCLARDPYCAWDGQACSRYTASSKRRSRRQDVRHGNPIRQCRGFNSNANKNAVESVQYGVAGSAAFLECQPRSPQATVKWLFQRDPGDRRREIRAEDRFLRTEQGLLLRALQLSDRGLYSCTATENNFKHVVTRVQLHVLGRDAVHAALFPPLSMSAPPPPGAGPPTPPYQELAQLLAQPEVGLIHQYCQGYWRHVPPSPREAPGAPRSPEPQDQKKPRNRRHHPPDT

SEQ ID NO: 5 - protein, 1480 aa, Homo sapiens
MQRSPLEKASVVSKLFFSWTRPILRKGYRQRLELSDIYQIPSVDSADNLSEKLEREWDRELASKKNPKLINALRRCFFWRFMFYGIFLYLGEVTKAVQPLLLGRIIASYDPDNKEERSIAIYLGIGLCLLFIVRTLLLHPAIFGLHHIGMQMRIAMFSLIYKKTLKLSSRVLDKISIGQLVSLLSNNLNKFDEGLALAHFVWIAPLQVALLMGLIWELLQASAFCGLGFLIVLALFQAGLGRMMMKYRDQRAGKISERLVITSEMIENIQSVKAYCWEEAMEKMIENLRQTELKLTRKAAYVRYFNSSAFFFSGFFVVFLSVLPYALIKGIILRKIFTTISFCIVLRMAVTRQFPWAVQTWYDSLGAINKIQDFLQKQEYKTLEYNLTTTEVVMENVTAFWEEGFGELFEKAKQNNNNRKTSNGDDSLFFSNFSLLGTPVLKDINFKIERGQLLAVAGSTGAGKTSLLMVIMGELEPSEGKIKHSGRISFCSQFSWIMPGTIKENIIFGVSYDEYRYRSVIKACQLEEDISKFAEKDNIVLGEGGITLSGGQRARISLARAVYKDADLYLLDSPFGYLDVLTEKEIFESCVCKLMANKTRILVTSKMEHLKKADKILILHEGSSYFYGTFSELQNLQPDFSSKLMGCDSFDQFSAERRNSILTETLHRFSLEGDAPVSWTETKKQSFKQTGEFGEKRKNSILNPINSIRKFSIVQKTPLQMNGIEEDSDEPLERRLSLVPDSEQGEAILPRISVISTGPTLQARRRQSVLNLMTHSVNQGQNIHRKTTASTRKVSLAPQANLTELDIYSRRLSQETGLEISEEINEEDLKECFFDDMESIPAVTTWNTYLRYITVHKSLIFVLIWCLVIFLAEVAASLVVLWLLGNTPLQDKGNSTHSRNNSYAVIITSTSSYYVFYIYVGVADTLLAMGFFRGLPLVHTLITVSKILHHKMLHSVLQAPMSTLNTLKAGGILNRFSKDIAILDDLLPLTIFDFIQLLLIVIGAIAVVAVLQPYIFVATVPVIVAFIMLRAYFLQTSQQLKQLESEGRSPIFTHLVTSLKGLWTLRAFGRQPYFETLFHKALNLHTANWFLYLSTLRWFQMRIEMIFVIFFIAVTFISILTTGEGEGRVGIILTLAMNIMSTLQWAVNSSIDVDSLMRSVSRVFKFIDMPTEGKPTKSTKPYKNGQLSKVMIIENSHVKKDDIWPSGGQMTVKDLTAKYTEGGNAILENISFSISPGQRVGLLGRTGSGKSTLLSAFLRLLNTEGEIQIDGVSWDSITLQQWRKAFGVIPQKVFIFSGTFRKNLDPYEQWSDQEIWKVADEVGLRSVIEQFPGKLDFVLVDGGCVLSHGHKQLMCLARSVLSKAKILLLDEPSAHLDPVTYQIIRRTLKQAFADCTVILCEHRIEAMLECQQFLVIEENKVRQYDSIQKLLNERSLFRQAISPSDRVKLFPHRNSSKCKSKPQIAALKEETEEEVQDTRL

SEQ ID NO: 6 - protein, 1077 aa, Homo sapiens
MTAELQQDDAAGAADGHGSSCQMLLNQLREITGIQDPSFLHEALKASNGDITQAVSLLTDERVKEPSQDTVATEPSEVEGSAANKEVLAKVIDLTHDNKDDLQAAIALSLLESPKIQADGRDLNRMHEATSAETKRSKRKRCEVWGENPNPNDWRRVDGWPVGLKNVGNTCWFSAVIQSLFQLPEFRRLVLSYSLPQNVLENCRSHTEKRNIMFMQELQYLFALMMGSNRKFVDPSAALDLLKGAFRSSEEQQQDVSEFTHKLLDWLEDAFQLAVNVNSPRNKSENPMVQLFYGTFLTEGVREGKPFCNNETFGQYPLQVNGYRNLDECLEGAMVEGDVELLPSDHSVKYGQERWFTKLPPVLTFELSRFEFNQSLGQPEKIHNKLEFPQIIYMDRYMYRSKELIRNKRECIRKLKEEIKILQQKLERYVKYGSGPARFPLPDMLKYVIEFASTKPASESCPPESDTHMTLPLSSVHCSVSDQTSKESTSTESSSQDVESTFSSPEDSLPKSKPLTSSRSSMEMPSQPAPRTVTDEEINFVKTCLQRWRSEIEQDIQDLKTCIASTTQTIEQMYCDPLLRQVPYRLHAVLVHEGQANAGHYWAYIYNQPRQSWLKYNDISVTESSWEEVERDSYGGLRNVSAYCLMYINDKLPYFNAEAAPTESDQMSEVEALSVELKHYIQEDNWRFEQEVEEWEEEQSCKIPQMESSTNSSSQDYSTSQEPSVASSHGVRCLSSEHAVIVKEQTAQAIANTARAYEKSGVEAALSEVMLSPAMQGVILAIAKARQTFDRDGSEAGLIKAFHEEYSRLYQLAKETPTSHSDPRLQHVLVYFFQNEAPKRVVERTLLEQFADKNLSYDERSISIMKVAQAKLKEIGPDDMNMEEYKKWHEDYSLFRKVSVYLLTGLELYQKGKYQEALSYLVYAYQSNAALLMKGPRRGVKESVIALYRRKCLLELNAKAASLFETNDDHSVTEGINVMNELIIPCIHLIINNDISKDDLDAIEVMRNHWCSYLGQDIAENLQLCLGEFLPRLLDPSAEIIVLKEPPTIRPNSPYDLCSRFAAVMESIQGVSTVTVK

SEQ ID NO: 7 - protein, 235 aa, Homo sapiens
MGTADSDEMAPEAPQHTHIDVHIHQESALAKLLLTCCSALRPRATQARGSSRLLVASWVMQIVLGILSAVLGGFFYIRDYTLLVTSGAAIWTGAVAVLAGAAAFIYEKRGGTYWALLRTLLTLAAFSTAIAALKLWNEDFRYGYSYYNSACRISSSSDWNTPAPTQSPEEVRRLHLCTSFMDMLKALFRTLQAMLLGVWILLLLASLTPLWLYCWRMFPTKGKRDQKEMLEVSGI

SEQ ID NO: 8 - protein, 698 aa, Homo sapiens
MKIETSGYNSDKLICRGFIGTPAPPVCDSKFLLSPSSDVRMIPCRAALTFARCLIRRKIVTLDSLEDTKLCRCLSTMDLIALGVGSTLGAGVYVLAGEVAKADSGPSIVVSFLIAALASVMAGLCYAEFGARVPKTGSAYLYTYVTVGELWAFITGWNLILSYVIGTSSVARAWSGTFDELLSKQIGQFLRTYFRMNYTGLAEYPDFFAVCLILLLAGLLSFGVKESAWVNKVFTAVNILVLLFVMVAGFVKGNVANWKISEEFLKNISASAREPPSENGTSIYGAGGFMPYGFTGTLAGAATCFYAFVGFDCIATTGEEVRNPQKAIPIGIVTSLLVCFMAYFGVSAALTLMMPYYLLDEKSPLPVAFEYVGWGPAKYVVAAGSLCALSTSLLGSIFPMPRVIYAMAEDGLLFKCLAQINSKTKTPIIATLSSGAVAALMAFLFDLKALVDMMSIGTLMAYSLVAACVLILRYQPGLSYDQPKCSPEKDGLGSSPRVTSKSESQVTMLQRQGFSMRTLFCPSLLPTQQSASLVSFLVGFLAFLVLGLSVLTTYGVHAITRLEAWSLALLALFLVLFVAIVLTIWRQPQNQQKVAFMVPFLPFLPAFSILVNIYLMVQLSADTWVRFSIWMAIGFLIYFSYGIRHSLEGHLRDENNEEDAYPDNVHAAAEEKSAIQANDHHPRNLSSPFIFHEKTSEF

SEQ ID NO: 9 - protein, 606 aa, Homo sapiens
MTLLTFRDVAIEFSLEEWKCLDLAQQNLYRDVMLENYRNLFSVGLTVCKPGLITCLEQRKEPWNVKRQEAADGHPEMGFHHATQACLELLGSSDLPASASQSAGITGVNHRAQPGLNVSVDKFTAMSSHFTQDLLPEQGIQDAFPKRILRGYGNCGLDNLYLRKDWESLDECKLQKDYNGLNQCSSTTHSKIFQYNKYVKIFDNFSNLHRRNISNTGEKPFKCQECGKSFQMLSFLTEHQKIHTGKKFQKCGECGKTFIQCSHFTEPENIDTGEKPYKCQECNNVIKTCSVLTKNRIYAGGEHYRCEEFGKVFNQCSHLTEHEHGTEEKPCKYEECSSVFISCSSLSNQQMILAGEKLSKCETWYKGFNHSPNPSKHQRNEIGGKPFKCEECDSIFKWFSDLTKHKRIHTGEKPYKCDECGKAYTQSSHLSEHRRIHTGEKPYQCEECGKVFRTCSSLSNHKRTHSEEKPYTCEECGNIFKQLSDLTKHKKTHTGEKPYKCDECGKNFTQSSNLIVHKRIHTGEKPYKCEECGRVFMWFSDITKHKKTHTGEKPYKCDECGKNFTQSSNLIVHKRIHTGEKPYKCEKCGKAFTQFSHLTVHESIHT

SEQ ID NO: 10 - protein, 899 aa, Homo sapiens
MDRKVAREFRHKVDFLIENDAEKDYLYDVLRMYHQTMDVAVLVGDLKLVINEPSRLPLFDAIRPLIPLKHQVEYDQLTPRRSRKLKEVRLDRLHPEGLGLSVRGGLEFGCGLFISHLIKGGQADSVGLQVGDEIVRINGYSISSCTHEEVINLIRTKKTVSIKVRHIGLIPVKSSPDEPLTWQYVDQFVSESGGVRGSLGSPGNRENKEKKVFISLVGSRGLGCSISSGPIQKPGIFISHVKPGSLSAEVGLEIGDQIVEVNGVDFSNLDHKEAVNVLKSSRSLTISIVAAAGRELFMTDRERLAEARQRELQRQELLMQKRLAMESNKILQEQQEMERQRRKEIAQKAAEENERYRKEMEQIVEEEEKFKKQWEEDWGSKEQLLLPKTITAEVHPVPLRKPKSFGWFYRYDGKFPTIRKKGKDKKKAKYGSLQDLRKNKKELEFEQKLYKEKEEMLEKEKQLKINRLAQEVSETEREDLEESEKIQYWVERLCQTRLEQISSADNEISEMTTGPPPPPPSVSPLAPPLRRFAGGLHLHTTDLDDIPLDMFYYPPKTPSALPVMPHPPPSNPPHKVPAPPVLPLSGHVSASSSPWVQRTPPPIPIPPPPSVPTQDLTPTRPLPSALEEALSNHPFRTGDTGNPVEDWEAKNHSGKPTNSPVPEQSFPPTPKTFCPSPQPPRGPGVSTISKPVMVHQEPNFIYRPAVKSEVLPQEMLKRMVVYQTAFRQDFRKYEEGFDPYSMFTPEQIMGKDVRLLRIKKEGSLDLALEGGVDSPIGKVVVSAVYERGAAERHGGIVKGDEIMAINGKIVTDYTLAEAEAALQKAWNQGGDWIDLVVAVCPPKEYDDELASLPSSVAESPQPVRKLLEDRAAVHRHGFLLQLEPTDLLLKSKRGNQIHR

SEQ ID NO: 11 - protein, 241 aa, Homo sapiens
MTLQWAAVATFLYAEIGLILIFCLPFIPPQRWQKIFSFNVWGKIATFWNKAFLTIIILLIVLFLDAVREVRKYSSVHTIEKSSTSRPDAYEHTQMKLFRSQRNLYISGFSLFFWLVLRRLVTLITQLAKELSNKGVLKTQAENTNKAAKKFMEENEKLKRILKSHGKDEECVLEAENKKLVEDQEKLKTELRKTSDALSKAQNDVMEMKMQSERLSKEYDQLLKEHSELQDRLERGNKKRL

SEQ ID NO: 12 - protein, 511 aa, Homo sapiens
MSRGPEEVNRLTESTYRNVMEQFNPGLRNLINLGKNYEKAVNAMILAGKAYYDGVAKIGEIATGSPVSTELGHVLIEISSTHKKLNESLDENFKKFHKEIIHELEKKIELDVKYMNATLKRYQTEHKNKLESLEKSQAELKKIRRKSQGSRNALKYEHKEIEYVETVTSRQSEIQKFIADGCKEALLEEKRRFCFLVDKHCGFANHIHYYHLQSAELLNSKLPRWQETCVDAIKVPEKIMNMIEEIKTPASTPVSGTPQASPMIERSNVVRKDYDTLSKCSPKMPPAPSGRAYTSPLIDMFNNPATAAPNSQRVNNSTGTSEDPSLQRSVSVATGLNMMKKQKVKTIFPHTAGSNKTLLSFAQGDVITLLIPEEKDGWLYGEHDVSKARGWFPSSYTKLLEENETEAVTVPTPSPTPVRSISTVNLSENSSVVIPPPDYLECLSMGAAADRRADSARTTSTFKAPASKPETAAPNDANGTAKPPFLSGENPFATVKLRPTVTNDRSAPIIR

SEQ ID NO: 13 - protein, 315 aa, Homo sapiens
MRMCDRGIQMLITTVGAFAAFSLMTIAVGTDYWLYSRGVCRTKSTSDNETSRKNEEVMTHSGLWRTCCLEGAFRGVCKKIDHFPEDADYEQDTAEYLLRAVRASSVFPILSVTLLFFGGLCVAASEFHRSRHNVILSAGIFFVSAGLSNIIGIIVYISANAGDPGQRDSKKSYSYGWSFYFGAFSFIIAEIVGVVAVHIYIEKHQQLRAKSHSEFLKKSTFARLPPYRYRFRRRSSSRSTEPRSRDLSPISKGFHTIPSTDISMFTLSRDPSKITMGTLLNSDRDHAFLQFHNSTPKEFKESLHNNPANRRTTPV

SEQ ID NO: 14 - protein, 1024 aa, Homo sapiens
MCARMAGRTTAAPRGPYGPWLCLLVALALDVVRVDCGQAPLDPVYLPAALELLDAPEHFRVQQVGHYPPANSSLSSRSETFLLLQPWPRAQPLLRASYPPFATQQVVPPRVTEPHQRPVPWDVRAVSVEAAVTPAEPYARVLFHLKGQDWPPGSGSLPCARLHATHPAGTAHQACRFQPSLGACVVELELPSHWFSQASTTRAELAYTLEPAAEGPGGCGSGEENDPGEQALPVGGVELRPADPPQYQEVPLDEAVTLRVPDMPVRPGQLFSATLLLRHNFTASLLTLRIKVKKGLHVTAARPAQPTLWTAKLDRFKGSRHHTTLITCHRAGLTEPDSSSPLELSEFLWVDFVVENSTGGGVAVTRPVTWQLEYPGQAPEAEKDKMVWEILVSERDIRALIPLAKAEELVNTAPLTGVPQHVPVRLVTVDGGGALVEVTEHVGCESANTQVLQVSEACDAVFVAGKESRGARGVRVDFWWRRLRASLRLTVWAPLLPLRIELTDTTLEQVRGWRVPGPAEGPAEPAAEASDEAERRARGCHLQYQRAGVRFLAPFAAHPLDGGRRLTHLLGPDWLLDVSHLVAPHARVLDSRVASLEGGRVVVGREPGVTSIEVRSPLSDSILGEQALAVTDDKVSVLELRVQPVMGISLTLSRGTAHPGEVTATCWAQSALPAPKQEVALSLWLSFSDHTVAPAELYDRRDLGLSVSAEEPGAILPAEEQGAQLGVVVSGAGAEGLPLHVALHPPEPCRRGRHRVPLASGTAWLGLPPASTPAPALPSSPAWSPPATEATMGGKRQVAGSVGGNTGVRGKFERAEEEARKEETEAREEEEEEEEEMVPAPQHVTELELGMYALLGVFCVAIFIFLVNGVVFVLRYQRKEPPDSATDPTSPQPHNWVWLGTDQEELSRQLDRQSPGPPKGEGSCPCESGGGGEAPTLAPGPPGGTTSSSSTLARKEAGGRRKRVEFVTFAPAPPAQSPEEPVGAPAVQSILVAGEEDIRWVCEDMGLKDPEELRNYMERIRGSS

SEQ ID NO: 15 - protein, 736 aa, Homo sapiens
MAGSSTGGGGVGETKVIYHLDEEETPYLVKIPVPAERITLGDFKSVLQRPAGAKYFFKSMDQDFGVVKEEISDDNARLPCFNGRVVSWLVSSDNPQPEMAPPVHEPRAELAPPAPPLPPLPPERTSGIGDSRPPSFHPNVSSSHENLEPETETESVVSLRRERPRRRDSSEHGAGGHRTGGPSRLERHLAGYESSSTLMTSELESTSLGDSDEEDTMSRFSSSTEQSSASRLLKRHRRRRKQRPPRLERTSSFSSVTDSTMSLNIITVTLNMEKYNFLGISIVGQSNERGDGGIYIGSIMKGGAVAADGRIEPGDMLLQVNDMNFENMSNDDAVRVLRDIVHKPGPIVLTVAKCWDPSPQAYFTLPRNEPIQPIDPAAWVSHSAALTGTFPAYPGSSSMSTITSGSSLPDGCEGRGLSVHTDMASVTKAMAAPESGLEVRDRMWLKITIPNAFLGSDVVDWLYHHVEGFPERREARKYASGLLKAGLIRHTVNKITFSEQCYYVFGDLSGGCESYLVNLSLNDNDGSSGASDQDTLAPLPGATPWPLLPTFSYQYPAPHPYSPQPPPYHELSSYTYGGGSASSQHSEGSRSSGSTRSDGGAGRTGRPEERAPESKSGSGSESEPSSRGGSLRRGGEASGTSDGGPPPSRGSTGGAPNLRAHPGLHPYGPPPGMALPYNPMMVVMMPPPPPPVPPAVQPPGAPPVRDLGSVPPELTASRQSFHMAMGNPSEFFVDVM

SEQ ID NO: 16 - protein, 665 aa, Homo sapiens
MTSANKAIELQLQVKQNAEELQDFMRDLENWEKDIKQKDMELRRQNGVPEENLPPIRNGNFRKKKKGKAKESSKKTREENTKNRIKSYDYEAWAKLDVDRILDELDKDDSTHESLSQESESEEDGIHVDSQKALVLKEKGNKYFKQGKYDEAIDCYTKGMDADPYNPVLPTNRASAYFRLKKFAVAESDCNLAVALNRSYTKAYSRRGAARFALQKLEEAKKDYERVLELEPNNFEATNELRKISQALASKENSYPKEADIVIKSTEGERKQIEAQQNKQQAISEKDRGNGFFKEGKYERAIECYTRGIAADGANALLPANRAMAYLKIQKYEEAEKDCTQAILLDGSYSKAFARRGTARTFLGKLNEAKQDFETVLLLEPGNKQAVTELSKIKKELIEKGHWDDVFLDSTQRQNVVKPIDNPPHPGSTKPLKKVIIEETGNLIQTIDVPDSTTAAAPENNPINLANVIAATGTTSKKNSSQDDLFPTSDTPRAKVLKIEEVSDTSSLQPQASLKQDVCQSYSEKMPIEIEQKPAQFATTVLPPIPANSFQLESDFRQLKSSPDMLYQYLKQIEPSLYPKLFQKNLDPDVFNQIVKILHDFYIEKEKPLLIFEILQRLSELKRFDMAVMFMSETEKKIARALFNHIDKSGLKDSSVEELKKRYGG

SEQ ID NO: 17 - protein, 451 aa, Homo sapiens
MPKNKKRNTPHRGSSAGGGGSGAAAATAATAGGQHRNVQPFSDEDASIETMSHCSGYSDPSSFAEDGPEVLDEEGTQEDLEYKLKGLIDLTLDKSAKTRQAALEGIKNALASKMLYEFILERRMTLTDSIERCLKKGKSDEQRAAAALASVLCIQLGPGIESEEILKTLGPILKKIICDGSASMQARQTCATCFGVCCFIATDDITELYSTLECLENIFTKSYLKEKDTTVICSTPNTVLHISSLLAWTLLLTICPINEVKKKLEMHFHKLPSLLSCDDVNMRIAAGESLALLFELARGIESDFFYEDMESLTQMLRALATDGNKHRAKVDKRKQRSVFRDVLRAVEERDFPTETIKFGPERMYIDCWVKKHTYDTFKEVLGSGMQYHLQSNEFLRNVFELGPPVMLDAATLKTMKISRFERHLYNSAAFKARTKARSKCRDKRADVGEFF

SEQ ID NO: 18 - protein, 802 aa, Homo sapiens
MLGARAWLGRVLLLPRAGAGLAASRRCPGVWPRTWPHRSPSRGSSSRDKDRSATVSSSVPMPAGGKGSHPSSTPQRVPNRLIHEKSPYLLQHAYNPVDWYPWGQEAFDKARKENKPIFLSVGYSTCHWCHMMEEESFQNEEIGRLLSEDFVSVKVDREERPDVDKVYMTFVQATSSGGGWPMNVWLTPNLQPFVGGTYFPPEDGLTRVGFRTVLLRIREQWKQNKNTLLENSQRVTTALLARSEISVGDRQLPPSAATVNNRCFQQLDEGYDEEYGGFAEAPKFPTPVILSFLFSYWLSHRLTQDGSRAQQMALHTLKMMANGGIRDHVGQGFHRYSTDRQWHVPHFEKMLYDQAQLAVAYSQAFQLSGDEFYSDVAKGILQYVARSLSHRSGGFYSAEDADSPPERGQRPKEGAYYVWTVKEVQQLLPEPVLGATEPLTSGQLLMKHYGLTEAGNISPSQDPKGELQGQNVLTVRYSLELTAARFGLDVEAVRTLLNSGLEKLFQARKHRPKPHLDSKMLAAWNGLMVSGYAVTGAVLGQDRLINYATNGAKFLKRHMFDVASGRLMRTCYTGPGGTVEHSNPPCWGFLEDYAFVVRGLLDLYEASQESAWLEWALRLQDTQDKLFWDSQGGGYFCSEAELGAGLPLRLKDDQDGAEPSANSVSAHNLLRLHGFTGHKDWMDKCVCLLTAFSERMRRVPVALPEMVRALSAQQQTLKQIVICGDRQAKDTKALVQCVHSVYIPNKVLILADGDPSSFLSRQLPFLSTLRRLEDQATAYVCENQACSVPITDPCELRKLLHP

SEQ ID NO: 19 - protein, 364 aa, Homo sapiens
MAASGPGCRSWCLCPEVPSATFFTALLSLLVSGPRLFLLQQPLAPSGLTLKSEALRNWQVYRLVTYIFVYENPISLLCGAIIIWRFAGNFERTVGTVRHCFFTVIFAIFSAIIFLSFEAVSSLSKLGEVEDARGFTPVAFAMLGVTTVRSRMRRALVFGMVVPSVLVPWLLLGASWLIPQTSFLSNVCGLSIGLAYGLTYCYSIDLSERVALKLDQTFPFSLMRRISVFKYVSGSSAERRAAQSRKLNPVPGSYPTQSCHPHLSPSHPVSQTQHASGQKLASWPSCTPGHMPTLPPYQPASGLCYVQNHFGPNPTSSSVYPASAGTSLGIQPPTPVNSPGTVYSGALGTPGAAGSKESSRVPMP

SEQ ID NO: 20 - protein, 312 aa, Homo sapiens
MGRRRAARGPGAEGGRPRHLPTRSLEAFAEEVGAALQASVEPGAADGEGGPGPAALPCTLAMWELGHCDPRRCTGRKLARLGLVRCLRLGHRFGGLVLSPVGKQYASPADRQLVAQSGVAVIDCSWARLDETPFGKMRGSHLRLLPYLVAANPVNYGRPYRLSCVEAFAATFCIVGFPDLAVILLRKFKWGKGFLDLNRQLLDKYAACGSPEEVLQAEQEFLANAKESPQEEEIDPFDVDSGREFGNPNRPVASTRLPSDTDDSDASEDPGPGAERGGASSSCCEEEQTQGRGAEARAPAEVWKGIKKRQRD

SEQ ID NO: 21 - protein, 748 aa, Homo sapiens
MVARSTDSLDGPGEGSVQPLPTAGGPSVKGKPGKRLSAPRGPFPRLADCAHFHYENVDFGHIQLLLSPDREGPSLSGENELVFGVQVTCQGRSWPVLRSYDDFRSLDAHLHRCIFDRRFSCLPELPPPPEGARAAQMLVPLLLQYLETLSGLVDSNLNCGPVLTWMELDNHGRRLLLSEEASLNIPAVAAAHVIKRYTAQAPDELSFEVGDIVSVIDMPPTEDRSWWRGKRGFQVGFFPSECVELFTERPGPGLKADADGPPCGIPAPQGISSLTSAVPRPRGKLAGLLRTFMRSRPSRQRLRQRGILRQRVFGCDLGEHLSNSGQDVPQVLRCCSEFIEAHGVVDGIYRLSGVSSNIQRLRHEFDSERIPELSGPAFLQDIHSVSSLCKLYFRELPNPLLTYQLYGKFSEAMSVPGEEERLVRVHDVIQQLPPPHYRTLEYLLRHLARMARHSANTSMHARNLAIVWAPNLLRSMELESVGMGGAAAFREVRVQSVVVEFLLTHVDVLFSDTFTSAGLDPAGRCLLPRPKSLAGSCPSTRLLTLEEAQARTQGRLGTPTEPTTPKAPASPAERRKGERGEKQRKPGGSSWKTFFALGRGPSVPRKKPLPWLGGTRAPPQPSGSRPDTVTLRSAKSEESLSSQASGAGLQRLHRLRRPHSSSDAFPVGPAPAGSCESLSSSSSSESSSSESSSSSSESSAAGLGALSGSPSHRTSAWLDDGDELDFSPPRYPTPSWSLHSEGQTRSYC

SEQ ID NO: 22 - protein, 343 aa, Homo sapiens
MKEINLLPDRVLSTPSVQLVQSWYVQSLLDIMEFLDKDPEDHRTLSQFTDALVTIRNRHNDVVPTMAQGVLEYKDTYGDDPVSNQNIQYFLDRFYLSRISIRMLINQHTLIFDGSTNPAHPKHIGSIDPNCNVSEVVKDAYDMAKLLCDKYYMASPDLEIQEINAANSKQPIHMVYVPSHLYHMLFELFKNAMRATVESHESSLILPPIKVMVALGEEDLSIKMSDRGGGVPLRKIERLFSYMYSTAPTPQPGTGGTPLAGFGYGLPISRLYAKYFQGDLQLFSMEGFGTDAVIYLKALSTDSVERLPVYNKSAWRHYQTIQEAGDWCVPSTEPKNTSTYRVS

SEQ ID NO: 23 - protein, 1066 aa, Homo sapiens
MGPGPSRAPRAPRLMLCALALMVAAGGCVVSAFNLDTRFLVVKEAGNPGSLFGYSVALHRQTERQQRYLLLAGAPRELAVPDGYTNRTGAVYLCPLTAHKDDCERMNITVKNDPGHHIIEDMWLGVTVASQGPAGRVLVCAHRYTQVLWSGSEDQRRMVGKCYVRGNDLELDSSDDWQTYHNEMCNSNTDYLETGMCQLGTSGGFTQNTVYFGAPGAYNWKGNSYMIQRKEWDLSEYSYKDPEDQGNLYIGYTMQVGSFILHPKNITIVTGAPRHRHMGAVFLLSQEAGGDLRRRQVLEGSQVGAYFGSAIALADLNNDGWQDLLVGAPYYFERKEEVGGAIYVFMNQAGTSFPAHPSLLLHGPSGSAFGLSVASIGDINQDGFQDIAVGAPFEGLGKVYIYHSSSKGLLRQPQQVIHGEKLGLPGLATFGYSLSGQMDVDENFYPDLLVGSLSDHIVLLRARPVINIVHKTLVPRPAVLDPALCTATSCVQVELCFAYNQSAGNPNYRRNITLAYTLEADRDRRPPRLRFAGSESAVFHGFFSMPEMRCQKLELLLMDNLRDKLRPIIISMNYSLPLRMPDRPRLGLRSLDAYPILNQAQALENHTEVQFQKECGPDNKCESNLQMRAAFVSEQQQKLSRLQYSRDVRKLLLSINVTNTRTSERSGEDAHEALLTLVVPPALLLSSVRPPGACQANETIFCELGNPFKRNQRMELLIAFEVIGVTLHTRDLQVQLQLSTSSHQDNLWPMILTLLVDYTLQTSLSMVNHRLQSFFGGTVMGESGMKTVEDVGSPLKYEFQVGPMGEGLVGLGTLVLGLEWPYEVSNGKWLLYPTEITVHGNGSWPCRPPGDLINPLNLTLSDPGDRPSSPQRRRRQLDPGGGQGPPPVTLAAAKKAKSETVLTCATGRAHCVWLECPIPDAPVVTNVTVKARVWNSTFIEDYRDFDRVRVNGWATLFLRTSIPTINMENKTTWFSVDIDSELVEELPAEIELWLVLVAVGAGLLLLGLIILLLWKCDFFKRTRYYQIMPKYHAVRIREEERYPPPGSTLPTKKHWVTSWQTRDQYY

SEQ ID NO: 24 - protein, 452 aa, Homo sapiens
MSTTFPGLVHDAEIRHDGSNSYRLMQLGCLESVANSTVAYSSSSPLTYSTTGTEFASPYFSTNHQYTPLHHQSFHYEFQHSHPAVTPDAYSLNSLHHSQQYYQQIHHGEPTDFINLHNARALKSSCLDEQRRELGCLDAYRRHDLSLMSHGSQYGMHPDQRLLPGPSLGLAAAGADDLQGSVEAQCGLVLNGQGGVIRRGGTCVVNPTDLFCSVPGRLSLLSSTSKYKVTIAEVKRRLSPPECLNASLLGGILRRAKSKNGGRCLREKLDRLGLNLPAGRRKAANVTLLTSLVEGEALHLARDFGYTCETEFPAKAVGEHLARQHMEQKEQTARKKMILATKQICKEFQDLLSQDRSPLGSSRPTPILDLDIQRHLTHFSLITHGFGTPAICAALSTFQTVLSEMLNYLEKHTTHKNGGAADSGQGHANSEKAPLRKTSEAAVKEGKTEKTD

SEQ ID NO: 25 - protein, 207 aa, Homo sapiens
MDDDLMLALRLQEEWNLQEAERDHAQESLSLVDASWELVDPTPDLQALFVQFNDQFFWGQLEAVEVKWSVRMTLCAGICSYEGKGGMCSIRLSEPLLKLRPRKDLVEVYHTFHDEVDEYRRHWWRCNGPCQHRPPYYGYVKRATNREPSAHDYWWAEHQKTCGGTYIKIKEPENYSKKGKGKAKLGKEPVLAAENKGTFVYILLIFM

SEQ ID NO: 26 - protein, 586 aa, Homo sapiens
MGVNAVHWFRKGLRLHDNPALKECIQGADTIRCVYILDPWFAGSSNVGINRWRFLLQCLEDLDANLRKLNSRLFVIRGQPADVFPRLFKEWNITKLSIEYDSEPFGKERDAAIKKLATEAGVEVIVRISHTLYDLDKIIELNGGQPPLTYKRFQTLISKMEPLEIPVETITSEVIEKCTTPLSDDHDEKYGVPSLEELGFDTDGLSSAVWPGGETEALTRLERHLERKAWVANFERPRMNANSLLASPTGLSPYLRFGCLSCRLFYFKLTDLYKKVKKNSSPPLSLYGQLLWREFFYTAATNNPRFDKMEGNPICVQIPWDKNPEALAKWAEGRTGFPWIDAIMTQLRQEGWIHHLARHAVACFLTRGDLWISWEEGMKVFEELLLDADWSINAGSWMWLSCSSFFQQFFHCYCPVGFGRRTDPNGDYIRRYLPVLRGFPAKYIYDPWNAPEGIQKVAKCLIGVNYPKPMVNHAEASRLNIERMKQIYQQLSRYRGLGLLASVPSNPNGNGGFMGYSAENIPGCSSSGSCSQGSGILHYAHGDSQQTHLLKQGRSSMGTGLSGGKRPSQEEDTQSIGPKVQRQSTN

SEQ ID NO: 27 - protein, 234 aa, Homo sapiens
MNHLPEDMENALTGSQSSHASLRNIHSINPTQLMARIESYEGREKKGISDVRRTFCLFVTFDLLFVTLLWIIELNVNGGIENTLEKEVMQYDYYSSYFDIFLLAVFRFKVLILAYAVCRLRHWWAIALTTAVTSAFLLAKVILSKLFSQGAFGYVLPIISFILAWIETWFLDFKVLPQEAEEENRLLIVQDASERAALIPGGLSDGQFYSPPESEAGSEEAEEKQDSEKPLLEL

SEQ ID NO: 28 - protein, 520 aa, Homo sapiens
MPASELKASEIPFHPSIKTQDPKAEEKSPKKQKVTLTAAEALKLFKNQLSPYEQSEILGYAELWFLGLEAKKLDTAPEKFSKTSFDDEHGFYLKVLHDHIAYRYEVLETIGKGSFGQVAKCLDHKNNELVALKIIRNKKRFHQQALMELKILEALRKKDKDNTYNVVHMKDFFYFRNHFCITFELLGINLYELMKNNNFQGFSLSIVRRFTLSVLKCLQMLSVEKIIHCDLKPENIVLYQKGQASVKVIDFGSSCYEHQKVYTYIQSRFYRSPEVILGHPYDVAIDMWSLGCITAELYTGYPLFPGENEVEQLACIMEVLGLPPAGFIQTASRRQTFFDSKGFPKNITNNRGKKRYPDSKDLTMVLKTYDTSFLDFLRRCLVWEPSLRMTPDQALKHAWIHQSRNLKPQPRPQTLRKSNSFFPSETRKDKVQGCHHSSRKADEITKETTEKTKDSPTKHVQHSGDQQDCLQHGADTVQLPQLVDAPKKSEAAVGAEVSMTSPGQSKNFSLKNTNVLPPIV

SEQ ID NO: 29 - protein, 419 aa, Homo sapiens
MRGLLVLSVLLGAVFGKEDFVGHQVLRISVADEAQVQKVKELEDLEHLQLDFWRGPAHPGSPIDVRVPFPSIQAVKIFLESHGISYETMIEDVQSLLDEEQEQMFAFRSRARSTDTFNYATYHTLEEIYDFLDLLVAENPHLVSKIQIGNTYEGRPIYVLKFSTGGSKRPAIWIDTGIHSREWVTQASGVWFAKKITQDYGQDAAFTAILDTLDIFLEIVTNPDGFAFTHSTNRMWRKTRSHTAGSLCIGVDPNRNWDAGFGLSGASSNPCSETYHGKFANSEVEVKSIVDFVKDHGNIKAFISIHSYSQLLMYPYGYKTEPVPDQDELDQLSKAAVTALASLYGTKFNYGSIIKAIYQASGSTIDWTYSQGIKYSFTFELRDTGRYGFLLPASQIIPTAKETWLALLTIMEHTLNHPY

SEQ ID NO: 30 - protein, 729 aa, Homo sapiens
MSGQPPPPPPQQQQQQQQLSPPPPAALAPVSGVVLPAPPAVSAGSSPAGSPGGGAGGEGLGAAAAALLLHPPPPPPPATAAPPPPPPPPPPPASAAAPASGPPAPPGLAAGPGPAGGAPTPALVAGSSAAAPFPHGDSALNEQEKELQRRLKRLYPAVDEQETPLPRSWSPKDKFSYIGLSQNNLRVHYKGHGKTPKDAASVRATHPIPAACGIYYFEVKIVSKGRDGYMGIGLSAQGVNMNRLPGWDKHSYGYHGDDGHSFCSSGTGQPYGPTFTTGDVIGCCVNLINNTCFYTKNGHSLGIAFTDLPPNLYPTVGLQTPGEVVDANFGQHPFVFDIEDYMREWRTKIQAQIDRFPIGDREGEWQTMIQKMVSSYLVHHGYCATAEAFARSTDQTVLEELASIKNRQRIQKLVLAGRMGEAIETTQQLYPSLLERNPNLLFTLKVRQFIEMVNGTDSEVRCLGGRSPKSQDSYPVSPRPFSSPSMSPSHGMNIHNLASGKGSTAHFSGFESCSNGVISNKAHQSYCHSNKHQSSNLNVPELNSINMSRSQQVNNFTSNDVDMETDHYSNGVGETSSNGFLNGSSKHDHEMEDCDTEMEVDSSQLRRQLCGGSQAAIERMIHFGRELQAMSEQLRRDCGKNTANKKMLKDAFSLLAYSDPWNSPVGNQLDPIQREPVCSALNSAILETHNLPKQPPLALAMGQATQCLGLMARSGIGSCAFATVEDYLH

SEQ ID NO: 31 - protein, 790 aa, Homo sapiens
MKAFGPPHEGPLQGLVASRIETYGGRHRASAQSTAGRLYPRGYPVLDPSRRRLQQYVPFARGSGQARGLSPMRLRDPEPEKRHGGHVGAGLLHSPKLKELTKAHELEVRLHTFSMFGMPRLPPEDRRHWEIGEGGDSGLTIEKSWRELVPGHKEMSQELCHQQEALWELLTTELIYVRKLKIMTDLLAAGLLNLQRVGLLMEVSAETLFGNVPSLIRTHRSFWDEVLGPTLEETRASGQPLDPIGLQSGFLTFGQRFHPYVQYCLRVKQTMAYAREQQETNPLFHAFVQWCEKHKRSGRQMLCDLLIKPHQRITKYPLLLHAVLKRSPEARAQEALNAMIEAVESFLRHINGQVRQGEEQESLAAAAQRIGPYEVLEPPSDEVEKNLRPFSTLDLTSPMLGVASEHTRQLLLEGPVRVKEGREGKLDVYLFLFSDVLLVTKPQRKADKAKVIRPPLMLEKLVCQPLRDPNSFLLIHLTEFQCVSSALLVHCPSPTDRAQWLEKTQQAQAALQKLKAEEYVQQKRELLTLYRDQDRESPSTRPSTPSLEGSQSSAEGRTPEFSTIIPHLVVTEDTDEDAPLVPDDTSDSGYGTLIPGTPTGSRSPLSRLRQRALRRDPRLTFSTLELRDIPLRPHPPDPQAPQRRSAPELPEGILKGGSLPQEDPPTWSEEEDGASERGNVVVETLHRARLRGQLPSSPTHADSAGESPWESSGEEEEEGPLFLKAGHTSLRPMRAEDMLREIREELASQRIEGAEEPRDSRPRKLTRAQLQRMRGPHIIQLDTPLSASEV

SEQ ID NO: 32 - protein, 3209 aa, Homo sapiens
RTVGMANREKYGRKIATASIGGTKVNVSMGSTFDMNGSLGCLQLMDLTQDNVKNQYVVSIGNSVGYENIISDIGYFESVFVRMEDAALTEALSFTFVERSKQECFLNLKMASLHYNHSAKFLKELTLSMDELEENFRGMLKSAATKVTTVLATKTAEYSEMVSLFETPRKTREPFILEENEIYGFDLASSHLDTVKLILNINIESPVVSIPRKPGSPELLVGHLGQIFIQNFVAGDDESRSDRLQVEIKDIKLYSLNCTQLAGREAVGSEGSRMFCPPSGSGSANSQEEAHFTRHDFFESLHRGQAFHILNNTTIQFKLEKIPIERESELTFSLSPDDLGTSSIMKIEGKFVNPVQVVLAKHVYEQVLQTLDNLVYSEDLNKYPASATSSPCPDSPLPPLSTCGESSVERKENGLFSHSSLSNTSQKSLSVKEVKSFTQIQATFCISELQVQLSGDLTLGAQGLVSLKFQDFEVEFSKDHPQTLSIQIALHSLLMEDLLEKNPDSKYKNLMVSRGAPKPSSLAQKEYLSQSCPSVSNVEYPDMPRSLPSHMEEAPNVFQLYQRPTSASRKKQKEVQDKDYPLTPPPSPTVDEPKILVGKSKFDDSLVHINIFLVDKKHPEFSSSYNRVNRSIDVDFNCLDVLITLQTWVVILDFFGIGSTADNHAMRLPPEGILHNVKLEPHASMESGLQDPVNTKLDLKVHSLSLVLNKTTSELAKANVSKLVAHLEMIEGDLALQGSIGSLSLSDLTCHGEFYRERFTTSGEEALIFQTFKYGRPDPLLRREHDIRVSLRMASVQYVHTQRFQAEVVAFIQHFTQLQDVLGRQRAAIEGQTVRDQAQRCSRVLLDIEAGAPVLLIPESSRSNNLIVANLGKLKVKNKFLFAGFPGTFSLQDKESVPSASPTGIPKHSLRKTTSTEEPRGTHSQGQFTMPLAGMSLGSLKSEFVPSTSTKQQGPQPTLSVGQESSSPEDHVCLLDCVVVDLQDMDIFAAERHPREYSKAPEDSSGDLIFPSYFVRQTGGSLLTEPCRLKLQVERNLDKEISHTVPDISIHGNLSSVHCSLDLYKYKLIRGLLENNLGEPIEEFMRPYDLQDPRIHTVLSGEVYTCMCFLIDMVNVSLELKDPKRKEGAGSLARFDFKKCKLLYESFSNQTKSINLVSHSMMAFDTRYAGQKTSPGMTNVFSCIFQPAKNSSTTQGSIQIELHFRSTKDSSCFTVVLNNLRVFLIFDWLLLVHDFLHTPSDIKKQNHVTPSRHRNSSSESAIVPKTVKSGVVTKRSSLPVSNERHLEVKVNVTGTEFVVIEDVSCFDTNAIILKGTTVLTYKPRFVDRPFSGSLFGIEVFSCRLGNEHDTALSIVDPVQIQMELVGNSSYQNSSGLMDAFNSEDFPPVLEIQLQALDIRLSYNDVQLFLAIAKSIPEQANAAVPDSVALESDSVGTYLPGASRVGEEIREGTRHTLDPVLELQLARLQELGFSMDDCRKALLACQGQLKKAASWLFKNAEPLKSLSLASTSRDSPGAVAAPLISGVEIKAESVCICFIDDCMDCDVPLAELTFSRLNFLQRVRTSPEGYAHFTLSGDYYNRALSGWEPFIEPWPCSVSWQQQAASRLHPPRLKLEAKAKPRLDINITSVLIDQYVSTKESWMADYCKDDKDIESAKSEDWMGSSVDPPCFGQSLPLVYLRTRSTASLTNLEHQIYAREVKTPKRRQPFVPFALRNHTGCTLWFATLTTTPTRAALSHSGSPGVVPEGNGTFLDDTHNVSEWREVLTGEEIPFEFEARGKLRHRHTHDLRIHQLQVRVNGWEQVSPVSVDKVGTFFRYAAPDKNSSSSTIGSPSSRTNIIHPQVYFSSLPPVRVVFAVTMEGSARKVITVRSALIVRNRLETPMELRLDSPSAPDKPVVLPAIMPGDSFAVPLHLTSWRLQARPKGLGVFFCKAPIHWTNVVKTAEISSSKRECHSMDTEKSRFFRFCVAIKKENYPDYMPSNIFSDSAKQIFRQPGHTIYLLPTVVICNLLPCELDFYVKGMPINGTLKPGKEAALHTADTSQNIELGVSLENFPLCKELLIPPGTQNYMVRMRLYDVNRRQLNLTIRIVCRAEGSLKIFISAPYWLINKTGLPLIFRQDNAKTDAAGQFEEHELARSLSPLLFCYADKEQPNLCTMRIGRGIHPEGMPGWCQGFSLDGGSGVRALKVIQQGNRPGLIYNIGIDVKKGRGRYIDTCMVIFAPRYLLDNKSSHKLAFAQREFARGQGTANPEGYISTLPGSSVVFHWPRNDYDQLLCVRLMDVPNCIWSGGFEVNKNNSFHINMRDTLGKCFFLRVEITLRGATYRISFSDTDQLPPPFRIDNFSKVPVVFTQHGVAEPRLRTEVKPMTSLDYAWDEPTLPPFITLTVKGAGSSEINCNMNDFQDNRQLYYENFIYIAATYTFSGLQEGTGRPVASNKAITCAELVLDVSPKTQRVILKKKEPGKRSQLWRMTGTGMLAHEGSSVPHNPNKPSAARSTEGSAILDIAGLAAVTDNRYEPLMLRKPDRRRSTTQTWSFREGKLTCGLHGLVVQAKGGLSGLFDGAEVVLGPDTSMELLGPVPPEQQFINQKMRPGSGMLSIRVIPDGPTRALQITDFCHRKSSRSYEVDELPVTEQELQKLKNPDTEQELEVLVRLEGGIGLSLINKVPEELVFASLTGINVHYTQLATSHMLELSIQDVQVDNQLIGTTQPFMLYVTPLSNENEVIETGPAVQVNAVKFPSKSALTNIYKHLMITAQRFTVQIEEKLLLKLLSFFGYDQAESEVEKYDENLHEKTAEQGGTPIRYYFENLKISIPQIKLSVFTSNKLPLDLKALKSTLGFPLIRFEDAVINLDPFTRVHPYETKEFIINDILKHFQEELLSQAARILGSVDFLGNPMGLLNDVSEGVTGLIKYGNVGGLIRNVTHGVSNSAAKFAGTLSDGLGKTMDNRHQSEREYIRYHAATSGEHLVAGIHGLAHGIIGGLTSVITSTVEGVKTEGGVSGFISGLGKGLVGTVTKPVAGALDFASETAQAVRDTATLSGPRTQAQRVRKPRCCTGPQGLLPRYSESQAEGQEQLFKLTDNIQDEFFIAVENIDSYCVLISSKAVYFLKSGDYVDREAIFLEVKYDDLYHCLVSKDHGKVYVQVTKKAVSTSSGVSIPGPSHQKPMVHVKSEVLAVKLSQEINYAKSLYYEQQLMLRLSENREQLELDS

SEQ ID NO: 33 - protein, 520 aa, Homo sapiens
MSQLSLSWLGLWPVAASPWLLLLLVGASWLLAHVLAWTYAFYDNCRRLRCFPQPPRRNWFWGHQGMIHSSEEGLLYTQSLACTFGDMGCWWVGPWQAVIHIFLPTCIKPVLFAPAAIAPKDKFFYSFLEPWLGDGLLLSAGDKWSRHRRMLTPAFHFNILKPYMKIFNESVNIMHAKWQLLASEGSACLDMFEHISLMTLDSLQKCVFSFDSHCQEKPSEYIAAILELSALVSKRHHEILLHIDFLYYLTPDGQRFRRACRLVHDFTDAVIQERRRTLPSQGVDDFLQAKAKSKTLDFIDVLLLSKDEDGKKLSDEDIRAEADTFMFEGHDTTASGLSWVLYHLAKHPEYQERCRQEVQELLKDREPKEIEWDDLAHLPFLTMCMKESLRLHPPVPVISRHVTQDIVLPDGRVIPKGIICLISVFGTHHNPAVWPDPEVYDPFRFDPENIKERSPLAFIPFSAGPRNCIGQTFAMAEMKVVLALTLLRFRVLPDHTEPRRKPELVLRAEGGLWLRVEPLS

SEQ ID NO: 34 - protein, 2446 aa, Homo sapiens
MDTGDTALGQKATSRSGETDKASGRWRQEQSAVIKMSTFGSHEGQRQPQIEPEQIGNTASAQLFGSGKLASPSEVVQQVAEKQYPPHRPSPYSCQHSLSFPQHSLPQGVMHSTKPHQSLEGPPWLFPGPLPSVASEDLFPFPIHGHSGGYPRKKISSLNPAYSQYSQKSIEQAEEAHKKEHKPKKPGKYICPYCSRACAKPSVLKKHIRSHTGERPYPCIPCGFSFKTKSNLYKHRKSHAHAIKAGLVPFTESAVSKLDLEAGFIDVEAEIHSDGEQSTDTDEESSLFAEASDKMSPGPPIPLDIASRGGYHGSLEESLGGPMKVPILIIPKSGIPLPNESSQYIGPDMLPNPSLNTKADDSHTVKQKLALRLSEKKGQDSEPSLNLLSPHSKGSTDSGYFSRSESAEQQISPPNTNAKSYEEIIFGKYCRLSPRNALSVTTTSQERAAMGRKGIMEPLPHVNTRLDVKMFEDPVSQLIPSKGDVDPSQTSMLKSTKFNSESRQPQIIPSSIRNEGKLYPANFQGSNPVLLEAPVDSSPLIRSNSVPTSSATNLTIPPSLRGSHSFDERMTGSDDVFYPGTVGIPPQRMLRRQAAFELPSVQEGHVEVEHHGRMLKGISSSSLKEKKLSPGDRVGYDYDVCRKPYKKWEDSETPKQNYRDISCLSSLKHGGEYFMDPVVPLQGVPSMFGTTCENRKRRKEKSVGDEEDTPMICSSIVSTPVGIMASDYDPKLQMQEGVRSGFAMAGHENLSHGHTERFDPCRPQLQPGSPSLVSEESPSAIDSDKMSDLGGRKPPGNVISVIQHTNSLSRPNSFERSESAELVACTQDKAPSPSETCDSEISEAPVSPEWAPPGDGAESGGKPSPSQQVQQQSYHTQPRLVRQHNIQVPEIRVTEEPDKPEKEKEAQSKEPEKPVEEFQWPQRSETLSQLPAEKLPPKKKRLRLADMEHSSGESSFESTGTGLSRSPSQESNLSHSSSFSMSFEREETSKLSALPKQDEFGKHSEFLTVPAGSYSLSVPGHHHQKEMRRCSSEQMPCPHPAEVPEVRSKSFDYGNLSHAPVSGAAASTVSPSRERKKCFLVRQASFSGSPEISQGEVGMDQSVKQEQLEHLHAGLRSGWHHGPPAVLPPLQQEDPGKQVAGPCPPLSSGPLHLAQPQIMHMDSQESLRNPLIQPTSYMTSKHLPEQPHLFPHQETIPFSPIQNALFQFQYPTVCMVHLPAQQPPWWQAHFPHPFAQHPQKSYGKPSFQTEIHSSYPLEHVAEHTGKKPAEYAHTKEQTYPCYSGASGLHPKNLLPKFPSDQSSKSTETPSEQVLQEDFASANAGSLQSLPGTVVPVRIQTHVPSYGSVMYTSISQILGQNSPAIVICKVDENMTQRTLVTNAAMQGIGFNIAQVLGQHAGLEKYPIWKAPQTLPLGLESSIPLCLPSTSDSVATLGGSKRMLSPASSLELFMETKQQKRVKEEKMYGQIVEELSAVELTNSDIKKDLSRPQKPQLVRQGCASEPKDGLQSGSSSFSSLSPSSSQDYPSVSPSSREPFLPSKEMLSGSRAPLPGQKSSGPSESKESSDELDIDETASDMSMSPQSSSLPAGDGQLEEEGKGHKRPVGMLVRMASAPSGNVADSTLLLTDMADFQQILQFPSLRTTTTVSWCFLNYTKPNYVQQATFKSSVYASWCISSCNPNPSGLNTKTTLALLRSKQKITAEIYTLAAMHRPGTGKLTSSSAWKQFTQMKPDASFLFGSKLERKLVGNILKERGKGDIHGDKDIGSKQTEPIRIKIFEGGYKSNEDYVYVRGRGRGKYICEECGIRCKKPSMLKKHIRTHTDVRPYVCKLCNFAFKTKGNLTKHMKSKAHMKKCLELGVSMTSVDDTETEEAENLEDLHKAAEKHSMSSISTDHQFSDAEESDGEDGDDNDDDDEDEDDFDDQGDLTPKTRSRSTSPQPPRFSSLPVNVGAVPHGVPSDSSLGHSSLISYLVTLPSIRVTQLMTPSDSCEDTQMTEYQRLFQSKSTDSEPDKDRLDIPSCMDEECMLPSEPSSSPRDFSPSSHHSSPGYDSSPCRDNSPKRYLIPKGDLSPRRHLSPRRDLSPMRHLSPRKEAALRREMSQRDVSPRRHLSPRRPVSPGKDITARRDLSPRRERRYMTTIRAPSPRRALYHNPPLSMGQYLQAEPIVLGPPNLRRGLPQVPYFSLYGDQEGAYEHPGSSLFPEGPNDYVFSHLPLHSQQQVRAPIPMVPVGGIQMVHSMPPALSSLHPSPTLPLPMEGFEEKKGASGESFSKDPYVLSKQHEKRGPHALQSSGPPSTPSSPRLLMKQSTSEDSLNATEREQEENIQTCTKAIASLRIATEEAALLGPDQPARVQEPHQNPLGSAHVSIRHFSRPEPGQPCTSATHPDLHDGEKDNFGTSQTPLAHSTFYSKSCVDDKQLDFHSSKELSSSTEESKDPSSEKSQLH

SEQ ID NO: 35 - protein, 499 aa, Homo sapiens
MAMAEGERTECAEPPRDEPPADGALKRAEELKTQANDYFKAKDYENAIKFYSQAIELNPSNAIYYGNRSLAYLRTECYGYALGDATRAIELDKKYIKGYYRRAASNMALGKFRAALRDYETVVKVKPHDKDAKMKYQECNKIVKQKAFERAIAGDEHKRSVVDSLDIESMTIEDEYSGPKLEDGKVTISFMKELMQWYKDQKKLHRKCAYQILVQVKEVLSKLSTLVETTLKETEKITVCGDTHGQFYDLLNIFELNGLPSETNPYIFNGDFVDRGSFSVEVILTLFGFKLLYPDHFHLLRGNHETDNMNQIYGFEGEVKAKYTAQMYELFSEVFEWLPLAQCINGKVLIMHGGLFSEDGVTLDDIRKIERNRQPPDSGPMCDLLWSDPQPQNGRSISKRGVSCQFGPDVTKAFLEENNLDYIIRSHEVKAEGYEVAHGGRCVTVFSAPNYCDQMGNKASYIHLQGSDLRPQFHQFTAVPHPNVKPMAYANTLLQLGMM

SEQ ID NO: 36 - protein, 425 aa, Homo sapiens
MAGAEGAAGRQSELEPVVSLVDVLEEDEELENEACAVLGGSDSEKCSYSQGSVKRQALYACSTCTPEGEEPAGICLACSYECHGSHKLFELYTKRNFRCDCGNSKFKNLECKLLPDKAKVNSGNKYNDNFFGLYCICKRPYPDPEDEIPDEMIQCVVCEDWFHGRHLGAIPPESGDFQEMVCQACMKRCSFLWAYAAQLAVTKISTEDDGLVRNIDGIGDQEVIKPENGEHQDSTLKEDVPEQGKDDVREVKVEQNSEPCAGSSSESDLQTVFKNESLNAESKSGCKLQELKAKQLIKKDTATYWPLNWRSKLCTCQDCMKMYGDLDVLFLTDEYDTVLAYENKGKIAQATDRSDPLMDTLSSMNRVQQVELICEYNDLKTELKDYLKRFADEGTVVKREDIQQFFEEFQSKKRRRVDGMQYYCS

SEQ ID NO: 37 - protein, 263 aa, Homo sapiens
MKGGFTGGDEYQKHFLPRDYLATYYSFDGSPSPEAEMLKFNLECLHKTFGPGGLQGDTLIDIGSGPTIYQVLAACDSFQDITLSDFTDRNREELEKWLKKEPGAYDWTPAVKFACELEGNSGRWEEKEEKLRAAVKRVLKCDVHLGNPLAPAVLPLADCVLTLLAMECACCSLDAYRAALCNLASLLKPGGHLVTTVTLRLPSYMVGKREFSCVALEKEEVEQAVLDAGFDIEQLLHSPQSYSVTNAANNGVCFIVARKKPGP

SEQ ID NO: 38 - protein, 357 aa, Homo sapiens
MATTVPDGCRNGLKSKYYRLCDKAEAWGIVLETVATAGVVTSVAFMLTLPILVCKVQDSNRRKMLPTQFLFLLGVLGIFGLTFAFIIGLDGSTGPTRFFLFGILFSICFSCLLAHAVSLTKLVRGRKPLSLLVILGLAVGFSLVQDVIAIEYIVLTMNRTNVNVFSELSAPRRNEDFVLLLTYVLFLMALTFLMSSFTFCGSFTGWKRHGAHIYLTMLLSIAIWVAWITLLMLPDFDRRWDDTILSSALAANGWVFLLAYVSPEFWLLTKQRNPMDYPVEDAFCKPQLVKKSYGVENRAYSQEEITQGFEETGDTLYAPYSTHFQLQNQPPQKEFSIPRAHAWPSPYKDYEVKKEGS

SEQ ID NO: 39 - protein, 701 aa, Homo sapiens
MDIEDEENMSSSSTDVKENRNLDNVSPKDGSTPGPGEGSQLSNGGGGGPGRKRPLEEGSNGHSKYRLKKRRKTPGPVLPKNALMQLNEIKPGLQYTLLSQTGPVHAPLFVMSVEVNGQVFEGSGPTKKKAKLHAAEKALRSFVQFPNASEAHLAMGRTLSVNTDFTSDQADFPDTLFNGFETPDKAEPPFYVGSNGDDSFSSSGDLSLSASPVPASLAQPPLPVLPPFPPPSGKNPVMILNELRPGLKYDFLSESGESHAKSFVMSVVVDGQFFEGSGRNKKLAKARAAQSALAAIFNLHLDQTPSRQPIPSEGLQLHLPQVLADAVSRLVLGKFGDLTDNFSSPHARRKVLAGVVMTTGTDVKDAKVISVSTGTKCINGEYMSDRGLALNDCHAEIISRRSLLRFLYTQLELYLNNKDDQKRSIFQKSERGGFRLKENVQFHLYISTSPCGDARIFSPHEPILEEPADRHPNRKARGQLRTKIESGEGTIPVRSNASIQTWDGVLQGERLLTMSCSDKIARWNVVGIQGSLLSIFVEPIYFSSIILGSLYHGDHLSRAMYQRISNIEDLPPLYTLNKPLLSGISNAEARQPGKAPNFSVNWTVGDSAIEVINATTGKDELGRASRLCKHALYCRWMRVHGKVPSHLLRSKITKPNVYHESKLAAKEYQAAKARLFTAFIKAGLGAWVEKPTEQDQFSLTP

SEQ ID NO: 40 - protein, 865 aa, Homo sapiens [sequence omitted]

SEQ ID NO: 41 - protein, 440 aa, Homo sapiens
MRPHLSPPLQQLLLPVLLACAAHSTGALPRLCDVLQVLWEEQDQCLQELSREQTGDLGTEQPVPGCEGMWDNISCWPSSVPGRMVEVECPRFLRMLTSRNGSLFRNCTQDGWSETFPRPNLACGVNVNDSSNEKRHSYLLKLKVMYTVGYSSSLVMLLVALGILCAFRRLHCTRNYIHMHLFVSFILRALSNFIKDAVLFSSDDVTYCDAHRAGCKLVMVLFQYCIMANYSWLLVEGLYLHTLLAISFFSERKYLQGFVAFGWGSPAIFVALWAIARHFLEDVGCWDINANASIWWIIRGPVILSILINFILFINILRILMRKLRTQETRGNEVSHYKRLARSTLLLIPLFGIHYIVFAFSPEDAMEIQLFFELALGSFQGLVVAVLYCFLNGEVQLEVQKKWQQWHLREFPLHPVASFSNSTKASHLEQSQGTCRTSII

SEQ ID NO: 42 - protein, 1024 aa, Homo sapiens
MAQGAMRFCSEGDCAISPPRCPRRWLPEGPVPQSPPASMYGSTGSLLRRVAGPGPRGRELGRVTAPCTPLRGPPSPRVAPSPWAPSSPTGQPPPGAQSSVVIFRFVEKASVRPLNGLPAPGGLSRSWDLGGVSPPRPTPALGPGSNRKLRLEASTSDPLPARGGSALPGSRNLVHGPPAPPQVGADGLYSSLPNGLGGPPERLATLFGGPADTGFLNQGDTWSSPREVSSHAQRIARAKWEFFYGSLDPPSSGAKPPEQAPPSPPGVGSRQGSGVAVGRAAKYSETDLDTVPLRCYRETDIDEVLAEREEADSAIESQPSSEGPPGTAYPPAPRPGPLPGPHPSLGSGNEDEDDDEAGGEEDVDDEVFEASEGARPGSRMPLKSPVPFLPGTSPSADGPDSFSCVFEAILESHRAKGTSYTSLASLEALASPGPTQSPFFTFELPPQPPAPRPDPPAPAPLAPLEPDSGTSSAADGPWTQRGEEEEAEARAKLAPGREPPSPCHSEDSLGLGAAPLGSEPPLSQLVSDSDSELDSTERLALGSTDTLSNGQKADLEAAQRLAKRLYRLDGFRKADVARHLGKNNDFSKLVAGEYLKFFVFTGMTLDQALRVFLKELALMGETQERERVLAHFSQRYFQCNPEALSSEDGAHTLTCALMLLNTDLHGHNIGKRMTCGDFIGNLEGLNDGGDFPRELLKALYSSIKNEKLQWAIDEEELRRSLSELADPNPKVIKRISGGSGSGSSPFLDLTPEPGAAVYKHGALVRKVHADPDCRKTPRGKRGWKSFHGILKGMILYLQKEEYKPGKALSETELKNAISIHHALATRASDYSKRPHVFYLRTADWRVFLFQAPSLEQMQSWITRINVVAAMFSAPPFPAAVSSQKKFSRPLLPSAATRLSQEEQVRTHEAKLKAMASELREHRAAQLGKKGRGKEAEEQRQKEAYLEFEKSRYSTYAALLRVKLKAGSEELDAVEAALAQAGSTEDGLPPSHSSPSLQPKPSSQPRAQRHSSEPRPGAGSGRRKP

SEQ ID NO: 43 - protein, 487 aa, Homo sapiens
MGDTGLRKRREDEKSIQSQEPKTTSLQKELGLISGISIIVGTIIGSGIFVSPKSVLSNTEAVGPCLIIWAACGVLATLGALCFAELGTMITKSGGEYPYLMEAYGPIPAYLFSWASLIVIKPTSFAIICLSFSEYVCAPFYVGCKPPQIVVKCLAAAAILFISTVNSLSVRLGSYVQNIFTAAKLVIVAIIIISGLVLLAQGNTKNFDNSFEGAQLSVGAISLAFYNGLWAYDGWNQLNYITEELRNPYRNLPLAIIIGIPLVTACYILMNVSYFTVMTATELLQSQAVAVTFGDRVLYPASWIVPLFVAFSTIGAANGTCFTAGRLIYVAGREGHMLKVLSYISVRRLTPAPAIIFYGIIATIYIIPGDINSLVNYFSFAAWLFYGLTILGLIVMRFTRKELERPIKVPVVIPVLMTLISVFLVLAPIISKPTWEYLYCVLFILSGLLFYFLFVHYKFGWAQKISKPITMHLQMLMEVVPPEEDPE

SEQ ID NO: 44 - protein, 456 aa, Homo sapiens
MRKSPGLSDCLWAWILLLSTLTGRSYGQPSLQDELKDNTTVFTRILDRLLDGYDNRLRPGLGERVTEVKTDIFVTSFGPVSDHDMEYTIDVFFRQSWKDERLKFKGPMTVLRLNNLMASKIWTPDTFFHNGKKSVAHNMTMPNKLLRITEDGTLLYTMRLTVRAECPMHLEDFPMDAHACPLKFGSYAYTRAEVVYEWTREPARSVVVAEDGSRLNQYDLLGQTVDSGIVQSSTGEYVVMTTHFHLKRKIGYFVIQTYLPCIMTVILSQVSFWLNRESVPARTVFGVTTVLTMTTLSISARNSLPKVAYATAMDWFIAVCYAFVFSALIEFATVNYFTKRGYAWDGKSVVPEKPKKVKDPLIKKNNTYAPTATSYTPNLARGDPGLATIAKSATIEPKEVKPETKPPEPKKTFNSVSKIDRLSRIAFPLLFGIFNLVYWATYLNREPQLKAPTPHQ

SEQ ID NO: 45 - protein, 798 aa, Homo sapiens
MGKASPASGLSRPKTLVSPLRSNQWSLQKGLPEQYYSLTWFLSPILGLIFTPLIGSASDRCTLSWGRRRPFILALCVGVLFGVALFLNGSAIGLALGDVPNRQPIGIVLTVLGVVVLDFSADATEGPIRAYLLDVVDSEEQDMALNIHAFSAGLGGAIGYVLGGLDWTQTFLGSWFRTQNQVLFFFAAIIFTVSVALHLFSIDEEQYSPQQERSAEEPGALDGGEPHGVPAFPDEVQSEHELALDYPDVDIMRSKSDSALHVPDTALDLEPELLFLHDIEPSIFHDASYPATPRSTSQELAKTKLPRLATFLKEAAKEDETLLDNHLNEAKVPNGSGSPTKDALGGYTRVDTKPSATSSSMRRRRHAFRRQASSTFSYYGKLGSHCYRYRRANAVVLIKPSRSMSDLYDMQKRQRQHRHRNQSGATTSSGDTESEEGEGETTVRLLWLSMLKMPRELMRLCLCHLLTWFSVIAEAVFYTDFMGQVIFEGDPKAPSNSTAWQAYNAGVKMGCWGLVIYAATGAICSALLQKYLDNYDLSVRVIYVLGTLGFSVGTAVMAMFPNVYVAMVTISTMGIVSMSISYCPYALLGQYHDIKQYIHHSPGNSKRGFGIDCAILSCQVYISQILVASALGGVVDAVGTVRVIPMVASVGSFLGFLTATFLVIYPNVSEEAKEEQKGLSSPLAGEGRAGGNSEKPTVLKLTRKEGLQGPVETERLQVLTSVRSRHIGWCRSCWRVFFFMIILEKKFSFPQCGSLRRMTYLLFLSELDTLCPGQPCPWAATAHQSWEEAGPGGLGRRQ

SEQ ID NO: 46 - protein, 1594 aa, Homo sapiens
MKLYVFLVNTGTTLTFDTELTVQTVADLKHAIQSKYKIAIQHQVLVVNGGECMAADRRVCTYSAGTDTNPIFLFNKEMILCDRPPAIPKTTFSTENDMEIKVEESLMMPAVFHTVASRTQLALEMYEVAKKLCSFCEGLVHDEHLQHQGWAAIMANLEDCSNSYQKLLFKFESIYSNYLQSIEDIKLKLTHLGTAVSVMAKIPLLECLTRHSYRECLGRLDSLPEHEDSEKAEMKRSTELVLSPDMPRTTNESLLTSFPKSVEHVSPDTADAESGKEIRESCQSTVHQQDETTIDTKDGDLPFFNVSLLDWINVQDRPNDVESLVRKCFDSMSRLDPRIIRPFIAECRQTIAKLDNQNMKAIKGLEDRLYALDQMIASCGRLVNEQKELAQGFLANQKRAENLKDASVLPDLCLSHANQLMIMLQNHRKLLDIKQKCTTAKQELANNLHVRLKWCCFVMLHADQDGEKLQALLRLVIELLERVKIVEALSTVPQMYCLAVVEVVRRKMFIKHYREWAGALVKDGKRLYEAEKSKRESFGKLFRKSFLRNRLFRGLDSWPPSFCTQKPRKFDCELPDISLKDLQFLQSFCPSEVQPFLRVPLLCDFEPLHQHVLALHNLVKAAQSLDEMSQTITDLLSEQKASVSQTSPQSASSPRMESTAGITTTTSPRTPPPLTVQDPLCPAVCPLEELSPDSIDAHTFDFETIPHPNIEQTIHQVSLDLDSLAESPESDFMSAVNEFVIEENLSSPNPISDPQSPEMMVESLYSSVINAIDSRRMQDTNVCGKEDFGDHTSLNVQLERCRVVAQDSHFSIQTIKEDLCHFRTFVQKEQCDFSNSLKCTAVEIRNIIEKVKCSLEITLKEKHQKELLSLKNEYEGKLDGLIKETEENENKIKKLKGELVCLEEVLQNKDNEFALVKHEKEAVICLQNEKDQKLLEMENIMHSQNCEIKELKQSREIVLEDLKKLHVENDEKLQLLRAELQSLEQSHLKELEDTLQVRHIQEFEKVMTDHRVSLEELKKENQQIINQIQESHAEIIQEKEKQLQELKLKVSDLSDTRCKLEVELALKEAETDEIKILLEESRAQQKETLKSLLEQETENLRTEISKLNQKIQDNNENYQVGLAELRTLMTIEKDQCISELISRHEEESNILKAELNKVTSLHNQAFEIEKNLKEQIIELQSKLDSELSALERQKDEKITQQEEKYEAIIQNLEKDRQKLVSSQEQDREQLIQKLNCEKDEAIQTALKEFKLEREVVEKELLEKVKHLENQIAKSPAIDSTRGDSSSLVAELQEKLQEEKAKFLEQLEEQEKRKNEEMQNVRTSLIAEQQTNFNTVLTREKMRKENIINDLSDKLKSTMQQQERDKDLIESLSEDRARLLEEKKKLEEEVSKLRSSSFVPSPYVATAPELYGACAPELPGESDRSAVETADEGRVDSAMETSMMSVQENIHMLSEEKQRIMLLERTLQLKEEENKRLNQRLMSQSMSSVSSRHSEKIAIRDFQVGDLVLIILDERHDNYVLFTVSPTLYFLHSESLPALDLKPGEGASGASRRPWVLGKVMEKEYCQAKKAQNRFKVPLGTKFYRVKAVSWNKKV

SEQ ID NO: 47 - protein, 1901 aa, Homo sapiens
MATFRNNHMKTKASVRKSFSEDVFQSVKSLLQSQKELCSVTAEDCLQQDEHANLTEVTFLGFNEETDAAHIQDLAAVSLELPDILNSLHFCSLNENEIICMKNINKPLDISSDPLNQSHPSGMLCVMRVSPTSPRLRIDFIFSLLSKYATGIRYTLDTFLHQKHQLETTDEDDDDTNQSVSSIEDDFVTAFEHLEEEETSKPYNDGMNITVLRSQCDAASQTVTGHHLETHDLKILISSGQQKSLAKPSTSSVNVLGHKELPSVKTSVTTSISEPWTQRSFYRSSNASDKDSDLQKTFFSSSPAYSSESECSSPSPVIFLDEEGYQKSLKAKLELPKIPVMKDDIEDSDSEVSEFFDSFDQFDELEQTLETCLFNKDPVIGKSSQRKGHKHGKSCMNPQKFKFDRPALPANVRKPTPRKPESPYGNLCDAPDSPRPVKASREDSGLFSPIRSSAFSPLGGCTPAECFCQTDIGGDRIHENHDSVYYTYEDYAKSISCEVLGSVLRTHHTNTLSNINSIKHGENKTVTFKHGNLDQKNKSKNKSLMIKDSIQKFAADLVEKSFGSAFKDLQKGVSSCTNALYHLAIKLTSSVLQMAFDELRRQRAFSLKERAISGLANFLVSEALSNALKDLQYVKKQIFTNTVARFAADLAEELVFEGIMEVCQFSYPQTPASPQCGSFDFEDKVVKLYAKDLSESVIQEAFIELSQVDVTFTTKAAVSVSTDNIKYVSAESVVPSTQAVTFSPSFHNQAIMVTKPVQEYKKEYTVQQALFCTSGIVTSIPVPLAGSALLPYHISSTACQAKAHLSSDDSNSNGDSAQVHIATKNREEKAACLRNICLPSEHNPGNQNDFKPTNDDIEMQSSSKLPNDPAIISNFSAAVVHTIVNETLESMTSLEVTKMVDERTDYLTKSLKEKTPPFSHCDQAVLQCSEASSNKDMFADRLSKSIIKHSIDKSKSVIPNIDKNAVYKESLPVSGEESQLTPEKSPKFPDSQNQLTHCSLSAAKDCVPECKVSMVHGSSLETLPSCPAVTGQKSDLKESAKDQPLKKHNLNSTSLEALSFGQENPFPHSHTFSSTALTCVDGLHVEDKQKVRDRNVIPDTPPSTPLVPSRASSEWDIKKLTKKLKGELAKEFAPATPPSTPHNSSVGSLSENEQNTIEKEEFMLKLMRSLSEEVESSESGELPEVDVKSEHSGKKVQFAEALATHILSLATEMAASHLDNKIIQEPKVKNPCLNVQSQRSVSPTFLNPSDENLKTLCNFAGDLAAEVITEAEKIAKVRNCMLFKQKKNSCYADGDEDYKVEEKLDIEAVVHPREVDPFILSLPPSSCMSGLMYKYPSCESVTDEYAGHLIQILKQEGGNSELIMDQYANRLAYRSVKSGLQEAAKTTKVQCNSRMFPVPSSQVKTNKELLMFSNKEHHQEADKKRQSKRNEGYFCKNQTCERTLDPYRNEVSQLYSFSTSLVHSITKDAKEELTASLVGLPKSLTDSCLFEKSGYEEDNECHVTPELPKSLQPSSQNHRFYHSTGSLNGYGCGDNVVQAVEQYAKKVVDDTLELTLGSTVFRVSETTKSADRVTYAEKLSPLTGQACRYCDLKELHNCTGNSSQHFFRQGSLASSKPASNPKFSSRYQKSRIFHLSVPQIHVNLDKKAVLAEKIVAEAIEKAERELSSTSLAADSGIGQEGASFAESLATETMTAAVTNVGHAVSSSKEIEDFQSTESVSSQQMNLSIGDDSTGSWSNLSFEDEHQDESSSFHHLSESNGNSSSWSSLGLEGDLYEDNLSFPTSDSDGPDDKDEEHEDEVEGLGQDGKTLLITNIDMEPCTVDPQLRIILQWLIASEAEVAELYFHDSANKEFMLLSKQLQEKGWKVGDLLQAVLQYYEVMEKASSEERCKSLFDWLLENA

SEQ ID NO: 48 - protein, 832 aa, Homo sapiens
MILQAHLHSLCLLMLYLATGYGQEGKFSGPLKPMTFSIYEGQEPSQIIFQFKANPPAVTFELTGETDNIFVIEREGLLYYNRALDRETRSTHNLQVAALDANGIIVEGPVPITIKVKDINDNRPTFLQSKYEGSVRQNSRPGKPFLYVNATDLDDPATPNGQLYYQIVIQLPMINNVMYFQINNKTGAISLTREGSQELNPAKNPSYNLVISVKDMGGQSENSFSDTTSVDIIVTENIWKAPKPVEMVENSTDPHPIKITQVRWNDPGAQYSLVDKEKLPRFPFSIDQEGDIYVTQPLDREEKDAYVFYAVAKDEYGKPLSYPLEIHVKVKDINDNPPTCPSPVTVFEVQENERLGNSIGTLTAHDRDEENTANSFLNYRIVEQTPKLPMDGLFLIQTYAGMLQLAKQSLKKQDTPQYNLTIEVSDKDFKTLCFVQINVIDINDQIPIFEKSDYGNLTLAEDTNIGSTILTIQATDADEPFTGSSKILYHIIKGDSEGRLGVDTDPHTNTGYVIIKKPLDFETAAVSNIVFKAENPEPLVFGVKYNASSFAKFTLIVTDVNEAPQFSQHVFQAKVSEDVAIGTKVGNVTAKDPEGLDISYSLRGDTRGWLKIDHVTGEIFSVAPLDREAGSPYRVQVVATEVGGSSLSSVSEFHLILMDVNDNPPRLAKDYTGLFFCHPLSAPGSLIFEATDDDQHLFRGPHFTFSLGSGSLQNDWEVSKINGTHARLSTRHTEFEEREYVVLIRINDGGRPPLEGIVSLPVTFCSCVEGSCFRPAGHQTGIPTVGMAVGILLTTLLVIGIILAVVFIRIKKDKGKDNVESAQASEVKPLRS

SEQ ID NO: 49 - protein, 915 aa, Homo sapiens
MRKSSSPSLSNCNSVLANKIFGIPLDELQQGGHPDNEVPFIVRHVVDYIEEHGGLEQQGLFQVNGNAETVEWLRQRYDSGEEVDLVKEADVPSAISLLRFFLQELPEPVIPGSLHIHLMQLSQDYNNEDEFGRKLRFLLQQLPPVNYSLLKFLCRFLANVASHHEEIWSANSLAAVFGPDVFHIYTDVEDMKEQEIVSRIMAGLLENYYEFFENEEEDFSSNDLSSITEQVNELSEEEEEDEKLEHIEELPEEGAEKSNDMPEVVQLRMTENILESNSVTATSTHISPISILPASTDILERTIRAAVEQHLFDLQSSIDHDLKNLQQQSVVCNNEAESIHCDGEGSNNQIDIADDIINASESNRDCSKPVASTNLDNEAMQQDCVFENEENTQSVGILLEPCSDRGDSEDGCLEREEYLLFDSDKLSHLILDSSSKICDLNANTESEVPGGQSVGVQGEAACVSIPHLDLKNVSDGDKWEEPFPAFKSWQEDSESGEAQLSPQAGRMNHHPLEEDCPPVLSHRSLDFGQSQRFLHDPEKLDSSSKALSFTRIRRSSFSSKDEKREDRTPYQLVKKLQKKIRQFEEQFERERNSKPSYSDIAANPKVLKWMTELTKLRKQIKDAKHKNSDGEFVPQTRPRSNTLPKSFGSSLDHEDEENEDEPKVIQKEKKPSKEATLELILKRLKEKRIERCLPEDIKKMTKDHLVEEKASLQKSLLYYESQHGRPVTKEERHIVKPLYDRYRLVKQMLTRASITPVLGSPSTKRRGQMLQPIIEGETAHFFEEIKEEEEDGVNLSSELGDMLKTAVQVQSSLENSESDVEENQEKLALDLRLSSSRAASMPELLEQLWKARAEKKKLRKTLREFEEAFYQQNGRNAQKEDRVPVLEEYREYKKIKAKLRLLEVLISKQDSSKSI

SEQ ID NO: 50 - protein, 504 aa, Homo sapiens
MRFFCARCCSFGPEMPAVQLLLLACLVWDVGARTAQLRKANDQSGRCQYTFSVASPNESSCPEQSQAMSVIHNLQRDSSTQRLDLEATKARLSSLESLLHQLTLDQAARPQETQEGLQRELGTLRRERDQLETQTRELETAYSNLLRDKSVLEEEKKRLRQENENLARRLESSSQEVARLRRGQCPQTRDTARAVPPGSREVSTWNLDTLAFQELKSELTEVPASRILKESPSGYLRSGEGDTGCGELVWVGEPLTLRTAETITGKYGVWMRDPKPTYPYTQETTWRIDTVGTDVRQVFEYDLISQFMQGYPSKVHILPRPLESTGAVVYSGSLYFQGAESRTVIRYELNTETVKAEKEIPGAGYHGQFPYSWGGYTDIDLAVDEAGLWVIYSTDEAKGAIVLSKLNPENLELEQTWETNIRKQSVANAFIICGTLYTVSSYTSADATVNFAYDTGTGISKTLTIPFKNRYKYSSMIDYNPLEKKLFAWDNLNMVTYDIKLSKM

SEQ ID NO: 51 - protein, 917 aa, Homo sapiens
MAFIRKKQQEQQLQLYSKERFSLLLLNLEEYYFEQHRANHILHKGSHHERKIRGSLKICSKSVIFEPDSISQPIIKIPLRDCIKIGKHGENGANRHFTKAKSGGISLIFSQVYFIKEHNVVAPYKIERGKMEYVFELDVPGKVEDVVETLLQLHRASCLDKLGDQTAMITAILQSRLARTSFDKNRFQNISEKLHMECKAEMVTPLVTNPGHVCITDTNLYFQPLNGYPKPVVQITLQDVRRIYKRRHGLMPLGLEVFCTEDDLCSDIYLKFYEPQDRDDLYFYIATYLEHHVAEHTAESYMLQWQRGHLSNYQYLLHLNNLADRSCNDLSQYPVFPWIIHDYSSSELDLSNPGTFRDLSKPVGALNKERLERLLTRYQEMPEPKFMYGSHYSSPGYVLFYLVRIAPEYMLCLQNGRFDNADRMFNSIAETWKNCLDGATDFKELIPEFYGDDVSFLVNSLKLDLGKRQGGQMVDDVELPPWASSPEDFLQKSKDALESNYVSEHLHEWIDLIFGYKQKGSDAVGAHNVFHPLTYEGGVDLNSIQDPDEKVAMLTQILEFGQTPKQLFVTPHPRRITPKFKSLSQTSSYNASMADSPGEESFEDLTEESKTLAWNNITKLQLHEHYKIHKEAVTGITVSRNGSSVFTTSQDSTLKMFSKESKMLQRSISFSNMALSSCLLLPGDATVITSSWDNNVYFYSIAFGRRQDTLMGHDDAVSKICWHDNRLYSASWDSTVKVWSGVPAEMPGTKRHHFDLLAELEHDVSVDTISLNAASTLLVSGTKEGTVNIWDLTTATLMHQIPCHSGIVCDTAFSPDSRHVLSTGTDGCLNVIDVQTGMLISSMTSDEPQRCFVWDGNSVLSGSQSGELLVWDLLGAKISERIQGHTGAVTCIWMNEQCSSIITGGEDRQIIFWKLQY

SEQ ID NO: 52 - protein, 354 aa, Homo sapiens
MLFNLRILLNNAAFRNGHNFMVRNFRCGQPLQNKVQLKGRDLLTLKNFTGEEIKYMLWLSADLKFRIKQKGEYLPLLQGKSLGMIFEKRSTRTRLSTETGFALLGGHPCFLTTQDIHLGVNESLTDTARVLSSMADAVLARVYKQSDLDTLAKEASIPIINGLSDLYHPIQILADYLTLQEHYSSLKGLTLSWIGDGNNILHSIMMSAAKFGMHLQAATPKGYEPDASVTKLAEQYAKENGTKLLLTNDPLEAAHGGNVLITDTWISMGQEEEKKKRLQAFQGYQVTMKTAKVAASDWTFLHCLPRKPEEVDDEVFYSPRSLVFPEAENRKWTIMAVMVSLLTDYSPQLQKPKF

SEQ ID NO: 53 - protein, 1141 aa, Homo sapiens
MAAAVGVRGRYELPPCSGPGWLLSLSALLSVAARGAFATTHWVVTEDGKIQQQVDSPMNLKHPHDLVILMRQEATVNYLKELEKQLVAQKIHIEENEDRDTGLEQRHNKEDPDCIKAKVPLGDLDLYDGTYITLESKDISPEDYIDTESPVPPDPEQPDCTKILELPYSIHAFQHLRGVQERVNLSAPLLPKEDPIFTYLSKRLGRSIDDIGHLIHEGLQKNTSSWVLYNMASFYWRIKNEPYQVVECAMRALHFSSRHNKDIALVNLANVLHRAHFSADAAVVVHAALDDSDFFTSYYTLGNIYAMLGEYNHSVLCYDHALQARPGFEQAIKRKHAVLCQQKLEQKLEAQHRSLQRTLNELKEYQKQHDHYLRQQEILEKHKLIQEEQILRNIIHETQMAKEAQLGNHQICRLVNQQHSLHCQWDQPVRYHRGDIFENVDYVQFGEDSSTSSMMSVNFDVQSNQSDINDSVKSSPVAHSILWIWGRDSDAYRDKQHILWPKRADCTESYPRVPVGGELPTYFLPPENKGLRIHELSSDDYSTEEEAQTPDCSITDFRKSHTLSYLVKELEVRMDLKAKMPDDHARKILLSRINNYTIPEEEIGSFLFHAINKPNAPIWLILNEAGLYWRAVGNSTFAIACLQRALNLAPLQYQDVPLVNLANLLIHYGLHLDATKLLLQALAINSSEPLTFLSLGNAYLALKNISGALEAFRQALKLTTKCPECENSLKLIRCMQFYPFLYNITSSVCSGTVVEESNGSDEMENSDETKMSEEILALVDEFQQAWPLEGFGGALEMKGRRLDLQGIRVLKKGPQDGVARSSCYGDCRSEDDEATEWITFQVKRVKKPKGDHKKTPGKKVETGQIENGHRYQANLEITGPKVASPGPQGKKRDYQRLGWPSPDECLKLRWVELTAIVSTWLAVSSKNIDITEHIDFATPIQQPAMEPLCNGNLPTSMHTLDHLHGVSNRASLHYTGESQLTEVLQNLGKDQYPQQSLEQIGTRIAKVLEKNQTSWVLSSMAALYWRVKGQGKKAIDCLRQALHYAPHQMKDVPLISLANILHNAKLWNDAVIVATMAVEIAPHFAVNHFTLGNVYVAMEEFEKALVWYESTLKLQPEFVPAKNRIQTIQCHLMLKKGRRSP

SEQ ID NO: 54 - protein, 3051 aa, Homo sapiens
MATNPQPQPPPPAPPPPPPQPQPQPPPPPPGPGAGPGAGGAGGAGAGAGDPQLVAMIVNHLKSQGLFDQFRRDCLADVDTKPAYQNLRQRVDNFVANHLATHTWSPHLNKNQLRNNIRQQVLKSGMLESGIDRIISQVVDPKINHTFRPQVEKAVHEFLATLNHKEEGSGNTAPDDEKPDTSLITQGVPTPGPSANVANDAMSILETITSLNQEASAARASTETSNAKTSERASKKLPSQPTTDTSTDKERTSEDMADKEKSTADSGGEGLETAPKSEEFSDLPCPVEEIKNYTKEHNNLILLNKDVQQESSEQKNKSTDKGEKKPDSNEKGERKKEKKEKTEKKFDHSKKSEDTQKVKDEKQAKEKEVESLKLPSEKNSNKAKTVEGTKEDFSLIDSDVDGLTDITVSSVHTSDLSSFEEDTEEEVVTSDSMEEGEITSDDEEKNKQNKTKTQTSDSSEGKTKSVRHAYVHKPYLYSKYYSDSDDELTVEQRRQSIAKEKEERLLRRQINREKLEEKRKQKAEKTKSSKTKGQGRSSVDLEESSTKSLEPKAARIKEVLKERKVLEKKVALSKKRKKDSRNVEENSKKKQQYEEDSKETLKTSEHCEKEKISSSKELKHVHAKSEPSKPARRLSESLHVVDENKNESKLEREHKRRTSTPVIMEGVQEETDTRDVKRQVERSEICTEEPQKQKSTLKNEKHLKKDDSETPHLKSLLKKEVKSSKEKPEREKTPSEDKLSVKHKYKGDCMHKTGDETELHSSEKGLKVEENIQKQSQQTKLSSDDKTERKSKHRNERKLSVLGKDGKPVSEYIIKTDENVRKENNKKERRLSAEKTKAEHKSRRSSDSKIQKDSLGSKQHGITLQRRSESYSEDKCDMDSTNMDSNLKPEEVVHKEKRRTKSLLEEKLVLKSKSKTQGKQVKVVETELQEGATKQATTPKPDKEKNTEENDSEKQRKSKVEDKPFEETGVEPVLETASSSAHSTQKDSSHRAKLPLAKEKYKSDKDSTSTRLERKLSDGHKSRSLKHSSKDIKKKDENKSDDKDGKEVDSSHEKARGNSSLMEKKLSRRLCENRRGSLSQEMAKGEEKLAANTLSTPSGSSLQRPKKSGDMTLIPEQEPMEIDSEPGVENVFEVSKTQDNRNNNSQQDIDSENMKQKTSATVQKDELRTCTADSKATAPAYKPGRGTGVNSNSEKHADHRSTLTKKMHIQSAVSKMNPGEKEPIHRGTTEVNIDSETVHRMLLSAPSENDRVQKNLKNTAAEEHVAQGDATLEHSTNLDSSPSLSSVTVVPLRESYDPDVIPLFDKRTVLEGSTASTSPADHSALPNQSLTVRESEVLKTSDSKEGGEGFTVDTPAKASITSKRHIPEAHQATLLDGKQGKVIMPLGSKLTGVIVENENITKEGGLVDMAKKENDLNAEPNLKQTIKATVENGKKDGIAVDHVVGLNTEKYAETVKLKHKRSPGKVKDISIDVERRNENSEVDTSAGSGSAPSVLHQRNGQTEDVATGPRRAEKTSVATSTEGKDKDVTLSPVKAGPATTTSSETRQSEVALPCTSIEADEGLIIGTHSRNNPLHVGAEASECTVFAAAEEGGAVVTEGFAESETFLTSTKEGESGECAVAESEDRAADLLAVHAVKIEANVNSVVTEEKDDAVTSAGSEEKCDGSLSRDSEIVEGTITFISEVESDGAVTSAGTEIRAGSISSEEVDGSQGNMMRMGPKKETEGTVTCTGAEGRSDNFVICSVTGAGPREERMVTGAGVVLGDNDAPPGTSASQEGDGSVNDGTEGESAVTSTGITEDGEGPASCTGSEDSSEGFAISSESEENGESAMDSTVAKEGTNVPLVAAGPCDDEGIVTSTGAKEEDEEGEDVVTSTGRGNEIGHASTCTGLGEESEGVLICESAEGDSQIGTVVEHVEAEAGAAIMNANENNVDSMSGTEKGSKDTDICSSAKGIVESSVTSAVSGKDEVTPVPGGCEGPMTSAASDQSDSQLEKVEDTTISTGLVGGSYDVLVSGEVPECEVAHTSPSEKEDEDIITSVENEECDGLMATTASGDITNQNSLAGGKNQGKVLIISTSTTNDYTPQVSAITDVEGGLSDALRTEENMEGTRVTTEEFEAPMPSAVSGDDSQLTASRSEEKDECAMISTSIGEEFELPISSATTIKCAESLQPVAAAVEERATGPVLISTADFEGPMPSAPPEAESPLASTSKEEKDECALISTSIAEECEASVSGVVVESENERAGTVMEEKDGSGIISTSSVEDCEGPVSSAVPQEEGDPSVTPAEEMGDTAMISTSTSEGCEAVMIGAVLQDEDRLTITRVEDLSDAAIISTSTAECMPISASIDRHEENQLTADNPEGNGDLSATEVSKHKVPMPSLIAENNCRCPGPVRGGKEPGPVLAVSTEEGHNGPSVHKPSAGQGHPSAVCAEKEEKHGKECPEIGPFAGRGQKESTLHLINAEEKNVLLNSLQKEDKSPETGTAGGSSTASYSAGRGLEGNANSPAHLRGPEQTSGQTAKDPSVSIRYLAAVNTGAIKADDMPPVQGTVAEHSFLPAEQQGSEDNLKTSTTKCITGQESKIAPSHTMIPPATYSVALLAPKCEQDLTIKNDYSGKWTDQASAEKTGDDNSTRKSFPEEGDIMVTVSSEENVCDIGNEESPLNVLGGLKLKANLKMEAYVPSEEEKNGEILAPPESLCGGKPSGIAELQREPLLVNESLNVENSGFRTNEEIHSESYNKGEISSGRKDNAEAISGHSVEADPKEVEEEERHMPKRKRKQHYLSSEDEPDDNPDVLDSRIETAQRQCPETEPHDTKEENSRDLEELPKTSSETNSTTSRVMEEKDEYSSSETTGEKPEQNDDDTIKSQEEDQPIIIKRKRGRPRKYPVETTLKMKDDSKTDTGIVTVEQSPSSSKLKVMQTDESNKETANLQERSISNDDGEEKIVTSVRRRGRKPKRSLTVSDDAESSEPERKRQKSVSDPVEDKKEQESDEEEEEEEEDEPSGATTRSTTRSEAQRSKTQLSPSIKRKREVSPPGARTRGQQRVEEAPVKKAKR

SEQ ID NO: 55 - protein, 1621 aa, Homo sapiens
MEWVLAEALLSQSRDPRALLGALCQGEASAERVETLRFLLQRLEDEEARGSGGAGALPEAAREVAAGYLVPLLRSLRGRPAGGPDPSLQPRHRRRVLRAAGAALRSCVRLAGRPQLAAALAEEALRDLLAGWRAPGAEAAVEVLAAVGPCLRPREDGPLLERVAGTAVALALGGGGDGDEAGPAEDAAALVAGRLLPVLVQCGGAALRAVWGGLAAPGASLGSGRVEEKLLVLSALAEKLLPEPGGDRARGAREAGPDARRCWRFWRTVQAGLGQADALTRKRARYLLQRAVEVSAELGADCTCGPQEGNGPSLFWWSERKKDELLKFWENYILIMETLEGNQIHVIKPVLPKLNNLFEYAVSEENGCWLFHPSWHMCIYKRMFESENKILSKEGVIHFLELYETKILPFSPEFSEFIIGPLMDALSESSLYSRSPGQPIGSCSPLGLKLQKFLVTYISLLPEEIKSSFLLKFIRKMTSRHWCAVPILFLSKALANVPRHKALGIDGLLALRDVIHCTMITHQILLRGAAQCYLLQTAMNLLDVEKVSLSDVSTFLMSLRQEESLGRGTSLWTELCDWLRVNESYFKPSPTCSSIGLHKTSLNAYVKSIVQEYVKSSAWETGENCFMPDWFEAKLVSLMVLLAVDVEGMKTQYSGKQRTENVLRIFLDPLLDVLMKFSTNAYMPLLKTDRCLQLLLKLLNTCRLKGSSAQDDEVSTVLQNFFMSTTESISEFILRRLTMNELNSVSDLDRCHLYLMVLTELINLHLKVGWKRGNPIWRVISLLKNASIQHLQEMDSGQEPTVGSQIQRVVSMAALAMVCEAIDQKPELQLDSLHAGPLESFLSSLQLNQTLQKPHAEEQSSYAHPLECSSVLEESSSSQGWGKIVAQYIHDQWVCLSFLLKKYHTLIPTTGSEILEPFLPAVQMPIRTLQSALEALTVLSSDQVLPVFHCLKVLVPKLLTSSESLCIESFDMAWKIISSLSNTQLIFWANLKAFVQFVFDNKVLTIAAKIKGQAYFKIKEIMYKIIEMSAIKTGVFNTLISYCCQSWIVSASNVSQGSLSSAKNYSELILEACIFGTVFRRDQRLVQDVQTFIENLGHDCAANIVMENTKREDHYVRICAVKFLCLLDGSNMSHKLFIEDLAIKLLDKDELVSKSKKRYYVNSLQHRVKNRVWQTLLVLFPRLDQNFLNGIIDRIFQAGFTNNQASIKYFIEWIIILILHKFPQFLPKFWDCFSYGEENLKTSICTFLAVLSHLDIITQNIPEKKLILKQALIVVLQWCFNHNFSVRLYALVALKKLWTVCKVLSVEEFDALTPVIESSLHQVESMHGAGNAKKNWQRIQEHFFFATFHPLKDYCLETIFYILPRLSGLIEDEWITIDKFTRFTDVPLAAGFQWYLSQTQLSKLKPGDWSQQDIGTNLVEADNQAEWTDVQKKIIPWNSRVSDLDLELLFQDRAARLGKSISRLIVVASLIDKPTNLGGLCRTCEVFGASVLVVGSLQCISDKQFQHLSVSAEQWLPLVEVKPPQLIDYLQQKKTEGYTIIGVEQTAKSLDLTQYCFPEKSLLLLGNEREGIPANLIQQLDVCVEIPQQGIIRSLNVHVSGALLIWEYTRQQLLSHGDTKP

SEQ ID NO: 56 - protein, 1219 aa, Homo sapiens
MMSLSVRPQRRLLSARVNRSQSFAGVLGSHERGPRSFPVFSPPGPPRKPPALSRVSRMFSVAHPAAKVPQPERLDLVYTALKRGLTAYLEVHQQEQEKLQGQIRESKRNSRLGFLYDLDKQVKSIERFLRRLEFHASKIDELYEAYCVQRRLRDGAYNMVRAYTTGSPGSREARDSLAEATRGHREYTESMCLLESELEAQLGEFHLRMKGLAGFARLCVGDQYEICMKYGRQRWKLRGRIEGSGKQVWDSEETIFLPLLTEFLSIKVTELKGLANHVVVGSVSCETKDLFAALPQVVAVDINDLGTIKLSLEVTWSPFDKDDQPSAASSVNKASTVTKRFSTYSQSPPDTPSLREQAFYNMLRRQEELENGTAWSLSSESSDDSSSPQLSGTARHSPAPRPLVQQPEPLPIQVAFRRPETPSSGPLDEEGAVAPVLANGHAPYSRTLSHISEASVDAALAEASVEAVGPESLAWGPSPPTHPAPTHGEHPSPVPPALDPGHSATSSTLGTTGSVPTSTDPAPSAHLDSVHKSTDSGPSELPGPTHTTTGSTYSAITTTHSAPSPLTHTTTGSTHKPIISTLTTTGPTLNIIGPVQTTTSPTHTMPSPTHTTASPTHTSTSPTHTPTSPTHKTSMSPPTTTSPTPSGMGLVQTATSPTHPTTSPTHPTTSPILINVSPSTSLELATLSSPSKHSDPTLPGTDSLPCSPPVSNSYTQADPMAPRTPHPSPAHSSRKPLTSPAPDPSESTVQSLSPTPSPPTPAPQHSDLCLAMAVQTPVPTAAGGSGDRSLEEALGALMAALDDYRGQFPELQGLEQEVTRLESLLMQRQGLTRSRASSLSITVEHALESFSFLNEDEDEDNDVPGDRPPSSPEAGAEDSIDSPSARPLSTGCPALDAALVRHLYHCSRLLLKLGTFGPLRCQEAWALERLLREARVLEAVCEFSRRWEIPASSAQEVVQFSASRPGFLTFWDQCTERLSCFLCPVERVLLTFCNQYGARLSLRQPGLAEAVCVKFLEDALGQKLPRRPQPGPGEQLTVFQFWSFVETLDSPTMEAYVTETAEEVLLVRNLNSDDQAVVLKALRLAPEGRLRRDGLRALSSLLVHGNNKVMAAVSTQLRSLSLGPTFRERALLCFLDQLEDEDVQTRVAGCLALGCIKAPEGIEPLVYLCQTDTEAVREAARQSLQQCGEEGQSAHRRLEESLDALPRIFGPGSMASTAF

SEQ ID NO: 57 - protein, 509 aa, Homo sapiens
MTVTYTARVANARFGGFSQLLLLWRGSIYKLLWRELLCFLGFYMALSAAYRFVLTEGQKRYFEKLVIYCDQYASLIPVSFVLGFYVTLVVNRWWSQYLCMPLPDALMCVVAGTVHGRDDRGRLYRRTLMRYAGLSAVLILRSVSTAVFKRFPTIDHVVEAGFMTREERKKFENLNSSYNKYWVPCVWFSNLAAQARREGRIRDNSALKLLLEELNVFRGKCGMLFHYDWISVPLVYTQVVTIALYSYFLACLIGRQFLDPAQGYKDHDLDLCVPIFTLLQFFFYAGWLKVAEQLINPFGEDDDDFETNFLIDRNFQVSMLAVDEMYDDLAVLEKDLYWDAAEARAPYTAATVFQLRQPSFQGSTFDITLAKEDMQFQRLDGLDGPMGEAPGDFLQRLLPAGAGMVAGGPLGRRLSFLLRKNSCVSEASTGASCSCAVVPEGAAPECSCGDPLLDPGLPEPEAPPPAGPEPLTLIPGPVEPFSIVTMPGPRGPAPPWLPSPIGEEEENLA

SEQ ID NO: 58 - protein, 946 aa, Homo sapiens
MSVRLRFLSPGDTGAVGVVGRSASFAGFSSAQSRRIAKSINRNSVRSRMPAKSSKMYGTLRKGSVCADPKPQQVKKIFEALKRGLKEYLCVQQAELDHLSGRHKDTRRNSRLAFYYDLDKQTRCVERHIRKMEFHISKVDELYEDYCIQCRLRDGASSMQRAFARCPPSRAARESLQELGRSLHECAEDMWLIEGALEVHLGEFHIRMKGLVGYARLCPGDHYEVLMRLGRQRWKLKGRIESDDSQTWDEEEKAFIPTLHENLDIKVTELRGLGSLAVGAVTCDIADFFTTRPQVIVVDITELGTIKLQLEVQWNPFDTESFLVSPSPTGKFSMGSRKGSLYNWTPPSTPSFRERYYLSVLQQPTQQALLLGGPRATSILSYLSDSDLRGPSLRSQSQELPEMDSFSSEDPRDTETSTSASTSDVGFLPLTFGPHASIEEEAREDPLPPGLLPEMAHLSGGPFAEQPGWRNLGGESPSLPQGSLFHSGTASSSQNGHEEGATGDREDGPGVALEGPLQEVLELLRPTDSTQPQLRELEYQVLGFRDRLKPCRARQEHTSAESLMECILESFAFLNADFALDELSLFGGSQGLRKDRPLPPPSSLKASSRELTAGAPELDVLLMVHLQVCKALLQKLASPNLSRLVQECLLEEVAQQKHVLETLSVLDFEKVGKATSIEEIIPQASRTKGCLKLWRGCTGPGRVLSCPATTLLNQLKKTFQHRVRGKYPGQLEIACRRLLEQVVSCGGLLPGAGLPEEQIITWFQFHSYLQRQSVSDLEKHFTQLTKEVTLIEELHCAGQAKVVRKLQGKRLGQLQPLPQTLRAWALLQLDGTPRVCRAASARLAGAVRNRSFREKALLFYTNALAENDARLQQAACLALKHLKGIESIDQTASLCQSDLEAVRAAARETTLSFGEKGRLAFEKMDKLCSEQREVFCQEADVEITIF

SEQ ID NO: 59 - protein, 351 aa, Homo sapiens
MEAFALGPARRGRRRTRAAGSLLSRAAILLFISAFLVRVPSSVGHLVRLPRAFRLTKDSVKIVGSTSFPVKAYVMLHQKSPHVLCVTQQLRNAELIDPSFQWYGPKGKVVSVENRTAQITSTGSLVFQNFEESMSGIYTCFLEYKPTVEEIVKRLQLKYAIYAYREPHYYYQFTARYHAAPCNSIYNISFEKKLLQILSKLLLDLSCEISLLKSECHRVKMQRAGLQNELFFAFSVSSLDTEKGPKRCTDHNCEPYKRLFKAKNLIERFFNQQVEILGRRAEQLPQIYYIEGTLQMVWINRCFPGYGMNVQQHPKCPECCVICSPGSYNPRDGIHCLQCNSSLVYGAKTCL

SEQ ID NO: 60 - protein, 367 aa, Homo sapiens
MIRNWLTIFILFPLKLVEKCESSVSLTVPPVVKLENGSSTNVSLTLRPPLNATLVITFEITFRSKNITILELPDEVVVPPGVTNSSFQVTSQNVGQLTVYLHGNHSNQTGPRIRFLVIRSSAISIINQVIGWIYFVAWSISFYPQVIMNWRRKSVIGLSFDFVALNLTGFVAYSVFNIGLLWVPYIKEQFLLKYPNGVNPVNSNDVFFSLHAVVLTLIIIVQCCLYERGGQRVSWPAIGFLVLAWLFAFVTMIVAAVGVTTWLQFLFCFSYIKLAVTLVKYFPQAYMNFYYKSTEGWSIGNVLLDFTGGSFSLLQMFLQSYNNDQWTLIFGDPTKFGLGVFSIVFDVVFFIQHFCLYRKRPGYDQLN

SEQ ID NO: 61 - protein, 533 aa, Homo sapiens
MALRNVPFRSEVLGWDPDSLADYFKKLNYKDCEKAVKKYHIDGARFLNLTENDIQKFPKLRVPILSKLSQEINKNEERRSIFTRKPQVPRFPEETESHEEDNGGWSSFEEDDYESPNDDQDGEDDGDYESPNEEEEAPVEDDADYEPPPSNDEEALQNSILPAKPFPNSNSMYIDRPPSGKTPQQPPVPPQRPMAALPPPPAGRNHSPLPPPQTNHEEPSRSRNHKTAKLPAPSIDRSTKPPLDRSLAPFDREPFTLGKKPPFSDKPSIPAGRSLGEHLPKIQKPPLPPTTERHERSSPLPGKKPPVPKHGWGPDRRENDEDDVHQRPLPQPALLPMSSNTFPSRSTKPSPMNPLPSSHMPGAFSESNSSFPQSASLPPYFSQGPSNRPPIRAEGRNFPLPLPNKPRPPSPAEEENSLNEEWYVSYITRPEAEAALRKINQDGTFLVRDSSKKTTTNPYVLMVLYKDKVYNIQIRYQKESQVYLLGTGLRGKEDFLSVSDIIDYFRKMPLLLIDGKNRGSRYQCTLTHAAGYP

SEQ ID NO: 62 - protein, 454 aa, Homo sapiens
MSAGGPCPAAAGGGPGGASCSVGAPGGVSMFRWLEVLEKEFDKAFVDVDLLLGEIDPDQADITYEGRQKMTSLSSCFAQLCHKAQSVSQINHKLEAQLVDLKSELTETQAEKVVLEKEVHDQLLQLHSIQLQLHAKTGQSADSGTIKAKLERELEANKKEKMKEAQLEAEVKLLRKENEALRRHIAVLQAEVYGARLAAKYLDKELAGRVQQIQLLGRDMKGPAHDKLWNQLEAEIHLHRHKTVIRACRGRNDLKRPMQAPPGHDQDSLKKSQGVGPIRKVLLLKEDHEGLGISITGGKEHGVPILISEIHPGQPADRCGGLHVGDAILAVNGVNLRDTKHKEAVTILSQQRGEIEFEVVYVAPEVDSDDENVEYEDESGHRYRLYLDELEGGGNPGASCKDTSGEIKVLQGFNKKAVTDTHENGDLGTASETPLDDGASKLDDLHTLYHKKSY

SEQ ID NO: 63 - protein, 2236 aa, Homo sapiens
MAHNAGAAAAAGTHSAKSGGSEAALKEGGSAAALSSSSSSSAAAAAASSSSSSGPGSAMETGLLPNHKLKTVGEAPAAPPHQQHHHHHHAHHHHHHAHHLHHHHALQQQLNQFQQQQQQQQQQQQQQQQQQHPISNNNSLGGAGGGAPQPGPDMEQPQHGGAKDSAAGGQADPPGPPLLSKPGDEDDAPPKMGEPAGGRYEHPGLGALGTQQPPVAVPGGGGGPAAVPEFNNYYGSAAPASGGPGGRAGPCFDQHGGQQSPGMGMMHSASAAAAGAPGSMDPLQNSHEGYPNSQCNHYPGYSRPGAGGGGGGGGGGGGGSGGGGGGGGAGAGGAGAGAVAAAAAAAAAAAGGGGGGGYGGSSAGYGVLSSPRQQGGGMMMGPGGGGAASLSKAAAGSAAGGFQRFAGQNQHPSGATPTLNQLLTSPSPMMRSYGGSYPEYSSPSAPPPPPSQPQSQAAAAGAAAGGQQAAAGMGLGKDMGAQYAAASPAWAAAQQRSHPAMSPGTPGPTMGRSQGSPMDPMVMKRPQLYGMGSNPHSQPQQSSPYPGGSYGPPGPQRYPIGIQGRTPGAMAGMQYPQQQMPPQYGQQGVSGYCQQGQQPYYSQQPQPPHLPPQAQYLPSQSQQRYQPQQDMSQEGYGTRSQPPLAPGKPNHEDLNLIQQERPSSLPDLSGSIDDLPTGTEATLSSAVSASGSTSSQGDQSNPAQSPFSPHASPHLSSIPGGPSPSPVGSPVGSNQSRSGPISPASIPGSQMPPQPPGSQSESSSHPALSQSPMPQERGFMAGTQRNPQMAQYGPQQTGPSMSPHPSPGGQMHAGISSFQQSNSSGTYGPQMSQYGPQGNYSRPPAYSGVPSASYSGPGPGMGISANNQMHGQGPSQPCGAVPLGRMPSAGMQNRPFPGNMSSMTPSSPGMSQQGGPGMGPPMPTVNRKAQEAAAAVMQAAANSAQSRQGSFPGMNQSGLMASSSPYSQPMNNSSSLMNTQAPPYSMAPAMVNSSAASVGLADMMSPGESKLPLPLKADGKEEGTPQPESKSKKSSSSTTTGEKITKVYELGNEPERKLWVDRYLTFMEERGSPVSSLPAVGKKPLDLFRLYVCVKEIGGLAQVNKNKKWRELATNLNVGTSSSAASSLKKQYIQYLFAFECKIERGEEPPPEVFSTGDTKKQPKLQPPSPANSGSLQGPQTPQSTGSNSMAEVPGDLKPPTPASTPHGQMTPMQGGRSSTISVHDPFSDVSDSSFPKRNSMTPNAPYQQGMSMPDVMGRMPYEPNKDPFGGMRKVPGSSEPFMTQGQMPNSSMQDMYNQSPSGAMSNLGMGQRQQFPYGASYDRRHEPYGQQYPGQGPPSGQPPYGGHQPGLYPQQPNYKRHMDGMYGPPAKRHEGDMYNMQYSSQQQEMYNQYGGSYSGPDRRPIQGQYPYPYSRERMQGPGQIQTHGIPPQMMGGPLQSSSSEGPQQNMWAARNDMPYPYQNRQGPGGPTQAPPYPGMNRTDDMMVPDQRINHESQWPSHVSQRQPYMSSSASMQPITRPPQPSYQTPPSLPNHISRAPSPASFQRSLENRMSPSKSPFLPSMKMQKVMPTVPTSQVTGPPPQPPPIRREITFPPGSVEASQPVLKQRRKITSKDIVTPEAWRVMMSLKSGLLAESTWALDTINILLYDDSTVATFNLSQLSGFLELLVEYFRKCLIDIFGILMEYEVGDPSQKALDHNAARKDDSQSLADDSGKEEEDAECIDDDEEDEEDEEEDSEKTESDEKSSIALTAPDAAADPKEKPKQASKFDKLPIKIVKKNNLFVVDRSDKLGRVQEFNSGLLHWQLGGGDTTEHIQTHFESKMEIPPRRRPPPPLSSAGRKKEQEGKGDSEEQQEKSIIATIDDVLSARPGALPEDANPGPQTESSKFPFGIQQAKSHRNIKLLEDEPRSRDETPLCTIAHWQDSLAKRCICVSNIVRSLSFVPGNDAEMSKHPGLVLILGKLILLHHEHPERKRAPQTYEKEEDEDKGVACSKDEWWWDCLEVLRDNTLVTLANISGQLDLSAYTESICLPILDGLLHWMVCPSAEAQDPFPTVGPNSVLSPQRLVLETLCKLSIQDNNVDLILATPPFSRQEKFYATLVRYVGDRKNPVCREMSMALLSNLAQGDALAARAIAVQKGSIGNLISFLEDGVTMAQYQQSQHNLMHMQPPPLEPPSVDMMCRAAKALLAMARVDENRSEFLLHEGRLLDISISAVLNSLVASVICDVLFQIGQL

SEQ ID NO: 64 - protein, 799 aa, Homo sapiens
MARTAPVEPPLRHSAPPSPAAGEPRTSVEAAVAPRRVLFADEALGLPLAQLRRYRPWGGPGAGKMAAAAGQDGGGGGGADEDDDGEDGDEGEEEEEACPEPSPLCPVPAGGGFYLVPTFSLPPAPGRLERLGRVMVELEALLPPPGAVPGGAGVWVPGGRPPVLRGLVRVLNRSFEKAVHVRASHDGWASFCDHPARYVPRSPPWAGAGGTGAGDPILDPGLGLGPGQASASSPDDGGRTDRFAFQLPFAEGAGDGARLDFVVRYETPEGTFWANNHGRNYTVLLRIAPAPTPTDAEGLPQQQQLPQLEPQPECQGPVEAEARQLKSCMKPVRRRPAEEELKTKNMDDNTFAMAEHPDVQESVGPLVAPTPLRPWPQMTLQVSDVPMTGNPAEEGDVPRSSPPVAFTEVLQAPAIRIPPSSPLCGLGGSPRDQASGPDASEGATGPFLEPSQQQAEATWGVSSENGGGLEAVSGSEELLGEDTIDQELEQLYLSHLSRLRAAVAAGGAGGGGEGSTDGGMSPSHPLGILTDRDLILKWPGPERALNSALAEEITLHYARLGRGVELIKDTEDPDDEGEGEEGLSVTPSSPEGDSPKESPPEILSGARSVVATMGDVWLPWAEGSGCDGPVVLGTEGQFIGDPEKGMGKDTSSLHMNRVIAGVTESLGEAGTEAQIEVTSEWAGSLDPISGKEPASPVLLQGQNPTLLSPLGAEVCLSSVARPHVSSQDEKDAGPSLEPPKKSPTLAVPAECVCALPPQLRGPLTQTLGVLAGLVVVPVALNSGVSLLVLALCLSLAWFS

SEQ ID NO: 65 - protein, 1516 aa, Homo sapiens
MDNQQDKAIVASANGENTLINGVKENDSEDQDVAMKSFAALEAAAPIQPTPVAQKETLMYPRGLLPLPSKKPCMQSPPSPLGLIEAPEHAANSASVNAISLTSGIAKGLNTWSLPNECEKAPFAIMEPAGMSALNGDCLMQPSRTCLGCFMESKDAVDPEPGISLKVGDLNRDYETCAVSDIGIQCINAGENMKYGEQLLSDQLLGFPLHKSRAGDRRETEKPDIDLEDPAQKSYYEALLLDKCNTEEALLANSNQDWGYFETFISESKIELLDLCSKNELSVNLFSEEDVDNYMFDDDESTLGSDVCSLKIRYESFQDNVRDKTTLLMQEDAQFNFFPSVFTTCPKRESKSGALKQSSDFSQFKVPDVSIIWGEEDKNLDKKKGKEEGQEDKGVEKKDGKDNGEKPALNKPCSGTEVEQLKNPKQGHLANSLETSGSFSDDSSFIEISYDAMGEIKDCSRYMARDTNSGSSSSQQNYGLRAKRKVRYSEDYLYDVDSLEGEKVNERKEWLPVGSKEEDDDEWCPKKRRKVTRKEPPVIIKYIIINRFKGEKNMLVKLGKVDASETTVNLSENQLNKYAKLAPLKGFWQKKKKQRNTNTDSIKTPFSQKQSFEPGSFEVSFLPPARKRKSKLGNRHRIQRIPSIEISASSKQISLCNDQRHASNHKEDGGLKGTLKSAPLGAPSCANGSHLNDITGPDSVKVKAQDTEFKGPERKVLNKIKFKSEARLKSKKVKAAGQESKPIVQMSPLLENQSSKANLKNEVIPGTSNSSRLSEFHEAKAAKSSTFLPTTCSSEMPLSSANVTTNIPVIPGGYLQTLLDASDLSNNTSISYFSHHSPEQNEGSLTQTEKSFVPLQPTQDCVLTSSSDSELQQSSHNFKMESSNYRNVWPNKATSGTQEFMAEVSREIAPTQSSEFGASQVVSMENNLTPTTYNPICLNSGGSNCNKVLYDSMQDTQLPSDDSYQLCHFNNGEICFPFQQGPVNMDDGRLFSFDSMAPLSVSSSNYCSLSLKSCEKDGDDDITDDFLAHCSPKLVIQQSIDEIAPLKESTDLLDISNFTPDKFRHSSLSEMSPPDTPSLSPQITRCESMKTLGTLKGFQEGVPGPLDSVEKIKWDCSTLSRQVQMEDGFTLNNHQFQFHMFNDEDSVSLLQKNPCLSTFNDPSGQISTNNKVSKSRKKSSPSKSGAMNQSSSQKNTRKKSLKGNNKGIEKPPGKNSRQVPKSTKKGKYMAAINGEKMQIGIGRGGSQTNTISSTGKTLAECIQHGGPMASMKMPSQKGLSGDWALGKESSPGWSDMSMGTNTNSLLDDDQREFQEPSYILSNIASGMADVQRFMMASIEPLWEPMEHHGDPNIFYSPESNSLKLKTLKILAGTPQESKKKINSGSQGATKNHRSIKGVSKSNGKTAIGDPGRANMPGYNEDSRSTFFDKKYSNMSTLGNNGPTHKKLYRHKSSSKALRDEKCKGKHMEREQVHKDESGTASFEKLRDSDYNLLKAETTFWVLPVFEEETRIFQKDI

SEQ ID NO: 66 - protein, 1597 aa, Homo sapiens
MEAEEAQRGASPPISAIEEFSIIPEAPMRSSQVSALGLEAQEDEDPSYKWREEHRLSATQQSELRDVCDYAIETMPSFPKEGSADVEPNQESLVAEACDTPEHWEAVPQSLAGRQARTLAPPELWACPIQSEHLDMAPFSSDLGSEEEEVEFWPGLTSLTLGSGQAEEEEETSSDNSGQTRYYSPCEEHPAETNQNEGSESGTIRQGEELPPEELQESQGLLHPQEVQVLEEQGQQEAGFRGEGTLREDVCADGLLGEEQMIEQVNDEKGEQKQKQEQVQDVMLGRQGERMGLTGEPEGLNDGEWEQEDMERKAQGQGGPEQGEERKRELQVPEENRADSQDEKSQTFLGKSEEVTGKQEDHGIKEKGVPVSGQEAKEPESWDGGRLGAVGRARSREEENEHHGPSMPALIAPEDSPHCDLFPGASYLMTQIPGTQTESRAEELSPAALSPSLEPIRCSHQPISLLGSFLTEESPDKEIDQNSQQEESRLRKGTVSSQGTEVVFASASVTPPRTPDSAPPSPAEAYPITPASVSARPPVAFPRRETSCAARAPETASAPLSMDDPSPCGTSEMCPAALYGFPSTGTSPPRPPANSTGTVQHLRSDSFPGSHRTEQTPDLVGMLLSYSHSELPQRPPKPAIYSSVTPRRDRRSGRDYSTVSASPTALSTLKQDSQESISNLERPSSPPSIQPWVSPHNPAFATESPAYGSSPSFVSMEDVRIHEPLPPPPPQRRDTHPSVVETDGHARVVVPTLKQHSHPPPLALGSGLHAPHKGPLPQASDPAVARQHRPLPSTPDSSHHAQATPRWRYNKPLPPTPDLPQPHLPPISAPGSSRIYRPLPPLPIIDPPTEPPPLPPKSRGRSRSTRGGHMNSGGHAKTRPACQDWTVPLPASAGRTSWPPATARSTESFTSTSRSKSEVSPGMAFSNMTNFLCPSSPTTPWTPELQGPTSKDEAGVSEHPEAPAREPLRRTTPQQGASGPGRSPVGQARQPEKPSHLHLEKASSWPHRRDSGRPPGDSSGQAVAPSEGANKHKGWSRQGLRRPSILPEGSSDSRGPAVEKHPGPSDTVVFREKKPKEVMGGFSRRCSKLINSSQLLYQEYSDVVLNKEIQSQQRLESLSETPGPSSPRQPRKALVSSESYLQRLSMASSGSLWQEIPVVRNSTVLLSMTHEDQKLQEVKFELIVSEASYLRSLNIAVDHFQLSTSLRATLSNQEHQWLFSRLQDVRDVSATFLSDLEENFENNIFSFQVCDVVLNHAPDFRRVYLPYVTNQTYQERTFQSLMNSNSNFREVLEKLESDPVCQRLSLKSFLILPFQRITRLKLLLQNILKRTQPGSSEEAEATKAHHALEQLIRDCNNNVQSMRRTEELIYLSQKIEFECKIFPLISQSRWLVKSGELTALEFSASPGLRRKLNTRPVHLHLFNDCLLLSRPREGSRFLVFDHAPFSSIRGEKCEMKLHGPHKNLFRLFLRQNTQGAQAEFLFRTETQSEKLRWISALAMPREELDLLECYNSPQVQCLRAYKPRENDELALEKADVVMVTQQSSDGWLEGVRLSDGERGWFPVQQVEFISNPEVRAQNLKEAHRVKTAKLQLVEQQA

SEQ ID NO: 67 - protein, 325 aa, Homo sapiens
MAHFVQGTSRMIAAESSTEHKECAEPSTRKNLMNSLEQKIRCLEKQRKELLEVNQQWDQQFRSMKELYERKVAELKTKLDAAERFLSTREKDPHQRQRKDDRQREDDRQRDLTRDRLQREEKEKERLNEELHELKEENKLLKGKNTLANKEKEHYECEIKRLNKALQDALNIKCSFSEDCLRKSRVEFCHEEMRTEMEVLKQQVQIYEEDFKKERSDRERLNQEKEELQQINETSQSQLNRLNSQIKACQMEKEKLEKQLKQMYCPPCNCGLVFHLQDPWVPTGPGAVQKQREHPPDYQWYALDQLPPDVQHKANGLSSVKKVHP

SEQ ID NO: 68 - protein, 1013 aa, Homo sapiens
MGLGTLSPRMLVWLVASGIVFYGELWVCAGLDYDYTFDGNEEDKTETIDYKDPCKAAVFWGDIALDDEDLNIFQIDRTIDLTQNPFGNLGHTTGGLGDHAMSKKRGALYQLIDRIRRIGFGLEQNNTVKGKVPLQFSGQNEKNRVPRAATSRTERIWPGGVIPYVIGGNFTGSQRAMFKQAMRHWEKHTCVTFIERSDEESYIVFTYRPCGCCSYVGRRGNGPQAISIGKNCDKFGIVVHELGHVIGFWHEHTRPDRDNHVTIIRENIQPGQEYNFLKMEPGEVNSLGERYDFDSIMHYARNTFSRGMFLDTILPSRDDNGIRPAIGQRTRLSKGDIAQARKLYRCPACGETLQESNGNLSSPGFPNGYPSYTHCIWRVSVTPGEKIVLNFTTMDLYKSSLCWYDYIEVRDGYWRKSPLLGRFCGDKLPEVLTSTDSRMWIEFRSSSNWVGKGFAAVYEAICGGEIRKNEGQIQSPNYPDDYRPMKECVWKITVSESYHVGLTFQSFEIERHDNCAYDYLEVRDGTSENSPLIGRFCGYDKPEDIRSTSNTLWMKFVSDGTVNKAGFAANFFKEEDECAKPDRGGCEQRCLNTLGSYQCACEPGYELGPDRRSCEAACGGLLTKLNGTITTPGWPKEYPPNKNCVWQVVAPTQYRISVKFEFFELEGNEVCKYDYVEIWSGLSSESKLHGKFCGAEVPEVITSQFNNMRIEFKSDNTVSKKGFKAHFFSDKDECSKDNGGCQHECVNTMGSYMCQCRNGFVLHDNKHDCKEAECEQKIHSPSGLITSPNWPDKYPSRKECTWEISATPGHRIKLAFSEFEIEQHQECAYDHLEVFDGETEKSPILGRLCGNKIPDPLVATGNKMFVRFVSDASVQRKGFQATHSTECGGRLKAESKPRDLYSHAQFGDNNYPGQVDCEWLLVSERGSRLELSFQTFEVEEEADCGYDYVELFDGLDSTAVGLGRFCGSGPPEEIYSIGDSVLIHFHTDDTINKKGFHIRYKSIRYPDTTHTKK

SEQ ID NO: 69 - protein, 430 aa, Homo sapiens
MKPSLLCRPLSCFLMLLPWPLATLTSTTLWQCPPGEEPDLDPGQGTLCRPCPPGTFSAAWGSSPCQPHARCSLWRRLEAQVGMATRDTLCGDCWPGWFGPWGVPRVPCQPCSWAPLGTHGCDEWGRRARRGVEVAAGASSGGETRQPGNGTRAGGPEETAAQYAVIAIVPVFCLMGLLGILVCNLLKRKGYHCTAHKEVGPGPGGGGSGINPAYRTEDANEDTIGVLVRLITEKKENAAALEELLKEYHSKQLVQTSHRPVSKLPPAPPNVPHICPHRHHLHTVQGLASLSGPCCSRCSQKKWPEVLLSPEAVAATTPVPSLLPNPTRVPKAGAKAGRQGEITILSVGRFRVARIPEQRTSSMVSEVKTITEAGPSWGDLPDSPQPGLPPEQQALLGSGGSRTKWLKPPAENKAEENRYVVRLSESNLVI

SEQ ID NO: 70 - protein, 881 aa, Homo sapiens
MAAPGAPAEYGYIRTVLGQQILGQLDSSSLALPSEAKLKLAGSSGRGGQTVKSLRIQEQVQQTLARKGRSSVGNGNLHRTSSVPEYVYNLHLVENDFVGGRSPVPKTYDMLKAGTTATYEGRWGRGTAQYSSQKSVEERSLRHPLRRLEISPDSSPERAHYTHSDYQYSQRSQAGHTLHHQESRRAALLVPPRYARSEIVGVSRAGTTSRQRHFDTYHRQYQHGSVSDTVFDSIPANPALLTYPRPGTSRSMGNLLEKENYLTAGLTVGQVRPLVPLQPVTQNRASRSSWHQSSFHSTRTLREAGPSVAVDSSGRRAHLTVGQAAAGGSGNLLTERSTFTDSQLGNADMEMTLERAVSMLEADHMLPSRISAAATFIQHECFQKSEARKRVNQLRGILKLLQLLKVQNEDVQRAVCGALRNLVFEDNDNKLEVAELNGVPRLLQVLKQTRDLETKKQITDHTVNLRSRNGWPGAVAHACNPSTLGGQGGRITRSGVRDQPDQHGLLWNLSSNDKLKNLMITEALLTLTENIIIPFSGWPEGDYPKANGLLDFDIFYNVTGCLRNMSSAGADGRKAMRRCDGLIDSLVHYVRGTIADYQPDDKATENCVCILHNLSYQLEAELPEKYSQNIYIQNRNIQTDNNKSIGCFGSRSRKVKEQYQDVPMPEEKSNPKGVEWLWHSIVIRMYLSLIAKSVRNYTQEASLGALQNLTAGSGPMPTSVAQTVVQKESGLQHTRKMLHVGDPSVKKTAISLLRNLSRNLSLQNEIAKETLPDLVSIIPDTVPSTDLLIETTASACYTLNNIIQNSYQNARDLLNTGGIQKIMAISAGDAYASNKASKAASVLLYSLWAHTELHHAYKKAQFKKTDFVNSRTAKAYHSLKD

SEQ ID NO: 71 - protein, 626 aa, Homo sapiens
MVAPWRVSVRVCLSHLRCFELRQGLSLLRPSECPRDARLCWLLLGTLPKVVSLCGDVGEGAPDVLSRRRVRCSGAAGAGPAESLPRAGPLGGVFLHLRLWLRAGALLVKFFPLLLLYPLTYLAPSVSTLWLHLLLKATETSGPTYIKLGQWASTRRDLFSEAFCAQFSKLHVRVTPHPWTHTERFLRQAFGDDWGSILSFENREPVGSGCVAQVYKAYANTAFLETDSVQRLGRASCLPPFSHTGAVGGLRELFGYLGNGRKPPENLADQSFLERLLLPKADLVGSNAGVSRAQVPGHQPEATNLISVAVKVLHPGLLAQVHMDLLLMKIGSRVLGVLPGIKWLSLPEIVEEFEKLMVQQIDLRYEAQNLEHFQVNFRNVKAVKFPTPLRPFVTREVLVETYEESVPVSSYQQAGIPVDLKRKIARLGINMLLKMIFVDNFVHADLHPGNILVQGANGLSSSQEAQLQQADICDTLVVAVPSSLCPLRLVLLDAGIVAELQAPDLRNFRAVFMAVVMGQGQRVAELILHHARASECRDVEGFKTEMAMLVTQARKNTITLEKLHVSSLLSSVFKLLMTHKVKLESNFASIVFAIMVLEGLGRSLDPKLDILEAARPFLLTGPVCPP

SEQ ID NO: 72 - protein, 977 aa, Homo sapiens
MTAREHSPRHGARARAMQRASTIDVAADMLGLSLAGNIQDPDEPILEFSLACSELHTPSLDRKPNSFVAVSVTTPPQAFWTKHAQTEIIEGTNNPIFLSSIAFFQDSLINQMTQVKLSVYDVKDRSQGTMYLLGSGTFIVKDLLQDRHHRLHLTLRSAESDRVGNITVIGWQMEEKSDQRPPVTRSVDTVNGRMVLPVDESLTEALGIRSKYASLRKDTLLKSVFGGAICRMYRFPTTDGNHLRILEQMAESVLSLHVPRQFVKLLLEEDAARVCELEELGELSPCWESLRRQIVTQYQTIILTYQENLTDLHQYRGPSFKASSLKADKKLEFVPTNLHIQRMRVQDDGGSDQNYDIVTIGAPAAHCQGFKSGGLRKKLHKFEETKKHFEECCTSSGCQSIIYIPQDVVRAKEIIAQINTLKTQVSYYAERLSRAAKDRSATGLERTLAILADKTRQLVTVCDCKLLANSIHGLNAARPDYIASKASPTSTEEEQVMLRNDQDTLMARWTGRNSRSSLQVDWHEEEWEKVWLNVDKSLECIIQRVDKLLQKERLHGEGCEDVFPCAGSCTSKKGNPDSHAYWIRPEDPFCDVPSSPCPSTMPSTACHPHLTTHCSPPPEESSPGEWSEALYPLLTTLTDCVAMMSDKAKKAMVFLLMQDSAPTIATYLSLQYRRDVVFCQTLTALICGFIIKLRNCLHDDGFLRQLYTIGLLAQFESLLSTYGEELAMLEDMSLGIMDLRNVTFKVTQATSSASADMLPVITGNRDGFNVRVPLPGPLFDALPREIQSGMLLRVQPVLFNVGINEQQTLAERFGDTSLQEVINVESLVRLNSYFEQFKEVLPEDCLPRSRSQTCLPELLRFLGQNVHARKNKNVDILWQAAEICRRLNGVRFTSCKSAKDRTAMSVTLEQCLILQHEHGMAPQVFTQALECMRSEGCRRENTMKNVGSRKYAFNSLQLKAFPKHYRPPEGTYGKVET

SEQ ID NO: 73 - protein, 496 aa, Homo sapiens
MGTQKVTPALIFAITVATIGSFQFGYNTGVINAPEKIIKEFINKTLTDKGNAPPSEVLLTSLWSLSVAIFSVGGMIGSFSVGLFVNRFGRRNSMLIVNLLAVTGGCFMGLCKVAKSVEMLILGRLVIGLFCGLCTGFVPMYIGEISPTALRGAFGTLNQLGIVVGILVAQIFGLEFILGSEELWPLLLGFTILPAILQSAALPFCPESPRFLLINRKEEENAKQILQRLWGTQDVSQDIQEMKDESARMSQEKQVTVLELFRVSSYRQPIIISIVLQLSQQLSGINAVFYYSTGIFKDAGVQEPIYATIGAGVVNTIFTVVSLFLVERAGRRTLHMIGLGGMAFCSTLMTVSLLLKDNYNGMSFVCIGAILVFVAFFEIGPGPIPWFIVAELFSQGPRPAAMAVAGCSNWTSNFLVGLLFPSAAHYLGAYVFIIFTGFLITFLAFTFFKVPETRGRTFEDITRAFEGQAHGADRSGKDGVMEMNSIEPAKETTTNV

SEQ ID NO: 74 - protein, 863 aa, Homo sapiens
MARRSSFQSCQIISLFTFAVGVNICLGFTAHRIKRAEGWEEGPPTVLSDSPWTNISGSCKGRCFELQEAGPPDCRCDNLCKSYTSCCHDFDELCLKTARGWECTKDRCGEVRNEENACHCSEDCLARGDCCTNYQVVCKGESHWVDDDCEEIKAAECPAGFVRPPLIIFSVDGFRASYMKKGSKVMPNIEKLRSCGTHSPYMRPVYPTKTFPNLYTLATGLYPESHGIVGNSMYDPVFDATFHLRGREKFNHRWWGGQPLWITATKQGVKAGTFFWSVVIPHERRILTILQWLTLPDHERPSVYAFYSEQPDFSGHKYGPFGPEMTNPLREIDKIVGQLMDGLKQLKLHRCVNVIFVGDHGMEDVTCDRTEFLSNYLTNVDDITLVPGTLGRIRSKFSNNAKYDPKAIIANLTCKKPDQHFKPYLKQHLPKRLHYANNRRIEDIHLLVERRWHVARKPLDVYKKPSGKCFFQGDHGFDNKVNSMQTVFVGYGSTFKYKTKVPPFENIELYNVMCDLLGLKPAPNNGTHGSLNHLLRTNTFRPTMPEEVTRPNYPGIMYLQSDFDLGCTCDDKVEPKNKLDELNKRLHTKGSTEERHLLYGRPAVLYRTRYDILYHTDFESGYSEIFLMPLWTSYTVSKQAEVSSVPDHLTSCVRPDVRVSPSFSQNCLAYKNDKQMSYGFLFPPYLSSSPEAKYDAFLVTNMVPMYPAFKRVWNYFQRVLVKKYASERNGVNVISGPIFDYDYDGLHDTEDKIKQYVEGSSIPVPTHYYSIITSCLDFTQPADKCDGPLSVSSFILPHRPDNEESCNSSEDESKWVEELMKMHTARVRDIEHLTSLDFFRKTSRSYPEILTLKTYLHTYESEI

SEQ ID NO: 75 - protein, 867 aa, Homo sapiens
MEVPAAGRVPAEGAPTAAVAEVRCPGPAPLRLLEWRVAAGAAVRIGSVLAVFEAAASAQSSGASQSRVASGGCVRPARPERRLRSERAGVVRELCAQPGQVVAPGAVLVRLEGCSHPVVMKGLCAECGQDLTQLQSKNGKQQVPLSTATVSMVHSVPELMVSSEQAEQLGREDQQRLHRNRKLVLMVDLDQTLIHTTEQHCQQMSNKGIFHFQLGRGEPMLHTRLRPHCKDFLEKIAKLYELHVFTFGSRLYAHTIAGFLDPEKKLFSHRILSRDECIDPFSKTGNLRNLFPCGDSMVCIIDDREDVWKFAPNLITVKKYVYFQGTGDMNAPPGSRESQTRKKVNHSRGTEVSEPSPPVRDPEGVTQAPGVEPSNGLEKPARELNGSEAATPRDSPRPGKPDERDIWPPAQAPTSSQELAGAPEPQGSCAQGGRVAPGQRPAQGATGTDLDFDLSSDSESSSESEGTKSSSSASDGESEGKRGRQKPKAAPEGAGALAQGSSLEPGRPAAPSLPGEAEPGAHAPDKEPELGGQEEGERDGLCGLGNGCADRKEAETESQNSELSGVTAGESLDQSMEEEEEEDTDEDDHLIYLEEILVRVHTDYYAKYDRYLNKEIEEAPDIRKIVPELKSKVLADVAIIFSGLHPTNFPIEKTREHYHATALGAKILTRLVLSPDAPDRATHLIAARAGTEKVLQAQECGHLHVVNPDWLWSCLERWDKVEEQLFPLRDDHTKAQRENSPAAFPDREGVPPTALFHPMPVLPKAQPGPEVRIYDSNTGKLIRTGARGPPAPSSSLPIRQEPSSFRWTTSLEKAATTATARRGGLRSRRRSPSPGSQGPAGSGRSGHLRPARGARQGAGGPEATRGS

SEQ ID NO: 76 - protein, 422 aa, Homo sapiens
MGMTRMLLECSLSDKLCVIQEKQYEVIIVPTLLVTIFLILLGVILWLFIREQRTQQQRSGPQGIAPVPPPRDLSWEAGHGGNVALPLKETSVENFLGATTPALAKLQVPREQLSEVLEQICSGSCGPIFRANMNTGDPSKPKSVILKALKEPAGLHEVQDFLGRIQFHQYLGKHKNLVQLEGCCTEKLPLYMVLEDVAQGDLLSFLWTCRRDVMTMDGLLYDLTEKQVYHIGKQVLLALEFLQEKHLFHGDVAARNILMQSDLTAKLCGLGLAYEVYTRGAISSTQTIPLKWLAPERLLLRPASIRADVWSFGILLYEMVTLGAPPYPEVPPTSILEHLQRRKIMKRPSSCTHTMYSIMKSCWRWREADRPSPRELRLRLEAAIKTADDEAVLQVPELVVPELYAAVAGIRVESLFYNYSML

SEQ ID NO: 77 - protein, 991 aa, Homo sapiens
MHSPGADGTQVSPGAHYCSPTGAGCPRPCADTPGPQPQPMDLRVGQRPPVEPPPEPTLLALQRPQRLHHHLFLAGLQQQRSVEPMRLSMDTPMPELQVGPQEQELRQLLHKDKSKRSAVASSVVKQKLAEVILKKQQAALERTVHPNSPGIPYRTLEPLETEGATRSMLSSFLPPVPSLPSDPPEHFPLRKTVSEPNLKLRYKPKKSLERRKNPLLRKESAPPSLRRRPAETLGDSSPSSSSTPASGCSSPNDSEHGPNPILGSEALLGQRLRLQETSVAPFALPTVSLLPAITLGLPAPARADSDRRTHPTLGPRGPILGSPHTPLFLPHGLEPEAGGTLPSRLQPILLLDPSGSHAPLLTVPGLGPLPFHFAQSLMTTERLSGSGLHWPLSRTRSEPLPPSATAPPPPGPMQPRLEQLKTHVQVIKRSAKPSEKPRLRQIPSAEDLETDGGGPGQVVDDGLEHRELGHGQPEARGPAPLQQHPQVLLWEQQRLAGRLPRGSTGDTVLLPLAQGGHRPLSRAQSSPAAPASLSAPEPASQARVLSSSETPARTLPFTTGLIYDSVMLKHQCSCGDNSRHPEHAGRIQSIWSRLQERGLRSQCECLRGRKASLEELQSVHSERHVLLYGTNPLSRLKLDNGKLAGLLAQRMFVMLPCGGVGVDTDTIWNELHSSNAARWAAGSVTDLAFKVASRELKNGFAVVRPPGHHADHSTAMGFCFFNSVAIACRQLQQQSKASKILIVDWDVHHGNGTQQTFYQDPSVLYISLHRHDDGNFFPGSGAVDEVGAGSGEGFNVNVAWAGGLDPPMGDPEYLAAFRIVVMPIAREFSPDLVLVSAGFDAAEGHPAPLGGYHVSAKCFGYMTQQLMNLAGGAVVLALEGGHDLTAICDASEACVAALLGNRVDPLSEEGWKQKPNLNAIRSLEAVIRVHSKYWGCMQRLASCPDSWVPRVPGADKEEVEAVTALASLSVGILAEDRPSEQLVEEEEPMNL

SEQ ID NO: 78 - protein, 323 aa, Homo sapiens
MAAAALPAWLSLQSRARTLRAFSTAVYSATPVPTPSLPERTPGNERPPRRKALPPRTEKMAVDQDWPSVYPVAAPFKPSAVPLPVRMGYPVKKGVPMAKEGNLELLKIPNFLHLTPVAIKKHCEALKDFCTEWPAALDSDEKCEKHFPIEIDSTDYVSSGPSVRNPRARVVVLRVKLSSLNLDDHAKKKLIKLVGERYCKTTDVLTIKTDRCPLRRQNYDYAVYLLTVLYHESWNTEEWEKSKTEADMEEYIWENSSSERNILETLLQMKAAEKNMEINKEELLGTKEIEEYKKSVVSLKNEEENENSISQYKESVKRLLNVT

SEQ ID NO: 79 - protein, 847 aa, Homo sapiens
MHLLGPWLLLLVLEYLAFSDSSKWVFEHPETLYAWEGACVWIPCTYRALDGDLESFILFHNPEYNKNTSKFDGTRLYESTKDGKVPSEQKRVQFLGDKNKNCTLSIHPVHLNDSGQLGLRMESKTEKWMERIHLNVSERPFPPHIQLPPEIQESQEVTLTCLLNFSCYGYPIQLQWLLEGVPMRQAAVTSTSLTIKSVFTRSELKFSPQWSHHGKIVTCQLQDADGKFLSNDTVQLNVKHTPKLEIKVTPSDAIVREGDSVTMTCEVSSSNPEYTTVSWLKDGTSLKKQNTFTLNLREVTKDQSGKYCCQVSNDVGPGRSEEVFLQVQYAPEPSTVQILHSPAVEGSQVEFLCMSLANPLPTNYTWYHNGKEMQGRTEEKVHIPKILPWHAGTYSCVAENILGTGQRGPGAELDVQYPPKKVTTVIQNPMPIREGDTVTLSCNYNSSNPSVTRYEWKPHGAWEEPSLGVLKIQNVGWDNTTIACAACNSWCSWASPVALNVQYAPRDVRVRKIKPLSEIHSGNSVSLQCDFSSSHPKEVQFFWEKNGRLLGKESQLNFDSISPEDAGSYSCWVNNSIGQTASKAWTLEVLYAPRRLRVSMSPGDQVMEGKSATLTCESDANPPVSHYTWFDWNNQSLPYHSQKLRLEPVKVQHSGAYWCQGTNSVGKGRSPLSTLTVYYSPETIGRRVAVGLGSCLAILILAICGLKLQRRWKRTQSQQGLQENSSGQSFFVRNKKVRRAPLSEGPHSLGCYNPMMEDGISYTTLRFPEMNIPRTGDAESSEMQRPPPDCDDTVTYSALHKRQVGDYENVIPDFPEDEGIHYSELIQFGVGERPQAQENVDYVILKH

SEQ ID NO: 80 - protein, 676 aa, Homo sapiens [sequence omitted]

SEQ ID NO: 81 - protein, 1165 aa, Homo sapiens
MQDVQGPRPGSPGDAEDRRELGLHRGEVNFGGSGKKRGKFVRVPSGVAPSVLFDLLLAEWHLPAPNLVVSLVGEEQPFAMKSWLRDVLRKGLVKAAQSTGAWILTSALRVGLARHVGQAVRDHSLASTSTKVRVVAVGMASLGRVLHRRILEEAQEDFPVHYPEDDGGSQGPLCSLDSNLSHFILVEPGPPGKGDGLTELRLRLEKHISEQRAGYGGTGSIEIPVLCLLVNGDPNTLERISRAVEQAAPWLILVGSGGIADVLAALVNQPHLLVPKVAEKQFKEKFPSKHFSWEDIVRWTKLLQNITSHQHLLTVYDFEQEGSEELDTVILKALVKACKSHSQEPQDYLDELKLAVAWDRVDIAKSEIFNGDVEWKSCDLEEVMVDALVSNKPEFVRLFVDNGADVADFLTYGRLQELYRSVSRKSLLFDLLQRKQEEARLTLAGLGTQQAREPPAGPPAFSLHEVSRVLKDFLQDACRGFYQDGRPGDRRRAEKGPAKRPTGQKWLLDLNQKSENPWRDLFLWAVLQNRHEMATYFWAMGQEGVAAALAACKILKEMSHLETEAEAARATREAKYERLALDLFSECYSNSEARAFALLVRRNRCWSKTTCLHLATEADAKAFFAHDGVQAFLTRIWWGDMAAGTPILRLLGAFLCPALVYTNLITFSEEAPLRTGLEDLQDLDSLDTEKSPLYGLQSRVEELVEAPRAQGDRGPRAVFLLTRWRKFWGAPVTVFLGNVVMYFAFLFLFTYVLLVDFRPPPQGPSGPEVTLYFWVFTLVLEEIRQGFFTDEDTHLVKKFTLYVGDNWNKCDMVAIFLFIVGVTCRMLPSAFEAGRTVLAMDFMVFTLRLIHIFAIHKQLGPKIIVVERMMKDVFFFLFFLSVWLVAYGVTTQALLHPHDGRLEWIFRRVLYRPYLQIFGQIPLDEIDEARVNCSTHPLLLEDSPSCPSLYANWLVILLLVTFLLVTNVLLMNLLIAMFSYTFQVVQGNADMFWKFQRYNLIVEYHERPALAPPFILLSHLSLTLRRVFKKEAEHKREHLERDLPDPLDQKVVTWETVQKENFLSKMEKRRRDSEGEVLRKTAHRVDFIAKYLGGLREQEKRIKCLESQINYCSVLVSSVADVLAQGGGPRSSQHCGEGSQLVAADHRGGLDGWEQPGAGQPPSDT

SEQ ID NO: 82 - protein, 343 aa, Homo sapiens
MNIHRSTPITIARYGRSRNKTQDFEELSSIRSAEPSQSFSPNLGSPSPPETPNLSHCVSCIGKYLLLEPLEGDHVFRAVHLHSGEELVCKVFDISCYQESLAPCFCLSAHSNINQITEIILGETKAYVFFERSYGDMHSFVRTCKKLREEEAARLFYQIASAVAHCHDGGLVLRDLKLRKFIFKDEERTRVKLESLEDAYILRGDDDSLSDKHGCPAYVSPEILNTSGSYSGKAADVWSLGVMLYTMLVGRYPFHDIEPSSLFSKIRRGQFNIPETLSPKAKCLIRSILRREPSERLTSQEILDHPWFSTDFSVSNSAYGAKEVSDQLVPDVNMEENLDPFFN

SEQ ID NO: 83 - protein, 1485 aa, Homo sapiens
MAAPAQPKKIVAPTVSQINAEFVTQLACKYWAPHIKKKSPFDIKVIEDIYEKEIVKSRFAIRKIMLLEFSQYLENYLWMNYSPEVSSKAYLMSICCMVNEKFRENVPAWEIFKKKPDHFPFFFKHILKAALAETDGEFSLHEQTVLLLFLDHCFNSLEVDLIRSQVQQLISLPMWMGLQLARLELELKKTPKLRKFWNLIKKNDEKMDPEAREQAYQERRFLSQLIQKFISVLKSVPLSEPVTMDKVHYCERFIELMIDLEALLPTRRWFNTILDDSHLLVHCYLSNLVRREEDGHLFSQLLDMLKFYTGFEINDQTGNALTENEMTTIHYDRITSLQRAAFAHFPELYDFALSNVAEVDTRESLVKFFGPLSSNTLHQVASYLCLLPTLPKNEDTTFDKEFLLELLVSRHERRISQIQQLNQMPLYPTEKIIWDENIVPTEYYSGEGCLALPKLNLQFLTLHDYLLRNFNLFRLESTYEIRQDIEDSVSRMKPWQSEYGGVVFGGWARMAQPIVAFTVVEVAKPNIGENWPTRVRADVTINLNVRDHIKDEWEGLRKHDVCFLITVRPTKPYGTKFDRRRPFIEQVGLVYVRGCEIQGMLDDKGRVIEDGPEPRPNLRGESRTFRVFLDPNQYQQDMTNTIQNGAEDVYETFNIIMRRKPKENNFKAVLETIRNLMNTDCVVPDWLHDIILGYGDPSSAHYSKMPNQIATLDFNDTFLSIEHLKASFPGHNVKVTVEDPALQIPPFRITFPVRSGKGKKRKDADVEDEDTEEAKTLIVEPHVIPNRGPYPYNQPKRNTIQFTHTQIEAIRAGMQPGLTMVVGPPGTGKTDVAVQIISNIYHNFPEQRTLIVTHSNQALNQLFEKIMALDIDERHLLRLGHGEEELETEKDFSRYGRVNYVLARRIELLEEVKRLQKSLGVPGDASYTCETAGYFFLYQVMSRWEEYISKVKNKGSTLPDVTEVSTFFPFHEYFANAPQPIFKGRSYEEDMEIAEGCFRHIKKIFTQLEEFRASELLRSGLDRSKYLLVKEAKIIAMTCTHAALKRHDLVKLGFKYDNILMEEAAQILEIETFIPLLLQNPQDGFSRLKRWIMIGDHHQLPPVIKNMAFQKYSNMEQSLFTRFVRVGVPTVDLDAQGRARASLCNLYNWRYKNLGNLPHVQLLPEFSTANAGLLYDFQLINVEDFQGVGESEPNPYFYQNLGEAEYVVALFMYMCLLGYPADKISILTTYNGQKHLIRDIINRRCGNNPLIGRPNKVTTVDRFQGQQNDYILLSLVRTRAVGHLRDVRRLVVAMSRARLGLYIFARVSLFQNCFELTPAFSQLTARPLHLHIIPTEPFPTTRKNGERPSHEVQIIKNMPQMANFVYNMYMHLIQTTHHYHQTLLQLPPAMVEEGEEVQNQETELETEEEAMTVQADIIPSPTDTSCRQETPAFQTDTTPSETGATSTPEAIPALSETTPTVVGAVSAPAEANTPQDATSAPEETK

SEQ ID NO: 84 - protein, 600 aa, Homo sapiens
MRSCLWRCRHLSQGVQWSLLLAVLVFFLFALPSFIKEPQTKPSRHQRTENIKERSLQSLAKPKSQAPTRARRTTIYAEPVPENNALNTQTQPKAHTTGDRGKEANQAPPEEQDKVPHTAQRAAWKSPEKEKTMVNTLSPRGQDAGMASGRTEAQSWKSQDTKTTQGNGGQTRKLTASRTVSEKHQGKAATTAKTLIPKSQHRMLAPTGAVSTRTRQKGVTTAVIPPKEKKPQATPPPAPFQSPTTQRNQRLKAANFKSEPRWDFEEKYSFEIGGLQTTCPDSVKIKASKSLWLQKLFLPNLTLFLDSRHFNQSEWDRLEHFAPPFGFMELNYSLVQKVVTRFPPVPQQQLLLASLPAGSLRCITCAVVGNGGILNNSHMGQEIDSHDYVFRLSGALIKGYEQDVGTRTSFYGFTAFSLTQSLLILGNRGFKNVPLGKDVRYLHFLEGTRDYEWLEALLMNQTVMSKNLFWFRHRPQEAFREALHMDRYLLLHPDFLRYMKNRFLRSKTLDGAHWRIYRPTTGALLLLTALQLCDQVSAYGFITEGHERFSDHYYDTSWKRLIFYINHDFKLEREVWKRLHDEGIIRLYQRPGPGTAKAKN

SEQ ID NO: 85 - protein, 365 aa, Homo sapiens
MAKVAKDLNPGVKKMSLGQLQSARGVACLGCKGTCSGFEPHSWRKICKSCKCSQEDHCLTSDLEDDRKIGRLLMDSKYSTLTARVKGGDGIRIYKRNRMIMTNPIATGKDPTFDTITYEWAPPGVTQKLGLQYMELIPKEKQPVTGTEGAFYRRRQLMHQLPIYDQDPSRCRGLLENELKLMEEFVKQYKSEALGVGEVALPGQGGLPKEEGKQQEKPEGAETTAATTNGSLSDPSKEVEYVCELCKGAAPPDSPVVYSDRAGYNKQWHPTCFVCAKCSEPLVDLIYFWKDGAPWCGRHYCESLRPRCSGCDEIIFAEDYQRVEDLAWHRKHFVCEGCEQLLSGRAYIVTKGQLLCPTCSKSKRS

SEQ ID NO: 86 - protein, 520 aa, Homo sapiens
MEGGPAVCCQDPRAELVERVAAIDVTHLEEADGGPEPTRNGVDPPPRARAASVIPGSTSRLLPARPSLSARKLSLQERPAGSYLEAQAGPYATGPASHISPRAWRRPTIESHHVAISDAEDCVQLNQYKLQSEIGKGAYGVVRLAYNESEDRHYAMKVLSKKKLLKQYGFPRRPPPRGSQAAQGGPAKQLLPLERVYQEIAILKKLDHVNVVKLIEVLDDPAEDNLYLALQNQAQNIQLDSTNIAKPHSLLPSEQQDSGSTWAARSVFDLLRKGPVMEVPCDKPFSEEQARLYLRDVILGLEYLHCQKIVHRDIKPSNLLLGDDGHVKIADFGVSNQFEGNDAQLSSTAGTPAFMAPEAISDSGQSFSGKALDVWATGVTLYCFVYGKCPFIDDFILALHRKIKNEPVVFPEEPEISEELKDLILKMLDKNPETRIGVPDIKLHPWVTKNGEEPLPSEEEHCSVVEVTEEEVKNSVRLIPSWTTVILVKSMLRKRSFGNPFEPQARREERSMSAPGNLLV

SEQ ID NO: 87 - protein, 740 aa, Homo sapiens
MTVKLDFEECLKDSPRFRASIELVEAEVSELETRLEKLLKLGTGLLESGRHYLAASRAFVVGICDLARLGPPEPMMAECLEKFTVSLNHKLDSHAELLDATQHTLQQQIQTLVKEGLRGFREARRDFWRGAESLEAALTHNAEVPRRRAQEAEEAGAALRTARAGYRGRALDYALQINVIEDKRKFDIMEFVLRLVEAQATHFQQGHEELSRLSQYRKELGAQLHQLVLNSAREKRDMEQRHVLLKQKELGGEEPEPSLREGPGGLVMEGHLFKRASNAFKTWSRRWFTIQSNQLVYQKKYKDPVTVVVDDLRLCTVKLCPDSERRFCFEVVSTSKSCLLQADSERLLQLWVSAVQSSIASAFSQARLDDSPRGPGQGSGHLAIGSAATLGSGGMARGREPGGVGHVVAQVQSVDGNAQCCDCREPAPEWASINLGVTLCIQCSGIHRSLGVHFSKVRSLTLDSWEPELVKLMCELGNVIINQIYEARVEAMAVKKPGPSCSRQEKEAWIHAKYVEKKFLTKLPEIRGRRGGRGRPRGQPPVPPKPSIRPRPGSLRSKPEPPSEDLGSLHPGALLFRASGHPPSLPTMADALAHGADVNWVNGGQDNATPLIQATAANSLLACEFLLQNGANVNQADSAGRGPLHHATILGHTGLACLFLKRGADLGARDSEGRDPLTIAMETANADIVTLLRLAKMREAEAAQGQAGDETYLDIFRDFSLMASDDPEKLSRRSHDLHTL

SEQ ID NO: 88 - protein, 568 aa, Homo sapiens
MMGCWILNEGLSTILVLSWLGINFYLFIDTFYWYEEEESFHYTRVILGSTLAWARASALCLNFNCMLILIPVSRNLISFIRGTSICCRGPWRRQLDKNLRFHKLVAYGIAVNATIHIVAHFFNLERYHWSQSEEAQGLLAALSKLGNTPNESYLNPVRTFPTNTTTELLRTIAGVTGLVISLALVLIMTSSTEFIRQASYELFWYTHHVFIVFFLSLAIHGTGRIVRGQTQDSLSLHNITFCRDRYAEWQTVAQCPVPQFSGKEPSAWKWILGPVVLYACERIIRFWRFQQEVVITKVVSHPSGVLELHMKKRGFKMAPGQYILVQCPAISSLEWHPFTLTSAPQEDFFSVHIRAAGDWTAALLEAFGAEGQALQEPWSLPRLAVDGPFGTALTDVFHYPVCVCVAAGIGVTPFAALLKSIWYKCSEAQTPLKLSKVYFYWICRDARAFEWFADLLLSLETRMSEQGKTHFLSYHIFLTGWDENQALHIALHWDENTDVITGLKQKTFYGRPNWNNEFKQIAYNHPSSSIGVFFCGPKALSRTLQKMCHLYSSADPRGVHFYYNKESF

SEQ ID NO: 89 - protein, 1232 aa, Homo sapiens
MAEAASGAGGTSLEGERGKRPPPEGEPAAPASGVLDKLFGKRLLQAGRYLVSHKAWMKTVPTENCDVLMTFPDTTDDHTLLWLLNHIRVGIPELIVQVRHHRHTRAYAFFVTATYESLLRGADELGLRKAVKAEFGGGTRGFSCEEDFIYENVESELRFFTSQERQSIIRFWLQNLRAKQGEALHNVRFLEDQPIIPELAARGIIQQVFPVHEQRILNRLMKSWVQAVCENQPLDDICDYFGVKIAMYFAWLGFYTSAMVYPAVFGSVLYTFTEADQTSRDVSCVVFALFNVIWSTLFLEEWKRRGAELAYKWGTLDSPGEAVEEPRPQFRGVRRISPITRAEEFYYPPWKRLLFQLLVSLPLCLACLVCVFLLMLGCFQLQELVLSVKGLPRLARFLPKVMLALLVSVSAEGYKKLAIWLNDMENYRLESAYEKHLIIKVVLFQFVNSYLSLFYIGFYLKDMERLKEMLATLLITRQFLQNVREVLQPHLYRRLGRGELGLRAVWELARALLGLLSLRRPAPRRLEPQADEGGGGGSGGGGRRCLSGGCGAPEEEEEAALVERRRAGEGGEEGDGPPGGKEEDEDDEEEEDEEEEEDEEEGEEGGLLDCGLRLKKVSFAERGAGRRRPGPSPEALLEEGSPTMVEKGLEPGVFTLAEEDDEAEGAPGSPEREPPAILFRRAGGEGRDQGPDGGPDPEPGSNSDSTRRQRRQNRSSWIDPPEEEHSPQLTQAELESCMKKYEDTFQDYQEMFVQFGYVVLFSSAFPLAALCALVNNLIEIRSDAFKLCTGLQRPFGQRVESIGQWQKVMEAMGVLAIVVNCYLIGQCGQLQRLFPWLSPEAAIVSVVVLEHFALLLKYLIHVAIPDIPGWVAEEMAKLEYQRREAFKRHERQAQHRYQQQQRRRREEEERQRHAEHHARREHDSGGREEARAEGSGLDPATSSEKASAKAKGSTAGGHGPERPKRPGSLLAPNNVMKLKQIIPLQGKFLSSGATSSLAAAGAGATTRPPPAQSPTGSDTRLPAFLSFKFLKSPETRRDSERSHSPPKAFHAGKLFPFGGTRAEPGSNGAGGQARPDGTPSSGSSRVQRSGPVDEALAEELEAPRPEEEGSGTALAPVGAPALRTRRSRSPAPPPPMPLPRPPTPPAGCWQWDGPWGCGGEGAAPRQALAAAECPPCAMAGPPPAPQPLPGDASFYSLPPPPLPPTSDPLETPAPSPSPSPSPQAVCWPSGWH

SEQ ID NO: 90 - protein, 1096 aa, Homo sapiens
MGSEDHGAQNPSCKIMTFRPTMEEFKDFNKYVAYIESQGAHRAGLAKIIPPKEWKPRQTYDDIDDVVIPAPIQQVVTGQSGLFTQYNIQKKAMTVGEYRRLANSEKYCTPRHQDFDDLERKYWKNLTFVSPIYGADISGSLYDDDVAQWNIGSLRTILDMVERECGTIIEGVNTPYLYFGMWKTTFAWHTEDMDLYSINYLHFGEPKSWYAIPPEHGKRLERLAIGFFPGSSQGCDAFLRHKMTLISPIILKKYGIPFSRITQEAGEFMITFPYGYHAGFNHGFNCAESTNFATLRWIDYGKVATQCTCRKDMVKISMDVFVRILQPERYELWKQGKDLTVLDHTRPTALTSPELSSWSASRASLKAKLLRRSHRKRSQPKKPKPEDPKFPGEGTAGAALLEEAGGSVKEEAGPEVDPEEEEEEPQPLPHGREAEGAEEDGRGKLRPTKAKSERKKKSFGLLPPQLPPPPAHFPSEEALWLPSPLEPPVLGPGPAAMEESPLPAPLNVVPPEVPSEELEAKPRPIIPMLYVVPRPGKAAFNQEHVSCQQAFEHFAQKGPTWKEPVSPMELTGPEDGAASSGAGRMETKARAGEGQAPSTFSKLKMEIKKSRRHPLGRPPTRSPLSVVKQEASSDEEASPFSGEEDVSDPDALRPLLSLQWKNRAASFQAERKFNAAAARTEPYCAICTLFYPYCQALQTEKEAPIASLGEGCPATLPSKSRQKTRPLIPEMCFTSGGENTEPLPANSYIGDDGTSPLIACGKCCLQVHASCYGIRPELVNEGWTCSRCAAHAWTAECCLCNLRGGALQMTTDRRWIHVICAIAVPEARFLNVIERHPVDISAIPEQRWKLKCVYCRKRMKKVSGACIQCSYEHCSTSFHVTCAHAAGVLMEPDDWPYVVSITCLKHKSGGHAVQLLRAVSLGQVVITKNRNGLYYRCRVIGAASQTCYEVNFDDGSYSDNLYPESITSRDCVQLGPPSEGELVELRWTDGNLYKAKFISSVTSHIYQVEFEDGSQLTVKRGDIFTLEEELPKRVRSRLSLSTGAPQEPAFSGEEAKAAKRPRVGTPLATEDSGRSQDYVAFVESLLQVQGRPGAPF

SEQ ID NO: 91 - protein, 643 aa, Homo sapiens
MHHLLEQSADMATALLAGEKLRELILPGAQDDKAGALAALLLQLKLELPFDRVVTIGTVLVPILLVTLVFTKNFAEEPIYCYTPHNFTRDQALYARGYCWTELRDALPGVDASLWPSLFEHKFLPYALLAFAAIMYVPALGWEFLASTRLTSELNFLLQEIDNCYHRAAEGRAPKIEKQIQSKGPGITEREKREIIENAEKEKSPEQNLFEKYLERRGRSNFLAKLYLARHVLILLLSAVPISYLCTYYATQKQNEFTCALGASPDGAAGAGPAVRVSCKLPSVQLQRIIAGVDIVLLCVMNLIILVNLIHLFIFRKSNFIFDKLHKVGIKTRRQWRRSQFCDINILAMFCNENRDHIKSLNRLDFITNESDLMYDNVVRQLLAALAQSNHDATPTVRDSGVQTVDPSANPAEPDGAAEPPVVKRPRKKMKWIPTSNPLPQPFKEPLAIMRVENSKAEKPKPARRKTATDTLIAPLLDRSAHHYKGGGGDPGPGPAPAPAPPPAPDKKHARHFSLDVHPYILGTKKAKAEAVPAALPASRSQEGGFLSQAEDCGLGLAPAPIKDAPLPEKEIPYPTEPARAGLPSGGPFHVRSPPAAPAVAPLTPASLGKAEPLTILSRNATHPLLHINTLSSSPPSTSRERS

SEQ ID NO: 92 - protein, 547 aa, Homo sapiens
MATMVPSVLWPRACWTLLVCCLLTPGVQGQEFLLRVEPQNPVLSAGGSLFVNCSTDCPSSEKIALETSLSKELVASGMGWAAFNLSNVTGNSRILCSVYCNGSQITGSSNITVYRLPERVELAPLPPWQPVGQNFTLRCQVEDGSPRTSLTVVLLRWEEELSRQPAVEEPAEVTATVLASRDDHGAPFSCRTELDMQPQGLGLFVNTSAPRQLRTFVLPVTPPRLVAPRFLEVETSWPVDCTLDGLFPASEAQVYLALGDQMLNATVMNHGDTLTATATATARADQEGAREIVCNVTLGGERREARENLTVFSFLGPIVNLSEPTAHEGSTVTVSCMAGARVQVTLDGVPAAAPGQPAQLQLNATESDDGRSFFCSATLEVDGEFLHRNSSVQLRVLYGPKIDRATCPQHLKWKDKTRHVLQCQARGNPYPELRCLKEGSSREVPVGIPFFVNVTHNGTYQCQASSSRGKYTLVVVMDIEAGSSHFVPVFVAVLLTLGVVTIVLALMYVFREHQRSGSYHVREESTYLPLTSMQPTEAMGEEPSRAE

SEQ ID NO: 93 - protein, 1249 aa, Homo sapiens
MVEAAPPGPGPLRRTFLVPEIKSLDQYDFSRAKAAASLAWVLRAAFGGAEHVPPELWEPFYTDQYAQEHVKPPVTRLLLSAELYCRAWRQALPQLETPPNPSALLALLARRGTVPALPERPVREADLRHQPILMGAHLAVIDALMAAFAFEWTKTLPGPLALTSLEHKLLFWVDTTVRRLQEKTEQEAAQRASPAAPADGAAPAQPSIRYRKDRVVARRAPCFPTVTSLQDLASGAALAATIHCYCPQLLRLEEVCLKDPMSVADSLYNLQLVQDFCASRLPRGCPLSLEDLLYVPPPLKVNLVVMLAELFMCFEVLKPDFVQVKDLPDGHAASPRGTEASPPQNNSGSSSPVFTFRHPLLSSGGPQSPLRGSTGSLKSSPSMSHMEALGKAWNRQLSRPLSQAVSFSTPFGLDSDVDVVMGDPVLLRSVSSDSLGPPRPAPARTPTQPPPEPGDLPTIEEALQIIHSAEPRLLPDGAADGSFYLHSPEGPSKPSLASPYLPEGTSKPLSDRPTKAPVYMPHPETPSKPSPCLVGEASKPPAPSEGSPKAVASSPAATNSEVKMTSFAERKKQLVKAEAEAGAGSPTSTPAPPEALSSEMSELSARLEEKRRAIEAQKRRIEAIFAKHRQRLGKSAFLQVQPREASGEAEAEAEEADSGPVPGGERPAGEGQGEPTSRPKAVTFSPDLGPVPHEGLGEYNRAVSKLSAALSSLQRDMQRLTDQQQRLLAPPEAPGSAPPPAAWVIPGPTTGPKAASPSPARRVPATRRSPGPGPSQSPRSPKHTRPAELRLAPLTRVLTPPHDVDSLPHLRKFSPSQVPVQTRSSILLAEETPPEEPAARPGLIEIPLGSLADPAAEDEGDGSPAGAEDSLEEEASSEGEPRVGLGFFYKDEDKPEDEMAQKRASLLERQQRRAEEARRRKQWQEVEKEQRREEAARLAQEEAPGPAPLVSAVPMATPAPAARAPAEEEVGPRKGDFTRQEYERRAQLKLMDDLDKVLRPRAAGSGGPGRGGRRATRPRSGCCDDSALARSPARGLLGSRLSKIYSQSTLSLSTVANEAHNNLGVKRPTSRAPSPSGLMSPSRLPGSRERDWENGSNASSPASVPEYTGPRLYKEPSAKSNKFIIHNALSHCCLAGKVNEPQKNRILEEIEKSKANHFLILFRDSSCQFRALYTLSGETEELSRLAGYGPRTVTPAMVEGIYKYNSDRKRFTQIPAKTMSMSVDAFTIQGHLWQGKKPTTPKKGGGTPK

SEQ ID NO: 94 - protein, 1663 aa, Homo sapiens
MATDGASCEPDLSRAPEDAAGAAAEAAKKEFDVDTLSKSELRMLLSVMEGELEARDLVIEALRARRKEVFIQERYGRFNLNDPFLALQRDYEAGAGDKEKKPVCTNPLSILEAVMAHCKKMQERMSAQLAAAESRQKKLEMEKLQLQALEQEHKKLAARLEEERGKNKQVVLMLVKECKQLSGKVIEEAQKLEDVMAKLEEEKKKTNELEEELSAEKRRSTEMEAQMEKQLSEFDTEREQLRAKLNREEAHTTDLKEEIDKMRKMIEQLKRGSDSKPSLSLPRKTKDRRLVSISVGTEGTVTRSVACQTDLVTENADHMKKLPLTMPVKPSTGSPLVSANAKGSVCTSATMARPGIDRQASYGDLIGASVPAFPPPSANKIEENGPSTGSTPDPTSSTPPLPSNAAPPTAQTPGIAPQNSQAPPMHSLHSPCANTSLHPGLNPRIQAARFRFQGNANDPDQNGNTTQSPPSRDVSPTSRDNLVAKQLARNTVTQALSRFTSPQAGAPSRPGVPPTGDVGTHPPVGRTSLKTHGVARVDRGNPPPIPPKKPGLSQTPSPPHPQLKVIIDSSRASNTGAKVDNKTVASTPSSLPQGNRVINEENLPKSSSPQLPPKPSIDLTVAPAGCAVSALATSQVGAWPAATPGLNQPACSDSSLVIPTTIAFCSSINPVSASSCRPGASDSLLVTASGWSPSLTPLLMSGGPAPLAGRPTLLQQAAAQGNVTLLSMLLNEEGLDINYSCEDGHSALYSAAKNGHTDCVRLLLSAEAQVNAADKNGFTPLCAAAAQGHFECVELLISYDANINHAADGGQTPLYLACKNGNKECIKLLLEAGTNRSVKTTDGWTPVHAAVDTGNVDSLKLLMYHRIPAHGNSFNEEESESSVFDLDGGEESPEGISKPVVPADLINHANREGWTAAHIAASKGFKNCLEILCRHGGLEPERRDKCNRTVHDVATDDCKHLLENLNALKIPLRISVGEIEPSNYGSDDLECENTICALNIRKQTSWDDFSKAVSQALTNHFQAISSDGWWSLEDVTCNNTTDSNIGLSARSIRSITLGNVPWSVGQSFAQSPWDFMRKNKAEHITVLLSGPQEGCLSSVTYASMIPLQMMQNYLRLVEQYHNVIFHGPEGSLQDYIVHQLALCLKHRQMAAGFSCEIVRAEVDAGFSKEQLLDLFISSACLIPVKQSPSKKKIIIILENLEKSSLSELLRDFLAPLENRSTESPCTFQKGNGLSECYYFHENCFLMGTIAKACLQGSDLLVQQHFRWVQLRWDGEPMQGLLQRFLRRKVVNKFKGQAPSPCDPVCKIVDWALSVWRQLNSCLARLGTPEALLGPKYFLSCPVVPGHAQVTVKWMSKLWNGVIAPRVQEAILSRASVKRQPGFGQTTAKRHPSQGQQAVVKAALSILLNKAVLHGCPLPRAELDQHTADFKGGSFPLSIVSSYNTCNKKKGESGAWRKVNTSPRRKSGRFSLPTWNKPDLSTEGMKNKTISQLNCNRNASLSKQKSLENDLSLTLNLDQRLSLGSDDEADLVKELQSMCSSKSESDISKIADSRDDLRMFDSSGNNPVLSATINNLRMPVSQKEVSPLSSHQTTECSNSKSKTELGVSRVKSFLPVPRSKVTQCSQNTKRSSSSSNTRQIEINNNSKEVNWNLHKNEHLEKPNK

SEQ ID NO: 95 - protein, 153 aa, Homo sapiens
MSEIQGTVEFSVELHKFYNVDLFQRGYYQIRVTLKVSSRIPHRLSASIAGQTESSSLHSACVHDSTVHSRVFQILYRNEEVPINDAVVFRVHLLLGGERMEDALSEVDFQLKVDLHFTDSEQQLRDVAGAPMVSSRTLGLHFHPRNGLHHQVP

SEQ ID NO: 96 - protein, 1606 aa, Homo sapiens
MYSAHRPLMPASSAASRGLGMFVWTNVEPRSVAVFPWHSLVPFLAPSQPDPSVQPSEAQQPASHPVASNQSKEPAESAAVAHERPPGGTGSADPERPPGATCPESPGPGPPHPLGVVESGKGPPPTTEEEASGPPGEPRLDSETESDHDDAFLSIMSPEIQLPLPPGKRRTQSLSALPKERDSSSEKDGRSPNKREKDHIRRPMNAFMIFSKRHRALVHQRHPNQDNRTVSKILGEWWYALGPKEKQKYHDLAFQVKEAHFKAHPDWKWCNKDRKKSSSEAKPTSLGLAGGHKETRERSMSETGTAAAPGVSSELLSVAAQTLLSSDTKAPGSSSCGAERLHTVGGPGSARPRAFSHSGVHSLDGGEVDSQALQELTQMVSGPASYSGPKPSTQYGAPGPFAAPGEGGALAATGRPPLLPTRASRSQRAASEDMTSDEERMVICEEEGDDDVIADDGFGTTDIDLKCKERVTDSESGDSSGEDPEGNKGFGRKVFSPVIRSSFTHCRPPLDPEPPGPPDPPVAFGKGYGSAPSSSASSPASSSASAATSFSLGSGTFKAQESGQGSTAGPLRPPPPGAGGPATPSKATRFLPMDPATFRRKRPESVGGLEPPGPSVIAAPPSGGGNILQTLVLPPNKEEQEGGGARVPSAPAPSLAYGAPAAPLSRPAATMVTNVVRPVSSTPVPIASKPFPTSGRAEASPNDTAGARTEMGTGSRVPGGSPLGVSLVYSDKKSAAATSPAPHLVAGPLLGTVGKAPATVTNLLVGTPGYGAPAPPAVQFIAQGAPGGGTTAGSGAGAGSGPNGPVPLGILQPGALGKAGGITQVQYILPTLPQQLQVAPAPAPAPGTKAAAPSGPAPTTSIRFTLPPGTSTNGKVLAATAPTPGIPILQSVPSAPPPKAQSVSPVQAPPPGGSAQLLPGKVLVPLAAPSMSVRGGGAGQPLPLVSPPFSVPVQNGAQPPSKIIQLTPVPVSTPSGLVPPLSPATLPGPTSQPQKVLLPSSTRITYVQSAGGHALPLGTSPASSQAGTVTSYGPTSSVALGFTSLGPSGPAFVQPLLSGQAPLLAPGQVGVSPVPSPQLPPACAAPGGPVITAFYSGSPAPTSSAPLAQPSQAPPSLVYTVATSTTPPAATILPKGPPAPATATPAPTSPFPSATGSMTYSLVAPKAQRPSPKAPQKVKAAIASIPVGSFEAGASGRPGPAPRQPLEPGPVREPTAPESELEGQPTPPAPPPLPETWTPTARSSPPLPPPAEERTSAKGPETMASKFPSSSSDWRVPGQGLENRGEPPTPPSPAPAPAVAPGGSSESSSGRAAGDTPERKEAAGTGKKVKVRPPPLKKTFDSVDNRVLSEVDFEERFAELPEFRPEEVLPSPTLQSLATSPRAILGSYRKKRKNSTDLDSAPEDPTSPKRKMRRRSSCSSEPNTPKSAKCEGDIFTFDRTGTEAEDVLGELEYDKVPYSSLRRTLDQRRALVMQLFQDHGFFPSAQATAAFQARYADIFPSKVCLQLKIREVRQKIMQAATPTEQPPGAEAPLPVPPPTGTAAAPAPTPSPAGGPDPTSPSSDSGTAQAAPPLPPPPESGPGQPGWEGAPQPSPPPPGPSTAATGR

SEQ ID NO: 97 - protein, 665 aa, Homo sapiens
MAAGGSTQQRRREMAAASAAAISGAGRCRLSKIGATRRPPPARVRVAVRLRPFVDGTAGASDPPCVRGMDSCSLEIANWRNHQETLKYQFDAFYGERSTQQDIYAGSVQPILRHLLEGQNASVLAYGPTGAGKTHTMLGSPEQPGVIPRALMDLLQLTREEGAEGRPWALSVTMSYLEIYQEKVLDLLDPASGDLVIREDCRGNILIPGLSQKPISSFADFERHFLPASRNRTVGATRLNQRSSRSHAVLLVKVDQRERLAPFRQREGKLYLIDLAGSEDNRRTGNKGLRLKESGAINTSLFVLGKVVDALNQGLPRVPYRDSKLTRLLQDSLGGSAHSILIANIAPERRFYLDTVSALNFAARSKEVINRPFTNESLQPHALGPVKLSQKELLGPPEAKRARGPEEEEIGSPEPMAAPASASQKLSPLQKLSSMDPAMLERLLSLDRLLASQGSQGAPLLSTPKRERMVLMKTVEEKDLEIERLKTKQKELEAKMLAQKAEEKENHCPTMLRPLSHRTVTGAKPLKKAVVMPLQLIQEQAASPNAEIHILKNKGRKRKLESLDALEPEEKAEDCWELQISPELLAHGRQKILDLLNEGSARDLRSLQRIGPKKAQLIVGWRELHGPFSQVEDLERVEGITGKQMESFLKANILGLAAGQRCGAS

SEQ ID NO: 98 - protein, 1430 aa, Homo sapiens
MSRPSSVSPRQPAPGGGGGGGPSPCGPGGGGRAKGLKDIRIDEEVKIAVNIALERFRYGDQREMEFPSSLTSTERAFIHRLSQSLGLVSKSKGKGANRYLTVKKKDGSETAHAMMTCNLTHNTKHAVRSLIQRFPVTNKERTELLPKTERGNVFAVEAENREMSKTSGRLNNGIPQIPVKRGESEFDSFRQSLPVFEKQEEIVKIIKENKVVLIVGETGSGKTTQIPQFLLDDCFKNGIPCRIFCTQPRRLAAIAVAERVAAERRERIGQTIGYQIRLESRVSPKTLLTFCTNGVLLRTLMAGDSTLSTVTHVIVDEVHERDRFSDFLLTKLRDLLQKHPTLKLILSSAALDVNLFIRYFGSCPVIYIQGRPFEVKEMFLEDILRTTGYTNKEMLKYKKEKQQEEKQQTTLTEWYSAQENSFKPESQRQRTVLNVTDEYDLLDDGGDAVFSQLTEKDVNCLEPWLIKEMDACLSDIWLHKDIDAFAQVFHLILTENVSVDYRHSETSATALMVAAGRGFASQVEQLISMGANVHSKASNGWMALDWAKHFGQTEIVDLLESYSATLEFGNLDESSLVQTNGSDLSAEDRELLKAYHHSFDDEKVDLDLIMHLLYNICHSCDAGAVLIFLPGYDEIVGLRDRILFDDKRFADSTHRYQVFMLHSNMQTSDQKKVLKNPPAGVRKIILSTNIAETSITVNDVVFVIDSGKVKEKSFDALNFVTMLKMVWISKASAIQRKGRAGRCRPGICFRLFSRLRFQNMLEFQTPELLRMPLQELCLHTKLLAPVNCPIADFLMKAPEPPPALIVRNAVQMLKTIDAMDTWEDLTELGYHLADLPVEPHLGKMVLCAVVLKCLDPILTIACTLAYRDPFVLPTQASQKRAAMLCRKRFTAGAFSDHMALLRAFQAWQKARSDGWERAFCEKNFLSQATMEIIIGMRTQLLGQLRASGFVRARGGGDIRDVNTNSENWAVVKAALVAGMYPNLVHVDRENLVLTGPKEKKVRFHPASVLSQPQYKKIPPANGQAAAIKALPTDWLIYDEMTRAHRIANIRCCSAVTPVTILVFCGPARLASNALQEPSSFRVDGIPNDSSDSEMEDKTTANLAALKLDEWLHFTLEPEAASLLLQLRQKWHSLFLRRMRAPSKPWSQVDEATIRAIIAVLSTEEQSAGLQQPSGIGQRPRPMSSEELPLASSWRSNNSRKSSADTEFSDECTTAERVLMKSPSPALHPPQKYKDRGILHPKRGTEDRSDQSSLKSTDSSSYPSPCASPSPPSSGKGSKSPSPRPNMPVRYFIMKSSNLRNLEISQQKGIWSTTPSNERKLNRAFWESSIVYLVFSVQGSGHFQGFSRMSSEIGREKSQDWGSAGLGGVFKVEWIRKESLPFQFAHHLLNPWNDNKKVQISRDGQELEPLVGEQLLQLWERLPLGEKNTTD

SEQ ID NO: 99 - protein, 479 aa, Homo sapiens
MAVLGVQLVVTLLTATLMHRLAPHCSFARWLLCNGSLFRYKHPSEEELRALAGKPRPRGRKERWANGLSEEKPLSVPRDAPFQLETCPLTTVDALVLRFFLEYQWFVDFAVYSGGVYLFTEAYYYMLGPAKETNIAVFWCLLTVTFSIKMFLTVTRLYFSAEEGGERSVCLTFAFLFLLLAMLVQVVREETLELGLEPGLASMTQNLEPLLKKQGWDWALPVAKLAIRVGLAVVGSVLGAFLTFPGLRLAQTHRDALTMSEDRPMLQFLLHTSFLSPLFILWLWTKPIARDFLHQPPFGETRFSLLSDSAFDSGRLWLLVVLCLLRLAVTRPHLQAYLCLAKARVEQLRREAGRIEAREIQQRVVRVYCYVTVVSLQYLTPLILTLNCTLLLKTLGGYSWGLGPAPLLSPDPSSASAAPIGSGEDEVQQTAARIAGALGGLLTPLFLRGVLAYLIWWTAACQLLASLFGLYFHQHLAGS

SEQ ID NO: 100 - protein, 870 aa, Homo sapiens
MNHLNVLAKALYDNVAESPDELSFRKGDIMTVLEQDTQGLDGWWLCSLHGRQGIVPGNRLKILVGMYDKKPAGPGPGPPATPAQPQPGLHAPAPPASQYTPMLPNTYQPQPDSVYLVPTPSKAQQGLYQVPGPSPQFQSPPAKQTSTFSKQTPHHPFPSPATDLYQVPPGPGGPAQDIYQVPPSAGMGHDIYQVPPSMDTRSWEGTKPPAKVVVPTRVGQGYVYEAAQPEQDEYDIPRHLLAPGPQDIYDVPPVRGLLPSQYGQEVYDTPPMAVKGPNGRDPLLEVYDVPPSVEKGLPPSNHHAVYDVPPSVSKDVPDGPLLREETYDVPPAFAKAKPFDPARTPLVLAAPPPDSPPAEDVYDVPPPAPDLYDVPPGLRRPGPGTLYDVPRERVLPPEVADGGVVDSGVYAVPPPAEREAPAEGKRLSASSTGSTRSSQSASSLEVAGPGREPLELEVAVEALARLQQGVSATVAHLLDLAGSAGATGSWRSPSEPQEPLVQDLQAAVAAVQSAVHELLEFARSAVGNAAHTSDRALHAKLSRQLQKMEDVHQTLVAHGQALDAGRGGSGATLEDLDRLVACSRAVPEDAKQLASFLHGNASLLFRRTKATAPGPEGGGTLHPNPTDKTSSIQSRPLPSPPKFTSQDSPDGQYENSEGGWMEDYDYVHLQGKEEFEKTQKELLEKGSITRQGKSQLELQQLKQFERLEQEVSRPIDHDLANWTPAQPLAPGRTGGLGPSDRQLLLFYLEQCEANLTTLTNAVDAFFTAVATNQPPKIFVAHSKFVILSAHKLVFIGDTLSRQAKAADVRSQVTHYSNLLCDLLRGIVATTKAAALQYPSPSAAQDMVERVKELGHSTQQFRRVLGQLAAA

SEQ ID NO: 101 - protein, 455 aa, Homo sapiens
MGLSTVPDLLLPLVLLELLVGIYPSGVIGLVPHLGDREKRDSVCPQGKYIHPQNNSICCTKCHKGTYLYNDCPGPGQDTDCRECESGSFTASENHLRHCLSCSKCRKEMGQVEISSCTVDRDTVCGCRKNQYRHYWSENLFQCFNCSLCLNGTVHLSCQEKQNTVCTCHAGFFLRENECVSCSNCKKSLECTKLCLPQIENVKGTEDSGTTVLLPLVIFFGLCLLSLLFIGLMYRYQRWKSKLYSIVCGKSTPEKEGELEGTTTKPLAPNPSFSPTPGFTPTLGFSPVPSSTFTSSSTYTPGDCPNFAAPRREVAPPYQGADPILATALASDPIPNPLQKWEDSAHKPQSLDTDDPATLYAVVENVPPLRWKEFVRRLGLSDHEIDRLELQNGRCLREAQYSMLATWRRRTPRREATLELLGRVLRDMDLLGCLEDIEEALCGPAALPPAPSLLR

SEQ ID NO: 102 - protein, 3312 aa, Homo sapiens
MMARRPPWRGLGGRSTPILLLLLLSLFPLSQEELGGGGHQGWDPGLAATTGPRAHIGGGALALCPESSGVREDGGPGLGVREPIFVGLRGRRQSARNSRGPPEQPNEELGIEHGVQPLGSRERETGQGPGSVLYWRPEVSSCGRTGPLQRGSLSPGALSSGVPGSGNSSPLPSDFLIRHHGPKPVSSQRNAGTGSRKRVGTARCCGELWATGSKGQGERATTSGAERTAPRRNCLPGASGSGPELDSAPRTARTAPASGSAPRESRTAPEPAPKRMRSRGLFRCRFLPQRPGPRPPGLPARPEARKVTSANRARFRRAANRHPQFPQYNYQTLVPENEAAGTAVLRVVAQDPDAGEAGRLVYSLAALMNSRSLELFSIDPQSGLIRTAAALDRESMERHYLRVTAQDHGSPRLSATTMVAVTVADRNDHSPVFEQAQYRETLRENVEEGYPILQLRATDGDAPPNANLRYRFVGPPAARAAAAAAFEIDPRSGLISTSGRVDREHMESYELVVEASDQGQEPGPRSATVRVHITVLDENDNAPQFSEKRYVAQVREDVRPHTVVLRVTATDRDKDANGLVHYNIISGNSRGHFAIDSLTGEIQVVAPLDFEAEREYALRIRAQDAGRPPLSNNTGLASIQVVDINDHIPIFVSTPFQVSVLENAPLGHSVIHIQAVDADHGENARLEYSLTGVAPDTPFVINSATGWVSVSGPLDRESVEHYFFGVEARDHGSPPLSASASVTVTVLDVNDNRPEFTMKEYHLRLNEDAAVGTSVVSVTAVDRDANSAISYQITGGNTRNRFAISTQGGVGLVTLALPLDYKQERYFKLVLTASDRALHDHCYVHINITDANTHRPVFQSAHYSVSVNEDRPMGSTIVVISASDDDVGENARITYLLEDNLPQFRIDADSGAITLQAPLDYEDQVTYTLAITARDNGIPQKADTTYVEVMVNDVNDNAPQFVASHYTGLVSEDAPPFTSVLQISATDRDAHANGRVQYTFQNGEDGDGDFTIEPTSGIVRTVRRLDREAVSVYELTAYAVDRGVPPLRTPVSIQVMVQDVNDNAPVFPAEEFEVRVKENSIVGSVVAQITAVDPDEGPNAHIMYQIVEGNIPELFQMDIFSGELTALIDLDYEARQEYVIVVQATSAPLVSRATVHVRLVDQNDNSPVLNNFQILFNNYVSNRSDTFPSGIIGRIPAYDPDVSDHLFYSFERGNELQLLVVNQTSGELRLSRKLDNNRPLVASMLVTVTDGLHSVTAQCVLRVVIITEELLANSLTVRLENMWQERFLSPLLGRFLEGVAAVLATPAEDVFIFNIQNDTDVGGTVLNVSFSALAPRGAGAGAAGPWFSSEELQEQLYVRRAALAARSLLDVLPFDDNVCLREPCENYMKCVSVLRFDSSAPFLASASTLFRPIQPIAGLRCRCPPGFTGDFCETELDLCYSNPCRNGGACARREGGYTCVCRPRFTGEDCELDTEAGRCVPGVCRNGGTCTDAPNGGFRCQCPAGGAFEGPRCEVAARSFPPSSFVMFRGLRQRFHLTLSLSFATVQQSGLLFYNGRLNEKHDFLALELVAGQVRLTYSTGESNTVVSPTVPGGLSDGQWHTVHLRYYNKPRTDALGGAQGPSKDKVAVLSVDDCDVAVALQFGAEIGNYSCAAAGVQTSSKKSLDLTGPLLLGGVPNLPENFPVSHKDFIGCMRDLHIDGRRVDMAAFVANNGTMAGCQAKLHFCDSGPCKNSGFCSERWGSFSCDCPVGFGGKDCQLTMAHPHHFRGNGTLSWNFGSDMAVSVPWYLGLAFRTRATQGVLMQVQAGPHSTLLCQLDRGLLSVTVTRGSGRASHLLLDQVTVSDGRWHDLRLELQEEPGGRRGHHVLMVSLDFSLFQDTMAVGSELQGLKVKQLHVGGLPPGSAEEAPQGLVGCIQGVWLGSTPSGSPALLPPSHRVNAEPGCVVTNACASGPCPPHADCRDLWQTFSCTCQPGYYGPGCVDACLLNPCQNQGSCRHLPGAPHGYTCDCVGGYFGHHCEHRMDQQCPRGWWGSPTCGPCNCDVHKGFDPNCNKTNGQCHCKEFHYRPRGSDSCLPCDCYPVGSTSRSCAPHSGQCPCRPGALGRQCNSCDSPFAEVTASGCRVLYDACPKSLRSGVWWPQTKFGVLATVPCPRGALGAAVRLCDEAQGWLEPDLFNCTSPAFRELSLLLDGLELNKTALDTMEAKKLAQRLREVTGHTDHYFSQDVRVTARLLAHLLAFESHQQGFGLTATQDAHFNENLLWAGSALLAPETGDLWAALGQRAPGGSPGSAGLVRHLEEYAATLARNMELTYLNPMGLVTPNIMLSIDRMEHPSSPRGARRYPRYHSNLFRGQDAWDPHTHVLLPSQSPRPSPSEVLPTSSSIENSTTSSVVPPPAPPEPEPGISIIILLVYRTLGGLLPAQFQAERRGARLPQNPVMNSPVVSVAVFHGRNFLRGILESPISLEFRLLQTANRSKAICVQWDPPGLAEQHGVWTARDCELVHRNGSHARCRCSRTGTFGVLMDASPRERLEGDLELLAVFTHVVVAVSVAALVLTAAILLSLRSLKSNVRGIHANVAAALGVAELLFLLGIHRTHNQLVCTAVAILLHYFFLSTFAWLFVQGLHLYRMQVEPRNVDRGAMRFYHALGWGVPAVLLGLAVGLDPEGYGNPDFCWISVHEPLIWSFAGPVVLVIVMNGTMFLLAARTSCSTGQREAKKTSALTLRSSFLLLLLVSASWLFGLLAVNHSILAFHYLHAGLCGLQGLAVLLLFCVLNADARAAWMPACLGRKAAPEEARPAPGLGPGAYNNTALFEESGLIRITLGASTVSSVSSARSGRTQDQDSQRGRSYLRDNVLVRHGSAADHTDHSLQAHAGPTDLDVAMFHRDAGADSDSDSDLSLEEERSLSIPSSESEDNGRTRGRFQRPLCRAAQSERLLTHPKDVDGNDLLSYWPALGECEAAPCALQTWGSERRLGLDTSKDAANNNQPDPALTSGDETSLGRAQRQRKGILKNRLQYPLVPQTRGAPELSWCRAATLGHRAVPAASYGRIYAGGGTGSLSQPASRYSSREQLDLLLRRQLSRERLEEAPAPVLRPLSRPGSQECMDAAPGRLEPKDRGSTLPRRQPPRDYPGAMAGRFGSRDALDLGAPREWLSTLPPPRRTRDLDPQPPPLPLSPQRQLSRDPLLPSRPLDSLSRSSNSREQLDQVPSRHPSREALGPLPQLLRAREDSVSGPSHGPSTEQLDILSSILASFNSSALSSVQSSSTPLGPHTTATPSATASVLGPSTPRSATSHSISELSPDSEVPRSEGHS

SEQ ID NO: 103 - protein, 497 aa, Homo sapiens
METKLPPASTPTSPSSPGLSPVPPPDKVDGFSRRSLRRARPRRSHSSSQFRYQSNQQELTPLPLLKDVPASELHELLSRKLAQCGVMFDFLDCVADLKGKEVKRAALNELVECVGSTRGVLIEPVYPDIIRMISVNIFRTLPPSENPEFDPEEDEPNLEPSWPHLQLVYEFFLRFLESPDFQPSVAKRYVDQKFVLMLLELFDSEDPREREYLKTILHRVYGKFLGLRAYIRKQCNHIFLRFIYEFEHFNGVAELLEILGSIINGFALPLKTEHKQFLVRVLIPLHSVKSLSVFHAQLAYCVVQFLEKDATLTEHVIRGLLKYWPKTCTQKEVMFLGEMEEILDVIEPSQFVKIQEPLFKQVARCVSSPHFQVAERALYFWNNEYILSLIEDNCHTVLPAVFGTLYQVSKEHWNQTIVSLIYNVLKTFMEMNGKLFDELTASYKLEKQQEQQKAQERQELWQGLEELRLRRLQGTQGAKEAPLQRLTPQVAASGGQS

SEQ ID NO: 104 - protein, 842 aa, Homo sapiens
MSRPLSDQEKRKQISVRGLAGVENVTELKKNFNRHLHFTLVKDRNVATPRDYYFALAHTVRDHLVGRWIRTQQHYYEKDPKRIYYLSLEFYMGRTLQNTMVNLALENACDEATYQLGLDMEELEEIEEDAGLGNGGLGRLAACFLDSMATLGLAAYGYGIRYEFGIFNQKISGGWQMEEADDWLRYGNPWEKARPEFTLPVHFYGHVEHTSQGAKWVDTQVVLAMPYDTPVPGYRNNVVNTMRLWSAKAPNDFNLKDFNVGGYIQAVLDRNLAENISRVLYPNDNFFEGKELRLKQEYFVVAATLQDIIRRFKSSKFGCRDPVRTNFDAFPDKVAIQLNDTHPSLAIPELMRILVDLERMDWDKAWDVTVRTCAYTNHTVLPEALERWPVHLLETLLPRHLQIIYEINQRFLNRVAAAFPGDVDRLRRMSLVEEGAVKRINMAHLCIAGSHAVNGVARIHSEILKKTIFKDFYELEPHKFQNKTNGITPRRWLVLCNPGLAEVIAERIGEDFISDLDQLRKLLSFVDDEAFIRDVAKVKQENKLKFAAYLEREYKVHINPNSLFDIQVKRIHEYKRQLLNCLHVITLYNRIKREPNKFFVPRTVMIGGKAAPGYHMAKMIIRLVTAIGDVVNHDPAVGDRLRVIFLENYRVSLAEKVIPAADLSEQISTAGTEASGTGNMKFMLNGALTIGTMDGANVEMAEEAGEENFFIFGMRVEDVDKLDQRGYNAQEYYDRIPELRQVIEQLSSGFFSPKQPDLFKDIVNMLMHHDRFKVFADYEDYIKCQEKVSALYKNPREWTRMVIRNIATSGKFSSDRTIAQYAREIWGVEPSRQRLPAPDEAI

SEQ ID NO: 105 - protein, 454 aa, Homo sapiens
MPRCPAGAMDEGPVDLRTRPKAAGLPGAALPLRKRPLRAPSPEPAAPRGAAGLVVPLDPLRGGCDLPAVPGPPHGLARPEALYYPGALLPLYPTRAMGSPFPLVNLPTPLYPMMCPMEHPLSADIAMATRADEDGDTPLHIAVVQGNLPAVHRLVNLFQQGGRELDIYNNLRQTPLHLAVITTLPSVVRLLVTAGASPMALDRHGQTAAHLACEHRSPTCLRALLDSAAPGTLDLEARNYDGLTALHVAVNTECQETVQLLLERGADIDAVDIKSGRSPLIHAVENNSLSMVQLLLQHGANVNAQMYSGSSALHSASGRGLLPLVRTLVRSGADSSLKNCHNDTPLMVARSRRVIDILRGKATRPASTSQPDPSPDRSANTSPESSSRLSSNGLLSASPSSSPSQSPPRDPPGFPMAPPNFFLPSPSPPAFLPFAGVLRGPGRPVPPSPAPGGS

SEQ ID NO: 106 - protein, 554 aa, Homo sapiens
MRRPLSKCGMEPGGGDASLTLHGLQNRSHGKIKLRKRKSTLYFNTQEKSARRRGDLLGENIYLLLFTIALRILNCFLVQTSFVPDEYWQSLEVSHHMVFNYGYLTWEWTERLRSYTYPLIFASIYKILHLLGKDSVQLLIWIPRLAQALLSAVADVRLYSLMKQLENQEVARWVFFCQLCSWFTWYCCTRTLTNTMETVLTIIALFYYPLEGSKSMNSVKYSSLVALAFIIRPTAVILWTPLLFRHFCQEPRKLDLILHHFLPVGFVTLSLSLMIDRIFFGQWTLVQFNFLKFNVLQNWGTFYGSHPWHWYFSQGFPVILGTHLPFFIHGCYLAPKRYRILLVTVLWTLLVYSMLSHKEFRFIYPVLPFCMVFCGYSLTHLKTWKKPALSFLFLSNLFLALYTGLVHQRGTLDVMSHIQKVCYNNPNKSSASIFIMMPCHSTPYYSHVHCPLPMRFLQCPPDLTGKSHYLDEADVFYLNPLNWLHREFHDDASLPTHLITFSILEEEISAFLISSNYKRTAVFFHTHLPEGRIGSHIYVYERKLKGKFNMKMKF

SEQ ID NO: 107 - protein, 1005 aa, Homo sapiens
MAPARGRLPPALWVVTAAAAAATCVSAARGEVNLLDTSTIHGDWGWLTYPAHGWDSINEVDESFQPIHTYQVCNVMSPNQNNWLRTSWVPRDGARRVYAEIKFTLRDCNSMPGVLGTCKETFNLYYLESDRDLGASTQESQFLKIDTIAADESFTGADLGVRRLKLNTEVRSVGPLSKRGFYLAFQDIGACLAILSLRIYYKKCPAMVRNLAAFSEAVTGADSSSLVEVRGQCVRHSEERDTPKMYCSAEGEWLVPIGKCVCSAGYEERRDACVACELGFYKSAPGDQLCARCPPHSHSAAPAAQACHCDLSYYRAALDPPSSACTRPPSAPVNLISSVNGTSVTLEWAPPLDPGGRSDITYNAVCRRCPWALSRCEACGSGTRFVPQQTSLVQASLLVANLLAHMNYSFWIEAVNGVSDLSPEPRRAAVVNITTNQAAPSQVVVIRQERAGQTSVSLLWQEPEQPNGIILEYEIKYYEKDKEMQSYSTLKAVTTRATVSGLKPGTRYVFQVRARTSAGCGRFSQAMEVETGKPRPRYDTRTIVWICLTLITGLVVLLLLLICKKRHCGYSKAFQDSDEEKMHYQNGQAPPPVFLPLHHPPGKLPEPQFYAEPHTYEEPGRAGRSFTREIEASRIHIEKIIGSGDSGEVCYGRLRVPGQRDVPVAIKALKAGYTERQRRDFLSEASIMGQFDHPNIIRLEGVVTRGRLAMIVTEYMENGSLDTFLRTHDGQFTIMQLVGMLRGVGAGMRYLSDLGYVHRDLAARNVLVDSNLVCKVSDFGLSRVLEDDPDAAYTTTGGKIPIRWTAPEAIAFRTFSSASDVWSFGVVMWEVLAYGERPYWNMTNRDVISSVEEGYRLPAPMGCPHALHQLMLDCWHKDRAQRPRFSQIVSVLDALIRSPESLRATATVSRCPPPAFVRSCFDLRGGSGGGGGLTVGDWLDSIRMGRYRDHFAAGGYSSLGMVLRMNAQDVRALGITLMGHQKKILGSIQTMRAQLTSTQGPRRHL

SEQ ID NO: 108 - protein, 365 aa, Homo sapiens
MPGGKKVAGGGSSGATPTSAAATAPSGVRRLETSEGTSAQRDEEPEEEGEEDLRDGGVPFFVNRGGLPVDEATWERMWKHVAKIHPDGEKVAQRIRGATDLPKIPIPSVPTFQPSTPVPERLEAVQRYIRELQYNHTGTQFFEIKKSRPLTGLMDLAKEMTKEALPIKCLEAVILGIYLTNSMPTLERFPISFKTYFSGNYFRHIVLGVNFAGRYGALGMSRREDLMYKPPAFRTLSELVLDFEAAYGRCWHVLKKVKLGQSVSHDPHSVEQIEWKHSVLDVERLGRDDFRKELERHARDMRLKIGKGTGPPSPTKDRKKDVSSPQRAQSSPHRRNSRSERRPSGDKKTSEPKAMPDLNGYQIRV

SEQ ID NO: 109 - protein, 1015 aa, Homo sapiens
MRRFLRPGHDPVRERLKRDLFQFNKTVEHGFPHQPSALGYSPSLRILAIGTRSGAIKLYGAPGVEFMGLHQENNAVTQIHLLPGQCQLVTLLDDNSLHLWSLKVKGGASELQEDESFTLRGPPGAAPSATQITVVLPHSSCELLYLGTESGNVFVVQLPAFRALEDRTISSDAVLQRLPEEARHRRVFEMVEALQEHPRDPNQILIGYSRGLVVIWDLQGSRVLYHFLSSQQLENIWWQRDGRLLVSCHSDGSYCQWPVSSEAQQPEPLRSLVPYGPFPCKAITRILWLTTRQGLPFTIFQGGMPRASYGDRHCISVIHDGQQTAFDFTSRVIGFTVLTEADPAATFDDPYALVVLAEEELVVIDLQTAGWPPVQLPYLASLHCSAITCSHHVSNIPLKLWERIIAAGSRQNAHFSTMEWPIDGGTSLTPAPPQRDLLLTGHEDGTVRFWDASGVCLRLLYKLSTVRVFLTDTDPNENFSAQGEDEWPPLRKVGSFDPYSDDPRLGIQKIFLCKYSGYLAVAGTAGQVLVLELNDEAAEQAVEQVEADLLQDQEGYRWKGHERLAARSGPVRFEPGFQPFVLVQCQPPAVVTSLALHSEWRLVAFGTSHGFGLFDHQQRRQVFVKCTLHPSDQLALEGPLSRVKSLKKSLRQSFRRMRRSRVSSRKRHPAGPPGEAQEGSAKAERPGLQNMELAPVQRKIEARSAEDSFTGFVRTLYFADTYLKDSSRHCPSLWAGTNGGTIYAFSLRVPPAERRMDEPVRAEQAKEIQLMHRAPVVGILVLDGHSVPLPEPLEVAHDLSKSPDMQGSHQLLVVSEEQFKVFTLPKVSAKLKLKLTALEGSRVRRVSVAHFGSRRAEDYGEHHLAVLTNLGDIQVVSLPLLKPQVRYSCIRREDVSGIASCVFTKYGQGFYLISPSEFERFSLSTKWLVEPRCLVDSAETKNHRPGNGAGPKKAPSRARNSGTQSDGEEKQPGLVMERALLSDERAATGVHIEPPWGAASAMAEQSEWLSVQAAR

SEQ ID NO: 110 - protein, 611 aa, Homo sapiens
KPIQRFPQFILLLQDMLKNTPRGHPDRLSLQLALTELETLAEKLNEQKRLADQVAEIQQLTKSVSDRSSLNKLLTSGQRQLLLCETLTETVYGDRGQLIKSKERRVFLLNDMLVCANINFKGQLEISSLVPLGPKYVVKWNTALPQVQVVEVGQDGGTYDKDNVLIQHSGAKKASASGQAQNKVYLGPPRLFQELQDLQKDLAVVEQITLLISTLHGTYQNLNMTVAQDWCLALQRLMRVKEEEIHSANKCRLRLLLPGKPDKSGRPISFMVVFITPNPLSKISWVNRLHLAKIGLREENQPGWLCPDEDKKSKAPFWCPILACCIPAFSSRALSLQLGALVHSPVNCPLLGFSAVSTSLPQGYLWVGGGQEGAGGQVEIFSLNRPSPRTVKSFPLAAPVLCMEYIPELEEEAESRDESPTVADPSATVHPTICLGLQDGSILLYSSVDTGTQCLVSCRSPGLQPVLCLRHSPFHLLAGLQDGTLAAYPRTSGGVLWDLESPPVCLTVGPGPVRTLLSLEDAVWASCGPRVTVLEATTLQPQQSFEAHQDEAVSVTHMVKAGSGVWMAFSSGTSIRLFHTETLEHLQEINIATRTTFLLPDRSLIKCSPRA

SEQ ID NO: 111 - protein, 458 aa, Homo sapiens
MAWASRLGLLLALLLPVVGASTPGTVVRLNKAALSYVSEIGKAPLQRALQVTVPHFLDWSGEALQPTRIRILNVHVPRLHLKFIAGFGVRLLAAANFTFKVFRAPEPLELTLPVELLADTRVTQSSIRTPVVSISACSLFSGHANEFDGSNSTSHALLVLVQKHIKAVLSNKLCLSISNLVQGVNVHLGTLIGLNPVGPESQIRYSMVSVPTVTSDYISLEVNAVLFLLGKPIILPTDATPFVLPRHVGTEGSMATVGLSQQLFDSALLLLQKAGALNLDITGQLRSDDNLLNTSALGRLIPEVARQFPEPMPVVLKVRLGATPVAMLHTNNATLRLQPFVEVLATASNSAFQSLFSLDVVVNLRLQLSVSKVKLQGTTSVLGDVQLTVASSNVGFIDTDQVRTLMGTVFEKPLLDHLNALLAMGIALPGVVNLHYVAPEIFVYEGYVVISSGLFYQS

SEQ ID NO: 112 - protein, 1221 aa, Homo sapiens
MLRSTGFFRAIDCPYWSGAPGGPCRRPYCHFRHRGARGSGAPGDGGEAPPAAGLGYDPYNPELPKPPAQRENGTLGLGEEPRPDVLELELVNQAIEAVRSEVELEQRRYRELLETTREHRSAEAPALAPRGPNASPTVGPDEDAFPLAFDYSPGSHGLLSPDAGYQPTPLAAPAEPGSKYSLASLDRGQGRGGGGGGALEYVPKAVSQPRRHSRPVPSGKYVVDNSRPPTDLEYDPLSNYSARHLSRASSRDERAAKRPRGSRGSEPYTPAPKKLCDPFGSCDARFSDSEDEAATVPGNEPTTASTPKARADPEIKATGQPPSKEGLEAEGGGLRETKETAVQCDVGDLQPPPAKPASPAQVQSSQDGGCPKEGKPKKKKTGAPPAPSCKDGAQGKDKTKDKGRGRPVEKPRADKKGPQASSPRRKAERPEGTKKKPSSATPVATSGKGRPDRPARRPSPTSGDSRPAAGRGPPRPLQLPDRKSTKAPSGKLVERKARSLDEGASQDAPKLKKRALSHADLFGDESEDEAAGPGVPSVWPSALPSLSSDSDSDSDSSLGFPEAQGPPKRLKASPPPSPAPSSSSSSSSSTSSAGADVDYSALEKEVDFDSDPMEECLRIFNESTSVKTEDRGRLARQPPKEEKSEEKGLSGLTTLFPGQKRRISHLSKQGQEVEPPRRGPAVPPARPPTAQEVCYLRAQQAQRASASLLQAPARLAEKSPSVHISAPGEKRRIAHIPNPRLAAAPTGAKRTLAASGSQSSNGPEPGGQQLKTRTLSGMASKTTTTIIPKRIAHSPSLQSLKKPIIPKEFGGKVPTVIRQRYLNLFIEECLKFCTSNQEAIEKALNEEKVAYDRSPSKNIYLNVAVNTLKKLRGLAPSAVPGLSKTSGRRVVSHEVVLGGRLAAKTSFSLSRPSSPRVEDLKGAALYSRLREYLLTQDQLKENGYPFPHPERPGGAIIFTAEEKRPKDSSCRTCCRCGTEYLVSSSGRCIRDEECYYHWGRLRRNRVAGGWETQYMCCSAAAGSVGCQVAKQHVQDGRKERLEGFVKTFEKELSGDTHPGIYALDCEMSYTTYGLELTRVTVVDTDVHVVYDTFVKPDNEIVDYNTRFSGVTEADLADTSVTLRDVQAVLLSMFSADTILIGHSLESDLLALKVIHSTVVDTSVLFPHRLGLPYKRSLRNLMADYLRQIIQDNVDGHSSSEDAGACMHLVIWKVREDAKTKR

SEQ ID NO: 113 - protein, 931 aa, Homo sapiens
MAARDSDSEEDLVSYGTGLEPLEEGERPKKPIPLQDQTVRDEKGRYKRFHGAFSGGFSAGYFNTVGSKEGWTPSTFVSSRQNRADKSVLGPEDFMDEEDLSEFGIAPKAIVTTDDFASKTKDRIREKARQLAAATAPIPGATLLDDLITPAKLSVGFELLRKMGWKEGQGVGPRVKRRPRRQKPDPGVKIYGCALPPGSSEGSEGEDDDYLPDNVTFAPKDVTPVDFTPKDNVHGLAYKGLDPHQALFGTSGEHFNLFSGGSERAGDLGEIGLNKGRKLGISGQAFGVGALEEEDDDIYATETLSKYDTVLKDEEPGDGLYGWTAPRQYKNQKESEKDLRYVGKILDGFSLASKPLSSKKIYPPPELPRDYRPVHYFRPMVAATSENSHLLQVLSESAGKATPDPGTHSKHQLNASKRAELLGETPIQGSATSVLEFLSQKDKERIKEMKQATDLKAAQLKARSLAQNAQSSRAQLSPAAAAGHCSWNMALGGGTATLKASNFKPFAKDPEKQKRYDEFLVHMKQGQKDALERCLDPSMTEWERGRERDEFARAALLYASSHSTLSSRFTHAKEEDDSDQVEVPRDQENDVGDKQSAVKMKMFGKLTRDTFEWHPDKLLCKRFNVPDPYPDSTLVGLPRVKRDKYSVFNFLTLPETASLPTTQASSEKVSQHRGPDKSRKPSRWDTSKHEKKEDSISEFLSLARSKAEPPKQQSSPLVNKEEEHAPELSANQTVNKDVDAQAEGEGSRPSMDLFRAIFASSSDEKSSSSEDEQGDSEDDQAGSGEANFQSSQDTDLGETSSVAHALVPAPQEPPPSFPIQKMQIDEREEFGPRLPPVFCPNARQTLEVPQKEKHKKNKDKHKAKKEHRRKKEKKKKHRKHKHKGKQKNKKPEKSSSSESSDSSDSQSDEETADVSPQELLRRLKSLPLRRQ

SEQ ID NO: 114 - protein, 810 aa, Homo sapiens
MQKDARREGNMKVLQEPTCVSDYMSISTCEWKMNGPTNCSTELRLLYQLVFLLSEAHTCIPENNGGAGCVCHLLMDDVVSADNYTLDLWAGQQLLWKGSFKPSEHVKPRAPGNLTVHTNVSDTLLLTWSNPYPPDNYLYNHLTYAVNIWSENDPADFRIYNVTYLEPSLRIAASTLKSGISYRARVRAWAQCYNTTWSEWSPSTKWHNSYREPFEQHLLLGVSVSCIVILAVCLLCYVSITKIKKEWWDQIPNPARSRLVAIIIQDAQGSQWEKRSRGQEPAKCPHWKNCLTKLLPCFLEHNMKRDEDPHKAAKEMPFQGSGKSAWCPVEISKTVLWPESISVVRCVELFEAPVECEEEEEVEEEKGSFCASPESSRDDFQEGREGIVARLTESLFLDLLGEENGGFCQQDMGESCLLPPSGSTSAHMPWDEFPSAGPKEAPPWGKEQPLHLEPSPPASPTQSPDNLTCTETPLVIAGNPAYRSFSNSLSQSPCPRELGPDPLLARHLEEVEPEMPCVPQLSEPTTVPQPEPETWEQILRRNVLQHGAAAAPVSAPTSGYQEFVHAVEQGGTQASAVVGLGPPGEAGYKAFSSLLASSAVSPEKCGFGASSGEEGYKPFQDLIPGCPGDPAPVPVPLFTFGLDREPPRSPQSSHLPSSSPEHLGLEPGEKVEDMPKPPLPQEQATDPLVDSLGSGIVYSALTCHLCGHLKQCHGQEDGGQTPVMASPCCGCCCGDRSSPPTTPLRAPDPSPGGVPLEASLCPASLAPSGISEKSKSSSSFHPAPGNAQSSSQTPKIVNFVSVGPTYMRVS

SEQ ID NO: 115 - protein, 624 aa, Homo sapiens
MQPDPRPSGAGACCRFLPLQSQCPEGAGDAVMYASTECKAEVTPSQHGNRTFSYTLEDHTKQAFGIMNELRLSQQLCDVTLQVKYQDAPAAQFMAHKVVLASSSPVFKAMFTNGLREQGMEVVSIEGIHPKVMERLIEFAYTASISMGEKCVLHVMNGAVMYQIDSVVRACSDFLVQQLDPSNAIGIANFAEQIGCVELHQRAREYIYMHFGEVAKQEEFFNLSHCQLVTLISRDDLNVRCESEVFHACINWVKYDCEQRRFYVQALLRAVRCHSLTPNFLQMQLQKCEILQSDSRCKDYLVKIFEELTLHKPTQVMPCRAPKVGRLIYTAGGYFRQSLSYLEAYNPSDGTWLRLADLQVPRSGLAGCVVGGLLYAVGGRNNSPDGNTDSSALDCYNPMTNQWSPCAPMSVPRNRIGVGVIDGHIYAVGGSHGCIHHNSVERYEPERDEWHLVAPMLTRRIGVGVAVLNRLLYAVGGFDGTNRLNSAECYYPERNEWRMITAMNTIRSGAGVCVLHNCIYAAGGYDGQDQLNSVERYDVETETWTFVAPMKHRRSALGITVHQGRIYVLGGYDGHTFLDSVECYDPDTDTWSEVTRMTSGRSGVGVAVTMEPCRKQIDQQNCTC

SEQ ID NO: 116 - protein, 339 aa, Homo sapiens
MANLDKYTETFKMGSNSTSTAEIYCNVTNVKFQYSLYATTYILIFIPGLLANSAALWVLCRFISKKNKAIIFMINLSVADLAHVLSLPLRIYYYISHHWPFQRALCLLCFYLKYLNMYASICFLTCISLQRCFFLLKPFRARDWKRRYDVGISAAIWIVVGTACLPFPILRSTDLNNNKSCFADLGYKQMNAVALVGMITVAELAGFVIPVIIIAWCTWKTTISLRQPPMAFQGISERQKALRMVFMCAAVFFICFTPYHINFIFYTMVKETIISSCPVVRIALYFHPFCLCLASLCCLLDPILYYFMASEFRDQLSRHGSSVTRSRLMSKESGSSMIG

SEQ ID NO: 117 - protein, 1735 aa, Homo sapiens
MSVSRTMEDSCELDLVYVTERIIAVSFPSTANEENFRSNLREVAQMLKSKHGGNYLLFNLSERRPDITKLHAKVLEFGWPDLHTPALEKICSICKAMDTWLNADPHNVVVLHNKGNRGRIGVVIAAYMHYSNISASADQALDRFAMKRFYEDKIVPIGQPSQRRYVHYFSGLLSGSIKMNNKPLFLHHVIMHGIPNFESKGGCRPFLRIYQAMQPVYTSGIYNIPGDSQTSVCITIEPGLLLKGDILLKCYHKKFRSPARDVIFRVQFHTCAIHDLGVVFGKEDLDDAFKDDRFPEYGKVEFVFSYGPEKIQGMEHLENGPSVSVDYNTSDPLIRWDSYDNFSGHRDDGMEEVVGHTQGPLDGSLYAKVKKKDSLHGSTGAVNATRPTLSATPNHVEHTLSVSSDSGNSTASTKTDKTDEPVPGASSATAALSPQEKRELDRLLSGFGLEREKQGAMYHTQHLRSRPAGGSAVPSSGRHVVPAQVHVNGGALASERETDILDDELPNQDGHSAGSMGTLSSLDGVTNTSEGGYPEALSPLTNGLDKSYPMEPMVNGGGYPYESASRAGPAHAGHTAPMRPSYSAQEGLAGYQREGPHPAWPQPVTTSHYAHDPSGMFRSQSFSEAEPQLPPAPVRGGSSREAVQRGLNSWQQQQQQQQQPRPPPRQQERAHLESLVASRPSPQPLAETPIPSLPEFPRAASQQEIEQSIETLNMLMLDLEPASAAAPLHKSQSVPGAWPGASPLSSQPLSGSSRQSHPLTQSRSGYIPSGHSLGTPEPAPRASLESVPPGRSYSPYDYQPCLAGPNQDFHSKSPASSSLPAFLPTTHSPPGPQQPPASLPGLTAQPLLSPKEATSDPSRTPEEEPLNLEGLVAHRVAGVQAREKQPAEPPAPLRRRAASDGQYENQSPEATSPRSPGVRSPVQCVSPELALTIALNPGGRPKEPHLHSYKEAFEEMEGTSPSSPPPSGVRSPPGLAKTPLSALGLKPHNPADILLHPTGVTRRRIQPEEDEGKVVVRLSEEPRSYVESVARTAVAGPRAQDSEPKSFSAPATQAYGHEIPLRNGTLGGSFVSPSPLSTSSPILSADSTSVGSFPSGESSDQGPRTPTQPLLESGFRSGSLGQPSPSAQRNYQSSSPLPTVGSSYSSPDYSLQHFSSSPESQARAQFSVAGVHTVPGSPQARHRTVGTNTPPSPGFGWRAINPSMAAPSSPSLSHHQMMGPPGTGFHGSTVSSPQSSAATTPGSPSLCRHPAGVYQVSGLHNKVATTPGSPSLGRHPGAHQGNLASGLHSNAIASPGSPSLGRHLGGSGSVVPGSPCLDRHVAYGGYSTPEDRRPTLSRQSSASGYQAPSTPSFPVSPAYYPGLSSPATSPSPDSAAFRQGSPTPALPEKRRMSVGDRAGSLPNYATINGKVSSPVASGMSSPSGGSTVSFSHTLPDFSKYSMPDNSPETRAKVKFVQDTSKYWYKPEISREQAIALLKDQEPGAFIIRDSHSFRGAYGLAMKVSSPPPTIMQQNKKGDMTHELVRHFLIETGPRGVKLKGCPNEPNFGSLSALVYQHSIIPLALPCKLVIPNRDPTDESKDSSGPANSTADLLKQGAACNVLFVNSVDMESLTGPQAISKATSETLAADPTPAATIVHFKVSAQGITLTDNQRKLFFRRHYPLNTVTFCDLDPQERKWMKTEGGAPAKLFGFVARKQGSTTDNACHLFAELDPNQPASAIVNFVSKVMLNAGQKR

SEQ ID NO: 118 - protein, 427 aa, Homo sapiens
MGAGATGRAMDGPRLLLLLLLGVSLGGAKEACPTGLYTHSGECCKACNLGEGVAQPCGANQTVCEPCLDSVTFSDVVSATEPCKPCTECVGLQSMSAPCVEADDAVCRCAYGYYQDETTGRCEACRVCEAGSGLVFSCQDKQNTVCEECPDGTYSDEANHVDPCLPCTVCEDTERQLRECTRWADAECEEIPGRWITRSTPPEGSDSTAPSTQEPEAPPEQDLIASTVAGVVTTVMGSSQPVVTRGTTDNLIPVYCSILAAVVVGLVAYIAFKRWNSCKQNKQGANSRPVNQTPPPEGEKLHSDSGISVDSQSLHDQQPHTQTASGQALKGDGGLYSSLPPAKREEVEKLLNGSAGDTWRHLAGELGYQPEHIDSFTHEACPVRALLASWATQDSATLDALLAALRRIQRADLVESLCSESTATSPV

SEQ ID NO: 119 - protein, 6669 aa, Homo sapiens
MADDEDYEEVVEYYTEEVVYEEVPGETITKIYETTTTRTSDYEQSETSKPALAQPALAQPASAKPVERRKVIRKKVDPSKFMTPYIAHSQKMQDLFSPNKYKEKFEKTKGQPYASTTDTPELRRIKKVQDQLSEVKYRMDGDVAKTICHVDEKAKDIEHAKKVSQQVSKVLYKQNWEDTKDKYLLPPDAPELVQAVKNTAMFSKKLYTEDWEADKSLFYPYNDSPELRRVAQAQKALSDVAYKKGLAEQQAQFTPLADPPDIEFAKKVTNQVSKQKYKEDYENKIKGKWSETPCFEVANARMNADNISTRKYQEDFENMKDQIYFMQTETPEYKMNKKAGVAASKVKYKEDYEKNKGKADYNVLPASENPQLRQLKAAGDALSDKLYKENYEKTKAKSINYCETPKFKLDTVLQNFSSDKKYKDSYLKDILGHYVGSFEDPYHSHCMKVTAQNSDKNYKAEYEEDRGKGFFPQTITQEYEAIKKLDQCKDHTYKVHPDKTKFTQVTDSPVLLQAQVNSKQLSDLNYKAKHESEKFKCHIPPDTPAFIQHKVNAYNLSDNLYKQDWEKSKAKKFDIKVDAIPLLAAKANTKNTSDVMYKKDYEKNKGKMIGVLSINDDPKMLHSLKVAKNQSDRLYKENYEKTKAKSMNYCETPKYQLDTQLKNFSEARYKDLYVKDVLGHYVGSMEDPYHTHCMKVAAQNSDKSYKAEYEEDKGKCYFPQTITQEYEAIKKLDQCKDHTYKVHPDKTKFTAVTDSPVLLQAQLNTKQLSDLNYKAKHEGEKFKCHIPADAPQFIQHRVNAYNLSDNVYKQDWEKSKAKKFDIKVDAIPLLAAKANTKNTSDVMYKKDYEKSKGKMIGALSINDDPKMLHSLKTAKNQSDREYRKDYEKSKTIYTAPLDMLQVTQAKKSQAIASDVDYKHILHSYSYPPDSINVDLAKKAYALQSDVEYKADYNSWMKGCGWVPFGSLEMEKAKRASDILNEKKYRQHPDTLKFTSIEDAPITVQSKINQAQRSDIAYKAKGEEIIHKYNLPPDLPQFIQAKVNAYNISENMYKADLKDLSKKGYDLRTDAIPIRAAKAARQAASDVQYKKDYEKAKGKMVGFQSLQDDPKLVHYMNVAKIQSDREYKKDYEKTKSKYNTPHDMFNVVAAKKAQDVVSNVNYKHSLHHYTYLPDAMDLELSKNMMQIQSDNVYKEDYNNWMKGIGWIPIGSLDVEKVKKAGDALNEKKYRQHPDTLKFTSIVDSPVMVQAKQNTKQVSDILYKAKGEDVKHKYTMSPDLPQFLQAKCNAYNISDVCYKRDWYDLIAKGNNVLGDAIPITAAKASRNIASDYKYKEAYEKSKGKHVGFRSLQDDPKLVHYMNVAKLQSDREYKKNYENTKTSYHTPGDMVSITAAKMAQDVATNVNYKQPLHHYTYLPDAMSLEHTRNVNQIQSDNVYKDEYNSFLKGIGWIPIGSLEVEKVKKAGDALNERKYRQHPDTVKFTSVPDSMGMVLAQHNTKQLSDLNYKVEGEKLKHKYTIDPELPQFIQAKVNALNMSDAHYKADWKKTIAKGYDLRPDAIPIVAAKSSRNIASDCKYKEAYEKAKGKQVGFLSLQDDPKLVHYMNVAKIQSDREYKKGYEASKTKYHTPLDMVSVTAAKKSQEVATNANYRQSYHHYTLLPDALNVEHSRNAMQIQSDNLYKSDFTNWMKGIGWVPIESLEVEKAKKAGEILSEKKYRQHPEKLKFTYAMDTMEQALNKSNKLNMDKRLYTEKWNKDKTTIHVMPDTPDILLSRVNQITMSDKLYKAGWEEEKKKGYDLRPDAIAIKAARASRDIASDYKYKKAYEQAKGKHIGFRSLEDDPKLVHFMQVAKMQSDREYKKGYEKSKTSFHTPVDMLSVVAAKKSQEVATNANYRNVIHTYNMLPDAMSFELAKNMMQIQSDNQYKADYADFMKGIGWLPLGSLEAEKNKKAMEIISEKKYRQHPDTLKYSTLMDSMNMVLAQNNAKIMNEHLYKQAWEADKTKVHIMPDIPQIILAKANAINMSDKLYKLSLEESKKKGYDLRPDAIPIKAAKASRDIASDYKYKYNYEKGKGKMVGFRSLEDDPKLVHSMQVAKMQSDREYKKNYENTKTSYHTPADMLSVTAAKDAQANITNTNYKHLIHKYILLPDAMNIELTRNMNRIQSDNEYKQDYNEWYKGLGWSPAGSLEVEKAKKATEYASDQKYRQHPSNFQFKKLTDSMDMVLAKQNAHTMNKHLYTIDWNKDKTKIHVMPDTPDILQAKQNQTLYSQKLYKLGWEEALKKGYDLPVDAISVQLAKASRDIASDYKYKQGYRKQLGHHVGFRSLQDDPKLVLSMNVAKMQSEREYKKDFEKWKTKFSSPVDMLGVVLAKKCQELVSDVDYKNYLHQWTCLPDQNDVVQAKKVYELQSENLYKSDLEWLRGIGWSPLGSLEAEKNKRASEIISEKKYRQPPDRNKFTSIPDAMDIVLAKTNAKNRSDRLYREAWDKDKTQIHIMPDTPDIVLAKANLINTSDKLYRMGYEELKRKGYDLPVDAIPIKAAKASREIASEYKYKEGFRKQLGHHIGARNIEDDPKMMWSMHVAKIQSDREYKKDFEKWKTKFSSPVDMLGVVLAKKCQTLVSDVDYKNYLHQWTCLPDQSDVIHARQAYDLQSDNLYKSDLQWLKGIGWMTSGSLEDEKNKRATQILSDHVYRQHPDQFKFSSLMDSIPMVLAKNNAITMNHRLYTEAWDKDKTTVHIMPDTPEVLLAKQNKVNYSEKLYKLGLEEAKRKGYDMRVDAIPIKAAKASRDIASEFKYKEGYRKQLGHHIGARAIRDDPKMMWSMHVAKIQSDREYKKDFEKWKTKFSSPVDMLGVVLAKKCQTLVSDVDYKNYLHQWTCLPDQSDVIHARQAYDLQSDNMYKSDLQWMRGIGWVSIGSLDVEKCKRATEILSDKIYRQPPDRFKFTSVTDSLEQVLAKNNAITMNKRLYTEAWDKDKTQIHIMPDTPEIMLARQNKINYSETLYKLANEEAKKKGYDLRSDAIPIVAAKASRDVISDYKYKDGYRKQLGHHIGARNIEDDPKMMWSMHVAKIQSDREYKKDFEKWKTKFSSPVDMLGVVLAKKCQTLVSDVDYKNYLHEWTCLPDQNDVIHARQAYDLQSDNIYKSDLQWLRGIGWVPIGSMDVVKCKRAAEILSDNIYRQPPDKLKFTSVTDSLEQVLAKNNALNMNKRLYTEAWDKDKTQVHIMPDTPEIMLARQNKINYSESLYRQAMEEAKKEGYDLRSDAIPIVAAKASRDIASDYKYKEAYRKQLGHHIGARAVHDDPKIMWSLHIAKVQSDREYKKDFEKYKTRYSSPVDMLGIVLAKKCQTLVSDVDYKHPLHEWICLPDQNDIIHARKAYDLQSDNLYKSDLEWMKGIGWVPIDSLEVVRAKRAGELLSDTIYRQRPETLKFTSITDTPEQVLAKNNALNMNKRLYTEAWDNDKKTIHVMPDTPEIMLAKLNRINYSDKLYKLALEESKKEGYDLRLDAIPIQAAKASRDIASDYKYKEGYRKQLGHHIGARNIKDDPKMMWSIHVAKIQSDREYKKEFEKWKTKFSSPVDMLGVVLAKKCQILVSDIDYKHPLHEWTCLPDQNDVIQARKAYDLQSDAIYKSDLEWLRGIGWVPIGSVEVEKVKRAGEILSDRKYRQPADQLKFTCITDTPEIVLAKNNALTMSKHLYTEAWDADKTSIHVMPDTPDILLAKSNSANISQKLYTKGWDESKMKDYDLRADAISIKSAKASRDIASDYKYKEAYEKQKGHHIGAQSIEDDPKIMCAIHAGKIQSEREYKKEFQKWKTKFSSPVDMLSILLAKKCQTLVTDIDYRNYLHEWTCMPDQNDIIQAKKAYDLQSDALYKADLEWLRGIGWMPQGSPEVLRVKNAQNIFCDSVYRTPVVNLKYTSIVDTPEVVLAKSNAENISIPKYREVWDKDKTSIHIMPDTPEINLARANALNVSNKLYREGWDEMKAGCDVRLDAIPIQAAKASREIASDYKYKLDHEKQKGHYVGTLTARDDNKIRWALIADKLQNEREYRLDWAKWKAKIQSPVDMLSILHSKNSQALVSDMDYRNYLHQWTCMPDQNDVIQAKKAYELQSDNVYKADLEWLRGIGWMPNDSVSVNHAKHAADIFSEKKYRTKIETLNFTPVDDRVDYVTAKQSGEILDDIKYRKDWNATKSKYTLTETPLLHTAQEAARILDQYLYKEGWERQKATGYILPPDAVPFVHAHHCNDVQSELKYKAEHVKQKGHYVGVPTMRDDPKLVWFEHAGQIQNERLYKEDYHKTKAKINIPADMVSVLAAKQGQTLVSDIDYRNYLHQWMCHPDQNDVIQARKAYDLQSDNVYRADLEWLRGIGWIPLDSVDHVRVTKNQEMMSQIKYKKNALENYPNFRSVVDPPEIVLAKINSVNQSDVKYKETFNKAKGKYTFSPDTPHISHSKDMGKLYSTILYKGAWEGTKAYGYTLDERYIPIVGAKHADLVNSELKYKETYEKQKGHYLAGKVIGEFPGVVHCLDFQKMRSALNYRKHYEDTKANVHIPNDMMNHVLAKRCQYILSDLEYRHYFHQWTSLLEEPNVIRVRNAQEILSDNVYKDDLNWLKGIGCYVWDTPQILHAKKSYDLQSQLQYTAAGKENLQNYNLVTDTPLYVTAVQSGINASEVKYKENYHQIKDKYTTVLETVDYDRTRNLKNLYSSNLYKEAWDRVKATSYILPSSTLSLTHAKNQKHLASHIKYREEYEKFKALYTLPRSVDDDPNTARCLRVGKLNIDRLYRSVYEKNKMKIHIVPDMVEMVTAKDSQKKVSEIDYRLRLHEWICHPDLQVNDHVRKVTDQISDIVYKDDLNWLKGIGCYVWDTPEILHAKHAYDLRDDIKYKAHMLKTRNDYKLVTDTPVYVQAVKSGKQLSDAVYHYDYVHSVRGKVAPTTKTVDLDRALHAYKLQSSNLYKTSLRTLPTGYRLPGDTPHFKHIKDTRYMSSYFKYKEAYEHTKAYGYTLGPKDVPFVHVRRVNNVTSERLYRELYHKLKDKIHTTPDTPEIRQVKKTQEAVSELIYKSDFFKMQGHMISLPYTPQVIHCRYVGDITSDIKYKEDLQVLKGFGCFLYDTPDMVRSRHLRKLWSNYLYTDKARKMRDKYKVVLDTPEYRKVQELKTHLSELVYRAAGKKQKSIFTSVPDTPDLLRAKRGQKLQSQYLYVELATKERPHHHAGNQTTALKHAKDVKDMVSEKKYKIQYEKMKDKYTPVPDTPILIRAKRAYWNASDLRYKETFQKTKGKYHTVKDALDIVYHRKVTDDISKIKYKENYMSQLGIWRSIPDRPEHFHHRAVTDTVSDVKYKEDLTWLKGIGCYAYDTPDFTLAEKNKTLYSKYKYKEVFERTKSDFKYVADSPINRHFKYATQLMNEKKYRADYEQRKDKYHLVVDEPRHLLAKTAGDQISQIKYRKNYEKSKDKFTSIVDTPEHLRTTKVNKQISDILYKLEYNKAKPRGYTTIHDTPMLLHVRKVKDEVSDLKYKEVYQRNKSNCTIEPDAVHIKAAKDAYKVNTNLDYKKQYEANKAHWKWTPDRPDFLQAAKSSLQQSDFEYKLDREFLKGCKLSVTDDKNTVLALRNTLIESDLKYKEKHVKERGTCHAVPDTPQILLAKTVSNLVSENKYKDHVKKHLAQGSYTTLPETRDTVHVKEVTKHVSDTNYKKKFVKEKGKSNYSIMLEPPEVKHAMEVAKKQSDVAYRKDAKENLHYTTVADRPDIKKATQAAKQASEVEYRAKHRKEGSHGLSMLGRPDIEMAKKAAKLSSQVKYRENFDKEKGKTPKYNPKDSQLYKVMKDANNLASEVKYKADLKKLHKPVTDMKESLIMNHVLNTSQLASSYQYKKKYEKSKGHYHTIPDNLEQLHLKEATELQSIVKYKEKYEKERGKPMLDFETPTYITAKESQQMQSGKEYRKDYEESIKGRNLTGLEVTPALLHVKYATKIASEKEYRKDLEESIRGKGLTEMEDTPDMLRAKNATQILNEKEYKRDLELEVKGRGLNAMANETPDFMRARNATDIASQIKYKQSAEMEKANFTSVVDTPEIIHAQQVKNLSSQKKYKEDAEKSMSYYETVLDTPEIQRVRENQKNFSLLQYQCDLKNSKGKITVVQDTPEILRVKENQKNFSSVLYKEDVSPGTAIGKTPEMMRVKQTQDHISSVKYKEAIGQGTPIPDLPEVKRVKETQKHISSVMYKENLGTGIPTTVTPEIERVKRNQENFSSVLYKENLGKGIPTPITPEMERVKRNQENFSSVLYKENMGKGTPLAVTPEMERVKHNQENISSVLYKENVGKATATPVTPEMQRVKRNQENISSVLYKENLGKATPTPFTPEMERVKRNQENFSSVLYKENMRKATPTPVTPEMERAKRNQENISSVLYSDSFRKQIQGKAAYVLDTPEMRRVRETQRHISTVKYHEDFEKHKGCFTPVVTDPITERVKKNMQDFSDINYRGIQRKVVEMEQKRNDQDQETITGLRVWRTNPGSVFDYDPAEDNIQSRSLHMINVQAQRRSREQSRSASALSISGGEEKSEHSEAPDHHLSTYSDGGVFAVSTAYKHAKTTELPQQRSSSVATQQTTVSSIPSHPSTAGKIFRAMYDYMAADADEVSFKDGDAIINVQAIDEGWMYGTVQRTGRTGMLPANYVEAI

SEQ ID NO: 120 - protein, 604 aa, Homo sapiens
MMRAVWEALAALAAVACLVGAVRGGPGLSMFAGQAAQPDPCSDENGHPRRCIPDFVNAAFGKDVRVSSTCGRPPARYCVVSERGEERLRSCHLCNASDPKKAHPPAFLTDLNNPHNLTCWQSENYLQFPHNVTLTLSLGKKFEVTYVSLQFCSPRPESMAIYKSMDYGRTWVPFQFYSTQCRKMYNRPHRAPITKQNEQEAVCTDSHTDMRPLSGGLIAFSTLDGRPSAHDFDNSPVLQDWVTATDIRVAFSRLHTFGDENEDDSELARDSYFYAVSDLQVGGRCKCNGHAARCVRDRDDSLVCDCRHNTAGPECDRCKPFHYDRPWQRATAREANECVACNCNLHARRCRFNMELYKLSGRKSGGVCLNCRHNTAGRHCHYCKEGYYRDMGKPITHRKACKACDCHPVGAAGKTCNQTTGQCPCKDGVTGITCNRCAKGYQQSRSPIAPCIKIPVAPPTTAASSVEEPEDCDSYCKASKGKLKINMKKYCKKDYAVQIHILKADKAGDWWKFTVNIISVYKQGTSRIRRGDQSLWIRSRDIACKCPKIKPLKKYLLLGNAEDSPDQSGIVADKSSLVIQWRDTWARRLRKFQQREKKGKCKKA

SEQ ID NO: 121 - protein, 1431 aa, Homo sapiens
MDRRNDYGYRVPLFQGPLPPPGSLGLPFPPDIQTETTEEDSVLLMHTLLAATKDSLAMDPPVVNRPKKSKTKKAPIKTITKAAPAAPPVPAANEIATNKPKITWQALNLPVITQISQALPTTEVTNTQASSVTAQPKKANKMKRVTAKAAQGSQSPTGHEGGTIQLKSPLQVLKLPVISQNIHAPIANESASSQALITSIKPKKASKAKKAANKAIASATEVSLAATATHTATTQGQITNETASIHTTAASIRTKKASKARKTIAKVINTDTEHIEALNVTDAATRQIEASVVAIRPKKSKGKKAASRGPNSVSEISEAPLATQIVTNQALAATLRVKRGSRARKAATKARATESQTPNADQGAQAKIASAQTNVSALETQVAAAVQALADDYLAQLSLEPTTRTRGKRNRKSKHLNGDERSGSNYRRIPWGRRPAPPRDVAILQERANKLVKYLLVKDQTKIPIKRSDMLRDVIQEYDEYFPEIIERASYTLEKMFRVNLKEIDKQSSLYILISTQESSAGILGTTKDTPKLGLLMVILSVIFMNGNKASEAVIWEVLRKLGLRPGVRHSLFGEVRKLITDEFVKQKYLEYKRVPNSRPPEYEFFWGLRSYHETSKMKVLKFACRVQKKDPKDWAVQYREAVEMEVQAAAVAVAEAEARAEARAQMGIGEEAVAGPWNWDDMDIDCLTREELGDDAQAWSRFSFEIEARAQENADASTNVNFSRGASTRAGFSDGASISFNGAPSSSGGFSGGPGITFGVAPSTSASFSNTASISFGGTLSTSSSFSSAASISFGCAHSTSTSFSSEASISFGGMPCTSASFSGGVSSSFSGPLSTSATFSGGASSGFGGTLSTTAGFSGVLSTSTSFGSAPTTSTVFSSALSTSTGFGGILSTSVCFGGSPSSSGSFGGTLSTSICFGGSPCTSTGFGGTLSTSVSFGGSSSTSANFGGTLSTSICFDGSPSTGAGFGGALNTSASFGSVLNTSTGFGGAMSTSADFGGTLSTSVCFGGSPGTSVSFGSALNTNAGYGGAVSTNTDFGGTLSTSVCFGGSPSTSAGFGGALNTNASFGCAVSTSASFSGAVSTSACFSGAPITNPGFGGAFSTSAGFGGALSTAADFGGTPSNSIGFGAAPSTSVSFGGAHGTSLCFGGAPSTSLCFGSASNTNLCFGGPPSTSACFSGATSPSFCDGPSTSTGFSFGNGLSTNAGFGGGLNTSAGFGGGLGTSAGFSGGLSTSSGFDGGLGTSAGFGGGPGTSTGFGGGLGTSAGFSGGLGTSAGFGGGLVTSDGFGGGLGTNASFGSTLGTSAGFSGGLSTSDGFGSRPNASFDRGLSTIIGFGSGSNTSTGFTGEPSTSTGFSSGPSSIVGFSGGPSTGVGFCSGPSTSGFSGGPSTGAGFGGGPNTGAGFGGGPSTSAGFGSGAASLGACGFSYG

SEQ ID NO: 122 - protein, 418 aa, Homo sapiens
MIHSLFLINSSGDIFLEKHWKSVVSRSVCDYFFEAQERATEAENVPPVIPTPHHYLLSVYRHKIFFVAVIQTEVPPLFVIEFLHRVVDTFQDYFGVCSEPVIKDNVVVVYEVLEEMLDNGFPLATESNILKELIKPPTILRTVVNTITGSTNVGDQLPTGQLSVVPWRRTGVKYTNNEAYFDVIEEIDAIIDKSGSTITAEIQGVIDACVKLTGMPDLTLSFMNPRLLDDVSFHPCVRFKRWESERILSFIPPDGNFRLLSYHVSAQNLVAIPVYVKHNISFRDSSSLGRFEITVGPKQTMGKTIEGVTVTSQMPKGVLNMSLTPSQGTHTFDPVTKMLSWDVGKINPQKLPSLKGTMSLQAGASKPDENPTINLQFKIQQLAISGLKVNRLDMYGEKYKPFKGIKYMTKAGKFQVRT

SEQ ID NO: 123 - protein, 754 aa, Homo sapiens
MLPGCIFLMILLIPQVKEKFILGVEGQQLVRPKKLPLIQKRDTGHTHDDDILKTYEEELLYEIKLNRKTLVLHLLRSREFLGSNYSETFYSMKGEAFTRHPQIMDHCFYQGSIVHEYDSAASISTCNGLRGFFRINDQRYLIEPVKYSDEGEHLVFKYNLRVPYGANYSCTELNFTRKTVPGDNESEEDSKIKGIHDEKYVELFIVADDTVYRRNGHPHNKLRNRIWGMVNFVNMIYKTLNIHVTLVGIEIWTHEDKIELYSNIETTLLRFSFWQEKILKTRKDFDHVVLLSGKWLYSHVQGISYPGGMCLPYYSTSIIKDLLPDTNIIANRMAHQLGHNLGMQHDEFPCTCPSGKCVMDSDGSIPALKFSKCSQNQYHQYLKDYKPTCMLNIPFPYNFHDFQFCGNKKLDEGEECDCGPAQECTNPCCDAHTCVLKPGFTCAEGECCESCQIKKAGSICRPAKDECDFPEMCTGHSPACPKDQFRVNGFPCKNSEGYCFMGKCPTREDQCSELFDDEAIESHDICYKMNTKGNKFGYCKNKENRFLPCEEKDVRCGKIYCTGGELSSLLGEDKTYHLKDPQKNATVKCKTIFLYHDSTDIGLVASGTKCGEGMVCNNGECLNMEKVYISTNCPSQCNENPVDGHGLQCHCEEGQAPVACEETLHVTNITILVVVLVLVIVGIGVLILLVRYRKCIKLKQVQSPPTETLGVENKGYFGDEQQIRTEPILPEIHFLNKPASKDSRGIADPNQSAK

SEQ ID NO: 124 - protein, 561 aa, Homo sapiens
MCGIWALFGSDDCLSVQCLSAMKIAHRGPDAFRFENVNGYTNCCFGFHRLAVVDPLFGMQPIRVKKYPYLWLCYNGEIYNHKKMQQHFEFEYQTKVDGEIILHLYDKGGIEQTICMLDGVFAFVLLDTANKKVFLGRDTYGVRPLFKAMTEDGFLAVCSEAKGLVTLKHSATPFLKVEPFLPGHYEVLDLKPNGKVASVEMVKYHHCRDVPLHALYDNVEKLFPGFEIETVKNNLRILFNNAVKKRLMTDRRIGCLLSGGLDSSLVAATLLKQLKEAQVQYPLQTFAIGMEDSPDLLAARKVADHIGSEHYEVLFNSEEGIQALDEVIFSLETYDITTVRASVGMYLISKYIRKNTDSVVIFSGEGSDELTQGYIYFHKAPSPEKAEEESERLLRELYLFDVLRADRTTAAHGLELRVPFLDHRFSSYYLSLPPEMRIPKNGIEKHLLRETFEDSNLIPKEILWRPKEAFSDGITSVKNSWFKILQEYVEHQVDDAMMANAAQKFPFNTPKTKEGYYYRQVFERHYPGRADWLSHYWMPKWINATDPSARTLTHYKSAVKA

SEQ ID NO: 125 - protein, 485 aa, Homo sapiens
MELEVRRVRQAFLSGRSRPLRFRLQQLEALRRMVQEREKDILTAIAADLCKSEFNVYSQEVITVLGEIDFMLENLPEWVTAKPVKKNVLTMLDEAYIQPQPLGVVLIIGAWNYPFVLTIQPLIGAIAAGNAVIIKPSELSENTAKILAKLLPQYLDQDLYIVINGGVEETTELLKQRFDHIFYTGNTAVGKIVMEAAAKHLTPVTLELGGKSPCYIDKDCDLDIVCRRITWGKYMNCGQTCIAPDYILCEASLQNQIVWKIKETVKEFYGENIKESPDYERIINLRHFKRILSLLEGQKIAFGGETDEATRYIAPTVLTDVDPKTKVMQEEIFGPILPIVPVKNVDEAINFINEREKPLALYVFSHNHKLIKRMIDETSSGGVTGNDVIMHFTLNSFPFGGVGSSGMGAYHGKHSFDTFSHQRPCLLKSLKREGANKLRYPPNSQSKVDWGKFFLLKRFNKEKLGLLLLTFLGIVAAVLVKAEYY

SEQ ID NO: 126 - protein, 1244 aa, Homo sapiens
MNNQKVVAVLLQECKQVLDQLLLEAPDVSEEDKSEDQRCRALLPSELRTLIQEAKEMKWPFVPEKWQYKQAVGPEDKTNLKDVIGAGLQQLLASLRASILARDCAAAAAIVFLVDRFLYGLDVSGKLLQVAKGLHKLQPATPIAPQVVIRQARISVNSGKLLKAEYILSSLISNNGATGTWLYRNESDKVLVQSVCIQIRGQILQKLGMWYEAAELIWASIVGYLALPQPDKKGLSTSLGILADIFVSMSKNDYEKFKNNPQINLSLLKEFDHHLLSAAEACKLAAAFSAYTPLFVLTAVNIRGTCLLSYSSSNDCPPELKNLHLCEAKEAFEIGLLTKRDDEPVTGKQELHSFVKAAFGLTTVHRRLHGETGTVHAASQLCKEAMGKLYNFSTSSRSQDREALSQEVMSVIAQVKEHLQVQSFSNVDDRSYVPESFECRLDKLILHGQGDFQKILDTYSQHHTSVCEVFESDCGNNKNEQKDAKTGVCITALKTEIKNIDTVSTTQEKPHCQRDTGISSSLMGKNVQRELRRGGRRNWTHSDAFRVSLDQDVETETEPSDYSNGEGAVFNKSLSGSQTSSAWSNLSGFSSSASWEEVNYHVDDRSARKEPGKEHLVDTQCSTALSEELENDREGRAMHSLHSQLHDLSLQEPNNDNLEPSQNQPQQQMPLTPFSPHNTPGIFLAPGAGLLEGAPEGIQEVRNMGPRNTSAHSRPSYRSASWSSDSGRPKNMGTHPSVQKEEAFEIIVEFPETNCDVKDRQGKEQGEEISERGAGPTFKASPSWVDPEGETAESTEDAPLDFHRVLHNSLGNISMLPCSSFTPNWPVQNPDSRKSGGPVAEQGIDPDASTVDEEGQLLDSMDVPCTNGHGSHRLCILRQPPGQRAETPNSSVSGNILFPVLSEDCTTTEEGNQPGNMLNCSQNSSSSSVWWLKSPAFSSGSSEGDSPWSYLNSSGSSWVSLPGKMRKEILEARTLQPDDFEKLLAGVRHDWLFQRLENTGVFKPSQLHRAHSALLLKYSKKSELWTAQETIVYLGDYLTVKKKGRQRNAFWVHHLHQEEILGRYVGKDYKEQKGLWHHFTDVERQMTAQHYVTEFNKRLYEQNIPTQIFYIPSTILLILEDKTIKGCISVEPYILGEFVKLSNNTKVVKTEYKATEYGLAYGHFSYEFSNHRDVVVDLQGWVTGNGKGLIYLTDPQIHSVDQKVFTTNFGKRGIFYFFNNQHVECNEICHRLSLTRPSMEKPCT

SEQ ID NO: 127 - protein, 535 aa, Homo sapiens
MGIVEPGCGDMLTGTEPMPGSDEGRAPGADPQHRYFYPEPGAQDADERRGGGSLGSPYPGGALVPAPPSRFLGAYAYPPRPQAAGFPGAGESFPPPADAEGYQPGEGYAAPDPRAGLYPGPREDYALPAGLEVSGKLRVALNNHLLWSKFNQHQTEMIITKQGRRMFPFLSFTVAGLEPTSHYRMFVDVVLVDQHHWRYQSGKWVQCGKAEGSMPGNRLYVHPDSPNTGAHWMRQEVSFGKLKLTNNKGASNNVTQMIVLQSLHKYQPRLHIVEVNDGEPEAACNASNTHIFTFQETQFIAVTAYQNAEITQLKIDNNPFAKGFRENFESMYTSVDTSIPSPPGPNCQFLGGDHYSPLLPNQYPVPSRFYPDLPGQAKDVVPQAYWLGAPRDHSYEAEFRAVSMKPAFLPSAPGPTMSYYRGQEVLAPGAGWPVAPQYPPKMGPASWFRPMRTLPMEPGPGGSEGRGPEDQGPPLVWTEIAPIRPESSDSGLGEGDSKRRRVSPYPSSGDSSSPAGAPSPFDKEAEGQFYNYFPN

SEQ ID NO: 128 - protein, 448 aa, Homo sapiens
MLWLALGPFPAMENQVLVIRIKIPNSGAVDWTVHSGPQLLFRDVLDVIGQVLPEATTTAFEYEDEDGDRITVRSDEEMKAMLSYYYSTVMEQQVNGQLIEPLQIFPRACKPPGERNIHGLKVNTRAGPSQHSSPAVSDSLPSNSLKKSSAELKKILANGQMNEQDIRYRDTLGHGNGGTVYKAYHVPSGKILAVKVILLDITLELQKQIMSELEILYKCDSSYIIGFYGAFFVENRISICTEFMDGGSLDVYRKMPEHVLGRIAVAVVKGLTYLWSLKILHRDVKPSNMLVNTRGQVKLCDFGVSTQLVNSIAKTYVGTNAYMAPERISGEQYGIHSDVWSLGISFMELALGRFPYPQIQKNQGSLMPLQLLQCIVDEDSPVLPVGEFSEPFVHFITQCMRKQPKERPAPEELMGHPFIVQFNDGNAAVVSMWVCRALEERRSQQGPP

SEQ ID NO: 129 - protein, 423 aa, Homo sapiens
MKLCSLAVLVPIVLFCEQHVFAFQSGQVLAALPRTSRQVQVLQNLTTTYEIVLWQPVTADLIVKKKQVHFFVNASDVDNVKAHLNVSGIPCSVLLADVEDLIQQQISNDTVSPRASASYYEQYHSLNEIYSWIEFITERHPDMLTKIHIGSSFEKYPLYVLKVSGKEQAAKNAIWIDCGIHAREWISPAFCLWFIGHITQFYGIIGQYTNLLRLVDFYVMPVVNVDGYDYSWKKNRMWRKNRSFYANNHCIGTDLNRNFASKHWCEEGASSSSCSETYCGLYPESEPEVKAVASFLRRNINQIKAYISMHSYSQHIVFPYSYTRSKSKDHEELSLVASEAVRAIEKISKNTRYTHGHGSETLYLAPGGGDDWIYDLGIKYSFTIELRDTGTYGFLLPERYIKPTCREAFAAVSKIAWHVIRNV

SEQ ID NO: 130 - protein, 306 aa, Homo sapiens
MSTWKARLTKRLKSPSRSMHPFPCSALLACFGNTRESASFNQSGVADTHSTVRVQPVAKAGRQPRHPSAEGAPEKRQDSSTHAERNGSANRNSSHRTAAQPAETPEDVPGSLDDGADCEAVVFHASIPRPSIIDTPKEEEFREEPKCLELEQKMTSDSPPEDIDHKDSYLITRSIMAEPDYIEDDNPELIRPQKLINPVKTSRNHQDLHRELLMNQKRGLAPQNKPELQKVMEKRKRDQVIKQKEEEAQKKKSDLEIELLKRQQKLEQLELEKQKLQEEQENAPEFVKVKGNLRRTGQEVAQAQES

SEQ ID NO: 131 - protein, 1512 aa, Homo sapiens
MPSSSDTALGGGGGLSWAEKKLEERRKRRRFLSPQQPPLLLPLLQPQLLQPPPPPPPLLFLAAPGTAAAAAAAAAASSSCFSPGPPLEVKRLARGKRRAGGRQKRRRGPRAGQEAEKRRVFSLPQPQQDGGGGASSGGGVTPLVEYEDVSSQSEQGLLLGGASAATAATAAGGTGGSGGSPASSSGTQRRGEGSERRPRRDRRSSSGRSKERHREHRRRDGQRGGSEASKSRSRHSHSGEERAEVAKSGSSSSSGGRRKSASATSSSSSSRKDRDSKAHRSRTKSSKEPPSAYKEPPKAYREDKTEPKAYRRRRSLSPLGGRDDSPVSHRASQSLRSRKSPSPAGGGSSPYSRRLPRSPSPYSRRRSPSYSRHSSYERGGDVSPSPYSSSSWRRSRSPYSPVLRRSGKSRSRSPYSSRHSRSRSRHRLSRSRSRHSSISPSTLTLKSSLAAELNKNKKARAAEAARAAEAAKAAEATKAAEAAAKAAKASNTSTPTKGNTETSASASQTNHVKDVKKIKIEHAPSPSSGGTLKNDKAKTKPPLQVTKVENNLIVDKATKKAVIVGKESKSAATKEESVSLKEKTKPLTPSIGAKEKEQHVALVTSTLPPLPLPPMLPEDKEADSLRGNISVKAVKKEVEKKLRCLLADLPLPPELPGGDDLSKSPEEKKTATQLHSKRRPKICGPRYGETKEKDIDWGKRCVDKFDIIGIIGEGTYGQVYKARDKDTGEMVALKKVRLDNEKEGFPITAIREIKILRQLTHQSIINMKEIVTDKEDALDFKKDKGAFYLVFEYMDHDLMGLLESGLVHFNENHIKSFMRQLMEGLDYCHKKNFLHRDIKCSNILLNNRGQIKLADFGLARLYSSEESRPYTNKVITLWYRPPELLLGEERYTPAIDVWSCGCILGELFTKKPIFQANQELAQLELISRICGSPCPAVWPDVIKLPYFNTMKPKKQYRRKLREEFVFIPAAALDLFDYMLALDPSKRCTAEQALQCEFLRDVEPSKMPPPDLPLWQDCHELWSKKRRRQKQMGMTDDVSTIKAPRKDLSLGLDDSRTNTPQGVLPSSQLKSQGSSNVAPVKTGPGQHLNHSELAILLNLLQSKTSVNMADFVQVLNIKVNSETQQQLNKINLPAGILATGEKQTDPSTPQQESSKPLGGIQPSSQTIQPKVETDAAQAAVQSAFAVLLTQLIKAQQSKQKDVLLEERENGSGHEASLQLRPPPEPSTPVSGQDDLIQHQDMRILELTPEPDRPRILPPDQRPPEPPEPPPVTEEDLDYRTENQHVPTTSSSLTDPHAGVKAALLQLLAQHQPQDDPKREGGIDYQAGDTYVSTSDYKDNFGSSSFSSAPYVSNDGLGSSSAPPLERRSFIGNSDIQSLDNYSTASSHSGGPPQPSAFSESFPSSVAGYGDIYLNAGPMLFSGDKDHRFEYSHGPIAVLANSSDPSTGPESTHPLPAKMHNYNYGGNLQENPSGPSLMHGQTWTSPAQGPGYSQGYRGHISTSTGRGRGRGLPY

SEQ ID NO: 132 - protein, 320 aa, Homo sapiens
MGPWSRVRVAKCQMLVTCFFILLLGLSVATMVTLTYFGAHFAVIRRASLEKNPYQAVHQWAFSAGLSLVGLLTLGAVLSAAATVREAQGLMAGGFLCFSLAFCAQVQVVFWRLHSPTQVEDAMLDTYDLVYEQAMKGTSHVRRQELAAIQDVFLCCGKKSPFSRLGSTEADLCQGEEAAREDCLQGIRSFLRTHQQVASSLTSIGLALTVSALLFSSFLWFAIRCGCSLDRKGKYTLTPRACGRQPQEPSLLRCSQGGPTHCLHSEAVAIGPRGCSGSLRWLQESDAAPLPLSCHLAAHRALQGRSRGGLSGCPERGLSD

SEQ ID NO: 133 - protein, 261 aa, Homo sapiens
MSTTTCQVVAFLLSILGLAGCIAATGMDMWSTQDLYDNPVTSVFQYEGLWRSCVRQSSGFTECRPYFTILGLPAMLQAVRALMIVGIVLGAIGLLVSIFALKCIRIGSMEDSAKANMTLTSGIMFIVSGLCAIAGVSVFANMLVTNFWMSTANMYTGMGGMVQTVQTRYTFGAALFVGWVAGGLTLIGGVMMCIACRGLAPEETNYKAVSYHASGHSVAYKPGGFKASTGFGSNTKNKKIYDGGARTEDEVQSYPSKHDYV

SEQ ID NO: 134 - protein, 729 aa, Homo sapiens
MPTVISASVAPRTAAEPRSPGPVPHPAQSKATEAGGGNPSGIYSAIISRNFPIIGVKEKTFEQLHKKCLEKKVLYVDPEFPPDETSLFYSQKFPIQFVWKRPPEICENPRFIIDGANRTDICQGELGDCWFLAAIACLTLNQHLLFRVIPHDQSFIENYAGIFHFQFWRYGEWVDVVIDDCLPTYNNQLVFTKSNHRNEFWSALLEKAYAKLHGSYEALKGGNTTEAMEDFTGGVAEFFEIRDAPSDMYKIMKKAIERGSLMGCSIDTIIPVQYETRMACGLVRGHAYSVTGLDEVPFKGEKVKLVRLRNPWGQVEWNGSWSDRWKDWSFVDKDEKARLQHQVTEDGEFWMSYEDFIYHFTKLEICNLTADALQSDKLQTWTVSVNEGRWVRGCSAGGCRNFPDTFWTNPQYRLKLLEEDDDPDDSEVICSFLVALMQKNRRKDRKLGASLFTIGFAIYEVPKEMHGNKQHLQKDFFLYNASKARSKTYINMREVSQRFRLPPSEYVIVPSTYEPHQEGEFILRVFSEKRNLSEEVENTISVDRPVPQPGSSDQESEEQQQFRNIFKQIAGDDMEICADELKKVLNTVVNKHKDLKTHGFTLESCRSMIALMDTDGSGKLNLQEFHHLWNKIKAWQKIFKHYDTDQSGTINSYEMRNAVNDAGFHLNNQLYDIITMRYADKHMNIDFDSFICCFVRLEGMFRAFHAFDKDGDGIIKLNVLEWLQLTMYA

SEQ ID NO: 135 - protein, 1181 aa, Homo sapiens
MAAVQVVGSWPSVQPREAPREAIPERGNGFRLLSARLCALRPDDSSSARTEIHLLFDQLISENYSEGSGVAPEDVSALLVQACRLVPLNQNHLVSKVSQLIHHLLNRLQVIVDEQHLDFLLAYTISAIHQCSSWTHREILQALAALVYCNGSKCQKYLPELLGNTGLLMKLSDLAQSDPEVRRAAVHCMANLCLSVPGQPYLEEPYQNVCFQAFLTILQSPKSSDMDDITFCMLLQNALKGIQSLLNGGRMKLTQTDELGALLAVLKKFMFHGLPGLNIEMPTVLYPTPLPQYDGRTPIKPQQSESSASRPTLNKKKKSKVKPKKIQQGEEEEKESSGEIEAAPVTGTGRVNLHEGNTWCPSSLGVQSLPLDGSGAAEKDGVSSSFSSSSWKRVSSSESDFSDAEGGMQSKMRSYQAKVRQGALVCFLSTIKSIEKKVLYGYWSAFIPDTPELGSPQSVSLMTLTLKDPSPKTRACALQVLSAILEGSKQFLSVAEDTSDHRRAFTPFSVMIACSIRELHRCLLLALVAESSSQTVTQIIKCLANLVSNAPYDRLKLSLLTKVWNQIKPYIRHKDVNVRVSSLTLLGAIVSTHAPLPEVQLLLQQPCSSGLGNSNSATPHLSPPDWWKKAPAGPSLEETSVSSPKGSSEPCWLIRLCISIVVLPKEDSCSGSDAGSAAGSTYEPSPMRLEALQVLTLLARGYFSMTQAYLMELGEVICKCMGEADPSIQLHGAKLLEELGTGLIQQYKPDSTAAPDQRAPVFLVVMFWTMMLNGPLPRALQNSEHPTLQASACDALSSILPEAFSNLPNDRQMLCITVLLGLNDSKNRLVKAATSRALGVYVLFPCLRQDVIFVADAANAILMSLEDKSLNVRAKAAWSLGNLTDTLIVNMETPDPSFQEEFSGLLLLKMLRSAIEASKDKDKVKSNAVRALGNLLHFLQPSHIEKPTFAEIIEESIQALISTVLTEAAMKVRWNACYAMGNVFKNPALPLGTAPWTSQAYNALTSVVTSCKNFKVRIRSAAALSVPGKREQYGSVDQYARIWNALVTALQKSEDTIDFLEFKYCVSLRTQICQALIHLLSLASASDLPCMKETLELSGNMVQSYILQFLKSGAEGDDTGAPHSPQERDQMVRMALKHMGSIQAPTGDTARRAIMGFLEEILAVCFDSSGSQGALPGLTNQ

SEQ ID NO: 136 - protein, 709 aa, Homo sapiens
MSFPKAPLKRFNDPSGCAPSPGAYDVKTLEVLKGPVSFQKSQRFKQQKESKQNLNVDKDTTLPASARKVKSSESKIRVLLQERGAQDRRIQDLETELEKMEARLNAALREKTSLSANNATLEKQLIELTRTNELLKSKFSENGNQKNLRILSLELMKLRNKRETKMRGMMAKQEGMEMKLQVTQRSLEESQGKIAQLEGKLVSIEKEKIDEKSETEKLLEYIEEISCASDQVEKYKLDIAQLEENLKEKNDEILSLKQSLEENIVILSKQVEDLNVKCQLLEKEKEDHVNRNREHNENLNAEMQNLKQKFILEQQEREKLQQKELQIDSLLQQEKELSSSLHQKLCSFQEEMVKEKNLFEEELKQTLDELDKLQQKEEQAERLVKQLEEEAKSRAEELKLLEEKLKGKEAELEKSSAAHTQATLLLQEKYDSMVQSLEDVTAQFESYKALTASEIEDLKLENSSLQEKAAKAGKNAEDVQHQILATESSNQEYVRMLLDLQTKSALKETEIKEITVSFLQKITDLQNQLKQQEEDFRKQLEDEEGRKAEKENTTAELTEEINKWRLLYEELYNKTKPFQLQLDAFEVEKQALLNEHGAAQEQLNKIRDSYAKLLGHQNLKQKIKHVVKLKDENSQLKSEVSKLRCQLAKKKQSETKLQEELNKVLGIKHFDPSKAFHHESKENFALKTPLKEGNTNCYRAPMECQESWK

SEQ ID NO: 137 - protein, 1883 aa, Homo sapiens
MGKRAGGGATGATTAAVSTSAGAGLEPAAARSGGPRSAAAGLLGALHLVMTLVVAAARAEKEAFVQSESIIEVLRFDDGGLLQTETTLGLSSYQQKSISLYRGNCRPIRFEPPMLDFHEQPVGMPKMEKVYLHNPSSEETITLVSISATTSHFHASFFQNRKILPGGNTSFDVVFLARVVGNVENTLFINTSNHGVFTYQVFGVGVPNPYRLRPFLGARVPVNSSFSPIINIHNPHSEPLQVVEMYSSGGDLHLELPTGQQGGTRKLWEIPPYETKGVMRASFSSREADNHTAFIRIKTNASDSTEFIILPVEVEVTTAPGIYSSTEMLDFGTLRTQDLPKVLNLHLLNSGTKDVPITSVRPTPQNDAITVHFKPITLKASESKYTKVASISFDASKAKKPSQFSGKITVKAKEKSYSKLEIPYQAEVLDGYLGFDHAATLFHIRDSPADPVERPIYLTNTFSFAILIHDVLLPEEAKTMFKVHNFSKPVLILPNESGYIFTLLFMPSTSSMHIDNNILLITNASKFHLPVRVYTGFLDYFVLPPKIEERFIDFGVLSATEASNILFAIINSNPIELAIKSWHIIGDGLSIELVAVERGNRTTIISSLPEFEKSSLSDQSSVTLASGYFAVFRVKLTAKKLEGIHDGAIQITTDYEILTIPVKAVIAVGSLTCFPKHVVLPPSFPGKIVHQSLNIMNSFSQKVKIQQIRSLSEDVRFYYKRLRGNKEDLEPGKKSKIANIYFDPGLQCGDHCYVGLPFLSKSEPKVQPGVAMQEDMWDADWDLHQSLFKGWTGIKENSGHRLSAIFEVNTDLQKNIISKITAELSWPSILSSPRHLKFPLTNTNCSSEEEITLENPADVPVYVQFIPLALYSNPSVFVDKLVSRFNLSKVAKIDLRTLEFQVFRNSAHPLQSSTGFMEGLSRHLILNLILKPGEKKSVKVKFTPVHNRTVSSLIIVRNNLTVMDAVMVQGQGTTENLRVAGKLPGPGSSLRFKITEALLKDCTDSLKLREPNFTLKRTFKVENTGQLQIHIETIEISGYSCEGYGFKVVNCQEFTLSANASRDIIILFTPDFTASRVIRELKFITTSGSEFVFILNASLPYHMLATCAEALPRPNWELALYIIISGIMSALFLLVIGTAYLEAQGIWEPFRRRLSFEASNPPFDVGRPFDLRRIVGISSEGNLNTLSCDPGHSRGFCGAGGSSSRPSAGSHKQCGPSVHPHSSHSNRNSADVENVRAKNSSSTSSRTSAQAASSQSANKTSPLVLDSNTVTQGHTAGRKSKGAKQSQHGSQHHAHSPLEQHPQPPLPPPVPQPQEPQPERLSPAPLAHPSHPERASSARHSSEDSDITSLIEAMDKDFDHHDSPALEVFTEQPPSPLPKSKGKGKPLQRKVKPPKKQEEKEKKGKGKPQEDELKDSLADDDSSSTTTETSNPDTEPLLKEDTEKQKGKQAMPEKHESEMSQVKQKSKKLLNIKKEIPTDVKPSSLELPYTPPLESKQRRNLPSKIPLPTAMTSGSKSRNAQKTKGTSKLVDNRPPALAKFLPNSQELGNTSSSEGEKDSPPPEWDSVPVHKPGSSTDSLYKLSLQTLNADIFLKQRQTSPTPASPSPPAAPCPFVARGSYSSIVNSSSSSDPKIKQPNGSKHKLTKAASLPGKNGNPTFAAVTAGYDKSPGGNGFAKVSSNKTGFSSSLGISHAPVDSDGSDSSGLWSPVSNPSSPDFTPLNSFSAFGNSFNLTGEVFSKLGLSRSCNQASQRSWNEFNSGPSYLWESPATDPSPSWPASSGSPTHTATSVLGNTSGLWSTTPFSSSIWSSNLSSALPFTTPANTLASIGLMGTENSPAPHAPSTSSPADDLGQTYNPWRIWSPTIGRRSSDPWSNSHFPHEN

SEQ ID NO: 138 - protein, 812 aa, Homo sapiens
MSEQGDLNQAIAEEGGTEQETATPENGIVKSESLDEEEKLELQRRLEAQNQERRKSKSGAGKGKLTRSLAVCEESSARPGGESLQDQESIHLQLSSFSSLQEEDKSRKDDSEREKEKDKNKDKTSEKPKIRMLSKDCSQEYTDSTGIDLHEFLINTLKNNSRDRMILLKMEQEIIDFIADNNNHYKKFPQMSSYQRMLVHRVAAYFGLDHNVDQTGKSVIINKTSSTRIPEQRFCEHLKDEKGEESQKRFILKRDNSSIDKEDNQQNRMHPFRDDRRSKSIEEREEEYQRVRERIFAHDSVCSQESLFVENSRLLEDSNICNETYKKRQLFRGNRDGSGRTSGSRQSSSENELKWSDHQRAWSSTDSDSSNRNLKPAMTKTASFGGITVLTRGDSTSSTRSTGKLSKAGSESSSSAGSSGSLSRTHPPLQSTPLVSGVAAGSPGCVPYPENGIGGQVAPSSTSYILLPLEAATGIPPGSILLNPHTGQPFVNPDGTPAIYNPPTSQQPLRSAMVGQSQQQPPQQQPSPQPQQQVQPPQPQMAGPLVTQRDDVATQFGQMTLSRQSSGETPEPPSGPVYPSSLMPQPAQQPSYVIASTGQQLPTGGFSGSGPPISQQVLQPPPSPQGFVQQPPPAQMPVYYYPSGQYPTSTTQQYRPMAPVQYNAQRSQQMPQAAQQAGYQPVLSGQQGFQGLIGVQQPPQSQNVINNQQGTPVQSVMVSYPTMSSYQVPMTQGSQGLPQQSYQQPIMLPNQAGQGSLPATGMPVYCNVTPPTPQNNLRLIGPHCPSSTVPVMSASCRTNCASMSNAGWQVKF

SEQ ID NO: 139 - protein, 424 aa, Homo sapiens
MGPLSAPPCTQHITWKGLLLTASLLNFWNLPTTAQVIIEAKPPKVSEGKDVLLLVHNLPQNLTGYIWYKGQMTDLYHYITSYVVHGQIIYGPAYSGRETVYSNASLLIQNVTQEDAGSYTLHIIKRGDGTGGVTGYFTVTLYSETPKPSISSSNLNPREVMEAVRLICDPETPDASYLWLLNGQNLPMTHRLQLSKTNRTLYLFGVTKYIAGPYECEIRNPVSASRSDPVTLNLLPKLPMPYITINNLNPREKKDVLAFTCEPKSRNYTYIWWLNGQSLPVSPRVKRPIENRILILPSVTRNETGPYQCEIRDRYGGIRSNPVTLNVLYGPDLPRIYPSFTYYRSGENLDLSCFADSNPPAEYSWTINGKFQLSGQKLFIPQITTNHSGLYACSVRNSATGKEISKSMIVKVSGPCHGNQTESH

SEQ ID NO: 140 - protein, 361 aa, Homo sapiens
MFSSVAHLARANPFNTPHLQLVHDGLGDLRSSSPGPTGQPRRPRNLAAAAVEEYSCEFGSAKYYALCGFGGVLSCGLTHTAVVPLDLVKCRMQVDPQKYKGIFNGFSVTLKEDGVRGLAKGWAPTFLGYSMQGLCKFGFYEVFKVLYSNMLGEENTYLWRTSLYLAASASAEFFADIALAPMEAAKVRIQTQPGYANTLRDAAPKMYKEEGLKAFYKGVAPLWMRQIPYTMMKFACFERTVEALYKFVVPKPRSECSKPEQLVVTFVAGYIAGVFCAIVSHPADSVVSVLNKEKGSSASLVLKRLGFKGVWKGLFARIIMIGTLTALQWFIYDSVKVYFRLPRPPPPEMPESLKKKLGLTQ

SEQ ID NO: 141 - protein, 482 aa, Homo sapiens
MVMQFQGLENPIQISPHCSCTPSGFFMEMMSMKPAKGVLTEQVAGPLGQNLEVEPYSQYSNVQFPQVQPQISSSSYYSNLGFYPQQPEEWYSPGIYELRRMPAETLYQGETEVAEMPVTKKPRMGASAGRIKGDELCVVCGDRASGYHYNALTCEGCKGFFRRSITKNAVYKCKNGGNCVMDMYMRRKCQECRLRKCKEMGMLAECLLTEIQCKSKRLRKNVKQHADQTVNEDSEGRDLRQVTSTTKSCREKTELTPDQQTLLHFIMDSYNKQRMPQEITNKILKEEFSAEENFLILTEMATNHVQVLVEFTKKLPGFQTLDHEDQIALLKGSAVEAMFLRSAEIFNKKLPSGHSDLLEERIRNSGISDEYITPMFSFYKSIGELKMTQEEYALLTAIVILSPDRQYIKDREAVEKLQEPLLDVLQKLCKIHQPENPQHFACLLGRLTELRTFNHHHAEMLMSWRVNDHKFTPLLCEIWDVQ

SEQ ID NO: 142 - protein, 760 aa, Homo sapiens
MKTWVKIVFGVATSAVLALLVMCIVLRPSRVHNSEENTMRALTLKDILNGTFSYKTFFPNWISGQEYLHQSADNNIVLYNIETGQSYTILSNRTMKSVNASNYGLSPDRQFVYLESDYSKLWRYSYTATYYIYDLSNGEFVRGNELPRPIQYLCWSPVGSKLAYVYQNNIYLKQRPGDPPFQITFNGRENKIFNGIPDWVYEEEMLATKYALWWSPNGKFLAYAEFNDTDIPVIAYSYYGDEQYPRTINIPYPKAGAKNPVVRIFIIDTTYPAYVGPQEVPVPAMIASSDYYFSWLTWVTDERVCLQWLKRVQNVSVLSICDFREDWQTWDCPKTQEHIEESRTGWAGGFFVSTPVFSYDAISYYKIFSDKDGYKHIHYIKDTVENAIQITSGKWEAINIFRVTQDSLFYSSNEFEEYPGRRNIYRISIGSYPPSKKCVTCHLRKERCQYYTASFSDYAKYYALVCYGPGIPISTLHDGRTDQEIKILEENKELENALKNIQLPKEEIKKLEVDEITLWYKMILPPQFDRSKKYPLLIQVYGGPCSQSVRSVFAVNWISYLASKEGMVIALVDGRGTAFQGDKLLYAVYRKLGVYEVEDQITAVRKFIEMGFIDEKRIAIWGWSYGGYVSSLALASGTGLFKCGIAVAPVSSWEYYASVYTERFMGLPTKDDNLEHYKNSTVMARAEYFRNVDYLLIHGTADDNVHFQNSAQIAKALVNAQVDFQAMWYSDQNHGLSGLSTNHLYTHMTHFLKQCFSLSD

SEQ ID NO: 143 - protein, 899 aa, Homo sapiens
MESCYNPGLDGIIEYDDFKLNSSIVEPKEPAPETADGPYLVIVEQPKQRGFRFRYGCEGPSHGGLPGASSEKGRKTYPTVKICNYEGPAKIEVDLVTHSDPPRAHAHSLVGKQCSELGICAVSVGPKDMTAQFNNLGVLHVTKKNMMGTMIQKLQRQRLRSRPQGLTEAEQRELEQEAKELKKVMDLSIVRLRFSAFLRASDGSFSLPLKPVISQPIHDSKSPGASNLKISRMDKTAGSVRGGDEVYLLCDKVQKDDIEVRFYEDDENGWQAFGDFSPTDVHKQYAIVFRTPPYHKMKIERPVTVFLQLKRKRGGDVSDSKQFTYYPLVEDKEEVQRKRRKALPTFSQPFGGGSHMGGGSGGAAGGYGGAGGGGSLGFFPSSLAYSPYQSGAGPMGCYPGGGGGAQMAATVPSRDSGEEAAEPSAPSRTPQCEPQAPEMLQRAREYNARLFGLAQRSARALLDYGVTADARALLAGQRHLLTAQDENGDTPLHLAIIHGQTSVIEQIVYVIHHAQDLGVVNLTNHLHQTPLHLAVITGQTSVVSFLLRVGADPALLDRHGDSAMHLALRAGAGAPELLRALLQSGAPAVPQLLHMPDFEGLYPVHLAVRARSPECLDLLVDSGAEVEATERQGGRTALHLATEMEELGLVTHLVTKLRANVNARTFAGNTPLHLAAGLGYPTLTRLLLKAGADIHAENEEPLCPLPSPPTSDSDSDSEGPEKDTRSSFRGHTPLDLTCSTKVKTLLLNAAQNTMEPPLTPPSPAGPGLSLGDTALQNLEQLLDGPEAQGSWAELAERLGLRSLVDTYRQTTSPSGSLLRSYELAGGDLAGLLEALSDMGLEEGVRLLRGPETRDKLPSTEVKEDSAYGSQSVEQEAEKLGPPPEPPGGLCHGHPQPQVH

SEQ ID NO: 144 - protein, 783 aa, Homo sapiens
MRELVNIPLVHILTLVAFSGTEKLPKAPVITTPLETVDALVEEVATFMCAVESYPQPEISWTRNKILIKLFDTRYSIRENGQLLTILSVEDSDDGIYCCTANNGVGGAVESCGALQVKMKPKITRPPINVKIIEGLKAVLPCTTMGNPKPSVSWIKGDSPLRENSRIAVLESGSLRIHNVQKEDAGQYRCVAKNSLGTAYSKVVKLEVEEESEPEQDTKVFARILRAPESHNVTFGSFVTLHCTATGIPVPTITWIENGNAVSSGSIQESVKDRVIDSRLQLFITKPGLYTCIATNKHGEKFSTAKAAATISIAEWREYCLAVKELFCAKEWLVMEEKTHRGLYRSEMHLLSVPECSKLPSMHWDPTACARLPHLAFPPMTSSKPSVDIPNLPSSSSSSFSVSPTYSMTVIISIMSSFAIFVLLTITTLYCCRRRKQWKNKKRESAAVTLTTLPSELLLDRLHPNPMYQRMPLLLNPKLLSLEYPRNNIEYVRDIGEGAFGRVFQARAPGLLPYEPFTMVAVKMLKEEASADMQADFQREAALMAEFDNPNIVKLLGVCAVGKPMCLLFEYMAYGDLNEFLRSMSPHTVCSLSHSDLSMRAQVSSPGPPPLSCAEQLCIARQVAAGMAYLSERKFVHRDLATRNCLVGENMVVKIADFGLSRNIYSADYYKANENDAIPIRWMPPESIFYNRYTTESDVWAYGVVLWEIFSYGLQPYYGMAHEEVIYYVRDGNILSCPENCPVELYNLMRLCWSKLPADRPSFTSIHRILERMCERAEGTVSV

SEQ ID NO: 145 - protein, 934 aa, Homo sapiens
MSSDEKGISPAHKTSTPTHRSASSSTSSQRDSRQSIHILERTASSSTEPSVSRQLLEPEPVPLSKEADSWEIIEGLKIGQTNVQKPDKHEGFMLKKRKWPLKGWHKRFFVLDNGMLKYSKAPLDIQKGKVHGSIDVGLSVMSIKKKARRIDLDTEEHIYHLKVKSQDWFDAWVSKLRHHRLYRQNEIVRSPRDASFHIFPSTSTAESSPAANVSVMDGKMQPNSFPWQSPLPCSNSLPATCTTGQSKVAAWLQDSEEMDRCAEDLAHCQSNLVELSKLLQNLEILQRTQSAPNFTDMQANCVDISKKDKRVTRRWRTKSVSKDTKIQLQVPFSATMSPVRLHSSNPNLCADIEFQTPPSHLTDPLESSTDYTKLQEEFCLIAQKVHSLLKSAFNSIAIEKEKLKQMVSEQDHSKGHSTQMARLRQSLSQALNQNAELRSRLNRIHSESIICDQVVSVNIIPSPDEAGEQIHVSLPLSQQVANESRLSMSESVSEFFDAQEVLLSASSSENEASDDESYISDVSDNISEDNTSVADNISRQILNGELTGGAFRNGRRACLPAPCPDTSNINLWNILRNNIGKDLSKVSMPVELNEPLNTLQHLCEEMEYSELLDKASETDDPYERMVLVAAFAVSGYCSTYFRAGSKPFNPVLGETYECIREDKGFRFFSEQVSHHPPISACHCESKNFVFWQDIRWKNKFWGKSMEILPVGTLNVMLPKYGDYYVWNKVTTCIHNILSGRRWIEHYGEVTIRNTKSSVCICKLTFVKVNYWNSNMNEVQGVVIDQEGKAVYRLFGKWHEGLYCGVAPSAKCIWRPGSMPTNYELYYGFTRFAIELNELDPVLKDLLPPTDARFRPDQRFLEEGNLEAAASEKQRVEELQRSRRRYMEENNLEHIPKFFKKVIDANQREAWVSNDTYWELRKDPGFSKVDSPVLW

SEQ ID NO: 146 - protein, 398 aa, Homo sapiens
MMSMLGGLQRYFRVILLLLLALTLLLLAGFLHSDLELDTPLFGGQAEGPPVTNIMFLKTHKTASSTVLNILYRFAETHNLSVALPAGSRVHLGYPWLFLARYVEGVGSQQRFNIMCNHLRFNLPQVQKVMPNDTFYFSILRNPVFQLESSFIYYKTYAPAFRGAPSLDAFLASPRTFYNDSRHLRNVYAKNNMWFDFGFDPNAQCEEGYVRARIAEVERRFRLVLIAEHLDESLVLLRRRLRWALDDVVAFRLNSRSARSVARLSPETRERARSWCALDWRLYEHFNRTLWAQLRAELGPRRLRGEVERLRARRRELASLCLQDGGALKNHTQIRDPRLRPYQSGKADILGYNLRPGLDNQTLGVCQRLVMPELQYMARLYALQFPEKPLKNIPFLGA

SEQ ID NO: 147 - protein, 1440 aa, Homo sapiens
MAGIIKKQILKHLSRFTKNLSPDKINLSTLKGEGQLTNLELDEEVLQNVLELPTWLAITRVYCNRASIRIQWTKLKTHPICLCLDKVEVEMKTCEDPRPPNGQSPIALASGQSEYGFAEKVVEGMFIIVNSITIKIHSKAFHASFELWQLQGYSVNPNWQQSDLRLTRITDPCRGEVLTFKEITWQTLRIEADATDNGDQDPVTTPLRLITNQGRIQIALKRRTKDCNVISSKLMFLLDDLLWVLTDSQLKAMMKYAESLSEAMEKSAHQRKSLAPEPVQITPPAPSAQQSWAQAFGGSQGNSNSSSSRLSQYFEKFDVKESSYHLLISRLDLHICDDSQSREPGVSANRLMGGAMQLTFRKMAFDYYPFHWAGDSCKHWVRHCEAMETRGQWAQKLVMEFQSKMEKWHEETGLKPPWHLGVDSLFRRKADSLSSPRKNPLERSPSQGRQPAFQPPAWNRLRSSCMVVRVDDLDIHQVSTAGQPSKKPSTLLSCSRKLHNLPTQVSAIHIEFTEYYFPDNQELPVPCPNLYIQLNGLTFTMDPVSLLWGNLFCLDLYRSLEQFKAIYKLEDSSQKDEHLDIRLDAFWLKVSFPLEKRERAELHRPQALVFSASGMIATNTRHAPHCSCSDLQSLFRGFAAAEFFHSNYDHFPKVPGGFSLLHMLFLHHAFQMDSCLPQPNTLPPQRPKASWDLWSVHFTQISLDFEGTENFKGHTLNFVAPFPLSIWACLPLRWQQAQARKLLLASEGRLKPSASFGSPVQSEALAPDSMSHPRSKTEHDLKSLSGLTEVMEILKEGSSGMDNKGPLTELEDVADVHMLVHSPAHVRVRLDHYQYLALLRLKEVLQRLQEQLTKDTESMTGSPLQNQTACIGVLFPSAEVALLMHPAPGAVDADSAGSDSTSLVDSELSPSEDRELKSDASSDQGPASPEKVLEESSIENQDVSQERPHSNGELQDSGPLAQQLAGKGHEAVESLQAKKLSRTQASSSPAALKPPAGRETAVNGQGELIPLKNIEGELSSAIHMTKDATKEALHATMDLTKEAVSLTKDAFSLGRDRMTSTMHKMLSLPPAKEPMAKTDEGVAAPVSGGAARLRFFSMKRTVSQQSFDGVSLDSSGPEDRISVDSDGSDSFVMLLESESGPESVPPGSLSNVSDNAGVQGSPLVNNYGQGSPAANSSVSPSGEDLIFHPVSVLVLKVNEVSFGIEVRGEDLTVALQAEELTLQQLGTVGLWQFLHGQCPGTCFQESSTLKTGHIRPAVGLRFEVGPGAAVHSPLASQNGFLHLLLHGCDLELLTSVLSGLGPFLEDEEIPVVVPMQIELLNSSITLKDDIPPIYPTSPGPIPITLAMEHVVLKRSDDGVFHIGAAAQDKPSAEVLKSEKRQPPKEQVFLVPTGEVFEQQVKELPILQKELIETKQALANANQDKEKLLQEIRKYNPFFEL

SEQ ID NO: 148 - protein, 334 aa, Homo sapiens
MEPGPTAAQRRCSLPPWLPLGLLLWSGLALGALPFGSSPHRVFHDLLSEQQLLEVEDLSLSLLQGGGLGPLSLPPDLPDLDPECRELLLDFANSSAELTGCLVRSARPVRLCQTCYPLFQQVVSKMDNISRAAGNTSESQSCARSLLMADRMQIVVILSEFFNTTWQEANCANCLTNNSEELSNSTVYFLNLFNHTLTCFEHNLQGNAHSLLQTKNYSEVCKNCREAYKTLSSLYSEMQKMNELENKAEPGTHLCIDVEDAMNITRKLWSRTFNCSVPCSDTVPVIAVSVFILFLPVVFYLSSFLHSEQKKRKLILPKRLKSSTSFANIQENSN

SEQ ID NO: 149 - protein, 1241 aa, Homo sapiens
MIMFPLFGKISLGILIFVLIEGDFPSLTAQTYLSIEEIQEPKSAVSFLLPEESTDLSLATKKKQPLDRRETERQWLIRRRRSILFPNGVKICPDESVAEAVANHVKYFKVRVCQEAVWEAFRTFWDRLPGREEYHYWMNLCEDGVTSIFEMGTNFSESVEHRSLIMKKLTYAKETVSSSELSSPVPVGDTSTLGDTTLSVPHPEVDAYEGASESSLERPEESISNEIENVIEEATKPAGEQIAEFSIHLLGKQYREELQDSSSFHHQHLEEEFISEVENAFTGLPGYKEIRVLEFRSPKENDSGVDVYYAVTFNGEAISNTTWDLISLHSNKVENHGLVELDDKPTVVYTISNFRDYIAETLQQNFLLGNSSLNPDPDSLQLINVRGVLRHQTEDLVWNTQSSSLQATPSSILDNTFQAAWPSADESITSSIPPLDFSSGPPSATGRELWSESPLGDLVSTHKLAFPSKMGLSSSPEVLEVSSLTLHSVTPAVLQTGLPVASEERTSGSHLVEDGLANVEESEDFLSIDSLPSSSFTQPVPKETIPSMEDSDVSLTSSPYLTSSIPFGLDSLTSKVKDQLKVSPFLPDASMEKELIFDGGLGSGSGQKVDLITWPWSETSSEKSAEPLSKPWLEDDDSLLPAEIEDKKLVLVDKMDSTDQISKHSKYEHDDRSTHFPEEEPLSGPAVPIFADTAAESASLTLPKHISEVPGVDDYSVTKAPLILTSVAISASTDKSDQADAILREDMEQITESSNYEWFDSEVSMVKPDMQTLWTILPESERVWTRTSSLEKLSRDILASTPQSADRLWLSVTQSTKLPPTTISTLLEDEVIMGVQDISLELDRIGTDYYQPEQVQEQNGKVGSYVEMSTSVHSTEMVSVAWPTEGGDDLSYTQTSGALVVFFSLRVTNMMFSEDLFNKNSLEYKALEQRFLELLVPYLQSNLTGFQNLEILNFRNGSIVVNSRMKFANSVPPNVNNAVYMILEDFCTTAYNTMNLAIDKYSLDVESGDEANPCKFQACNEFSECLVNPWSGEAKCRCFPGYLSVEERPCQSLCDLQPDFCLNDGKCDIMPGHGAICRCRVGENWWYRGKHCEEFVSEPVIIGITIASVVGLLVIFSAIIYFFIRTLQAHHDRSERESPFSGSSRQPDSLSSIENAVKYNPVYESHRAGCEKYEGPYPQHPFYSSASGDVIGGLSREEIRQMYESSELSREEIQERMRVLELYANDPEFAAFVREQQVEEV

SEQ ID NO: 150 - protein, 892 aa, Homo sapiens
MDHYDSQQTNDYMQPEEDWDRDLLLDPAWEKQQRKTFTAWCNSHLRKAGTQIENIEEDFRDGLKLMLLLEVISGERLAKPERGKMRVHKISNVNKALDFIASKGVKLVSIGAEEIVDGNVKMTLGMIWTIILRFAIQDISVEETSAKEGLLLWCQRKTAPYKNVNIQNFHISWKDGLGFCALIHRHRPELIDYGKLRKDDPLTNLNTAFDVAEKYLDIPKMLDAEDIVGTARPDEKAIMTYVSSFYHAFSGAQKAETAANRICKVLAVNQENEQLMEDYEKLASDLLEWIRRTIPWLENRVPENTMHAMQQKLEDFRDYRRLHKPPKVQEKCQLEINFNTLQTKLRLSNRPAFMPSEGRMVSDINNAWGCLEQVEKGYEEWLLNEIRRLERLDHLAEKFRQKASIHEAWTDGKEAMLRQKDYETATLSEIKALLKKHEAFESDLAAHQDRVEQIAAIAQELNELDYYDSPSVNARCQKICDQWDNLGALTQKRREALERTEKLLETIDQLYLEYAKRAAPFNNWMEGAMEDLQDTFIVHTIEEIQGLTTAHEQFKATLPDADKERLAILGIHNEVSKIVQTYHVNMAGTNPYTTITPQEINGKWDHVRQLVPRRDQALTEEHARQQHNERLRKQFGAQANVIGPWIQTKMEEIGRISIEMHGTLEDQLSHLRQYEKSIVNYKPKIDQLEGDHQLIQEALIFDNKHTNYTMEHIRVGWEQLLTTIARTINEVENQILTRDAKGISQEQMNEFRASFNHFDRDHSGTLGPEEFKACLISLGYDIGNDPQGEAEFARIMSIVDPNRLGVVTFQAFIDFMSRETADTDTADQVMASFKILAGDKNYITMDELRRELPPDQAEYCIARMAPYTGPDSVPGALDYMSFSTALYGESDL

SEQ ID NO: 151 - protein, 515 aa, Homo sapiens
MWRLPGLLGRALPRTLGPSLWRVTPKSTSPDGPQTTSSTLLVPVPNLDRSGPHGPGTSGGPRSHGWKDAFQWMSSRVSPNTLWDAISWGTLAVLALQLARQIHFQASLPAGPQRVEHCSWHSPLDRFFSSPLWHPCSSLRQHILPSPDGPAPRHTGLREPRLGQEEASAQPRNFSHNSLRGARPQDPSEEGPGDFGFLHASSSIESEAKPAQPQPTGEKEQDKSKTLSLEEAVTSIQQLFQLSVSIAFNFLGTENMKSGDHTAAFSYFQKAAARGYSKAQYNAGLCHEHGRGTPRDISKAVLYYQLAASQGHSLAQYRYARCLLRDPASSWNPERQRAVSLLKQAADSGLREAQAFLGVLFTKEPYLDEQRAVKYLWLAANNGDSQSRYHLGICYEKGLGVQRNLGEALRCYQQSAALGNEAAQERLRALFSMGAAAPGPSDLTVTGLKSFSSPSLCSLNTLLAGTSRLPHASSTGNLGLLCRSGHLGASLEASSRAIPPHPYPLERSVVRLGFG

SEQ ID NO: 152 - protein, 595 aa, Homo sapiens
MKFFSYILVYRRFLFVVFTVLVLLPLPIVLHTKEAECAYTLFVVATFWLTEALPLSVTALLPSLMLPMFGIMPSKKVASAYFKDFHLLLIGVICLATSIEKWNLHKRIALKMVMMVGVNPAWLTLGFMSSTAFLSMWLSNTSTAAMVMPIAEAVVQQIINAEAEVEATQMTYFNGSTNHGLEIDESVNGHEINERKEKTKPVPGYNNDTGKISSKVELEKNSGMRTKYRTKKGHVTRKLTCLCIAYSSTIGGLTTITGTSTNLIFAEYFNTRYPDCRCLNFGSWFTFSFPAALIILLLSWIWLQWLFLGFNFKEMFKCGKTKTVQQKACAEVIKQEYQKLGPIRYQEIVTLVLFIIMALLWFSRDPGFVPGWSALFSEYPGFATDSTVALLIGLLFFLIPAKTLTKTTPTGEIVAFDYSPLITWKEFQSFMPWDIAILVGGGFALADGCEESGLSKWIGNKLSPLGSLPAWLIILISSLMVTSLTEVASNPATITLFLPILSPLAEAIHVNPLYILIPSTLCTSFAFLLPVANPPNAIVFSYGHLKVIDMVKAGLGVNIVGVAVVMLGICTWIVPMFDLYTYPSWAPAMSNETMP

SEQ ID NO: 153 - protein, 795 aa, Homo sapiens
MKKLGRIHPNRQVLAFILMVFLSQVRLEPIRYSVLEETESGSFVAHLAKDLGLGIGELASRSARVLSDDDKQRLQLDRQTGDLLLREKLDREELCGPIEPCVLHFQVFLEMPVQFFQGELLIQDINDHSPIFPEREVLLKILENSQPGTLFPLLIAEDLDVGSNGLQKYTISPNSHFHILTRNHSEGKKYPDLVQDKPLDREEQPEFSLTLVALDGGSPPRSGTVMVRILIMDINDNAPEFVHTPYGVQVLENSPLDSPIVRVLARDIDAGNFGSVSYGLFQASDEIKQTFSINEVTGEILLKKKLDFEKIKSYHVEIEATDGGGLSGKGTVVIEVVDVNDNPPELIISSLTSSIPENAPETVVSIFRIRDRDSGENGKMICSIPDNLPFILKPTLKNFYTLVTERPLDRETSAEYNITIAVTDLGTPRLKTQQNITVQVSDVNDNAPAFTQTSYTLFVRENNSPALHIGSVSATDRDSGTNAQVTYSLLPPQDPHLPLASLVSINADNGHLFALRSLDYEALQAFEFRVGASDRGSPALSSEALVRVLVLDTNDNSPFVLYPLQNGSAPCTELVPRAAEPGYLVTKVVAVDGDSGQNAWLSYQLLKATEPGLFGVWAHNGEVRTARLLSERDAAKHRLVVLVKDNGEPPRSATATLHVLLVDGFSQPYLPLPEAAPAQAQADSLTVYLVVALASVSSLFLFSVLLFVAVRLCRRSRAASVGRCSVPEGPFPGHLVDVSGTGTLSQSYQYEVCLTGDSGTGEFKFLKPIFPNLLVQDTGREVKENPKFRNSLVFS

SEQ ID NO: 154 - protein, 798 aa, Homo sapiens
MEAGEGKERVPKQRQVLIFFVLLGIAQASCQPRHYSVAEETESGSFVANLLKDLGLEIGELAVRGARVVSKGKKMHLQFDRQTGDLLLNEKLDREELCGPTEPCVLPFQVLLENPLQFFQAELRIRDVNDHSPVFLDKEILLKIPESITPGTTFLIERAQDLDVGTNSLQNYTISPNFHFHLNLQDSLDGIILPQLVLNRALDREEQPEIRLTLTALDGGSPPRSGTALVRIEVVDINDNVPEFAKLLYEVQIPEDSPVGSQVAIVSARDLDIGTNGEISYAFSQASEDIRKTFRLSAKSGELLLRQKLDFESIQTYTVNIQATDGGGLSGTCVVFVQVMDLNDNPPELTMSTLINQIPENLQDTLIAVFSVSDPDSGDNGRMVCSIQDDLPFFLKPSVENFYTLVISTALDRETRSEYNITITVTDFGTPRLKTEHNITVLVSDVNDNAPAFTQTSYTLFVRENNSPALHIGSVSATDRDSGTNAQVTYSLLPPQDPHLPLASLVSINADNGHLFALQSLDYEALQAFEFRVGAADRGSPALSSEALVRVLVLDANDNSPFVLYPLQNGSAPCTELVPRAAEPGYLVTKVVAVDGDSGQNAWLSYQLLKATEPGLFGVWAHNGEVRTARLLRERDAAKQRLVVLVKDNGEPPRSATATLHVLLVDGFSQPYLLLPEAAPAQAQADLLTVYLVVALASVSSLFLFSVLLFVAVRLCRRSRAASVGRCSVPEGPFPGQMVDVSGTGTLSQSYQYEVCLTGGSGTNEFKFLKPIIPNFVAQGAERVSEANPSFRKSFEFT

SEQ ID NO: 155 - protein, 1057 aa, Homo sapiens
MVLAGPLAVSLLLPSLTLLVSHLSSSQDVSSEPSSEQQLCALSKHPTVAFEDLQPWVSNFTYPGARDFSQLALDPSGNQLIVGARNYLFRLSLANVSLLQATEWASSEDTRRSCQSKGKTEEECQNYVRVLIVAGRKVFMCGTNAFSPMCTSRQVGNLSRTIEKINGVARCPYDPRHNSTAVISSQGELYAATVIDFSGRDPAIYRSLGSGPPLRTAQYNSKWLNEPNFVAAYDIGLFAYFFLRENAVEHDCGRTVYSRVARVCKNDVGGRFLLEDTWTTFMKARLNCSRPGEVPFYYNELQSAFHLPEQDLIYGVFTTNVNSIAASAVCAFNLSAISQAFNGPFRYQENPRAAWLPIANPIPNFQCGTLPETGPNENLTERSLQDAQRLFLMSEAVQPVTPEPCVTQDSVRFSHLVVDLVQAKDTLYHVLYIGTESGTILKALSTASRSLHGCYLEELHVLPPGRREPLRSLRILHSARALFVGLRDGVLRVPLERCAAYRSQGACLGARDPYCGWDGKQQRCSTLEDSSNMSLWTQNITACPVRNVTRDGGFGPWSPWQPCEHLDGDNSGSCLCRARSCDSPRPRCGGLDCLGPAIHIANCSRNGAWTPWSSWALCSTSCGIGFQVRQRSCSNPAPRHGGRICVGKSREERFCNENTPCPVPIFWASWGSWSKCSSNCGGGMQSRRRACENGNSCLGCGVEFKTCNPEGCPEVRRNTPWTPWLPVNVTQGGARQEQRFRFTCRAPLADPHGLQFGRRRTETRTCPADGSGSCDTDALVEVLLRSGSTSPHTVSGGWAAWGPWSSCSRDCELGFRVRKRTCTNPEPRNGGLPCVGDAAEYQDCNPQACPGEDICLGLHTEEALCATQACPEGWSPWSEWSKCTDDGAQSRSRHCEELLPGSSACAGNSSQSRPCPYSEIPVILPASSMEEATDCAGFNLIHLVATGISCFLGSGLLTLAVYLSCQHCQRQSQESTLVHPATPNHLHYKGGGTPKNEKYTPMEFKTLNKNNLIPDDRANFYPLQQTNVYTTTYYPSPLNKHSFRPEASPGQRCFPNS

SEQ ID NO: 156 - protein, 902 aa, Homo sapiens
MSGQTLTDRIAAAQYSVTGSAVARAVCKATTHEVMGPKKKHLDYLIQATNETNVNIPQMADTLFERATNSSWVVVFKALVTTHHLMVHGNERFIQYLASRNTLFNLSNFLDKSGSHGYDMSTFIRRYSRYLNEKAFSYRQMAFDFARVKKGADGVMRTMAPEKLLKSMPILQGQIDALLEFDVHPNELTNGVINAAFMLLFKDLIKLFACYNDGVINLLEKFFEMKKGQCKDALEIYKRFLTRMTRVSEFLKVAEQVGIDKGDIPDLTQAPSSLMETLEQHLNTLEGKKPGNNEGSGAPSPLSKSSPATTVTSPNSTPAKTIDTSPPVDLFATASAAVPVSTSKPSSDLLDLQPDFSSGGAAAAAAPAPPPPAGGATAWGDLLGEDSLAALSSVPSEAQISDPFAPEPTPPTTTAEIATASASASTTTTVTAVTAEVDLFGDAFAASPGEAPAASEGAAAPATPTPVAAALDACSGNDPFAPSEGSAEAAPELDLFAMKPPETSVPVVTPTASTAPPVPATAPSPAPAVAAAAAATTAATAAATTTTTTSAATATTAPPALDIFGDLFESTPEVAAAPKPDAAPSIDLFSTDAFSSPPQGASPVPESSLTADLLSVDAFAAPSPATTASPAKVDSSGVIDLFGDAFGSSASEPQPASQAASSSSASADLLAGFGGSFMAPSPSPVTPAQNNLLQPNFEAAFGTTPSTSSSSSFDPSGDLLMPTMAPAGQPAPVSMVPPSPAMAASKALGSDLDSSLASLVGNLGISGTTTKKGDLQWNAGEKKLTGGANWQPKVAPATWSAGVPPSAPLQGAVPPTSSVPPVAGAPSVGQPGAGFGMPPAGTGMPMMPQQPVMFAQPMMRPPFGAAAVPGTQLSPSPTPASQSPKKPPAKDPLADLNIKDFL

SEQ ID NO: 157 - protein, 2465 aa, Homo sapiens
MNTEELELLSDSKYRNYVAAIDKALKNFEYSSEWADLISALGKLNKVLQNNAKYQVVPKKLTIGKRLAQCLHPALPGGVHRKALETYEIIFKIIGPKRLAKDLFLYSSGLFPLLANAAMSVKPTLLSLYEIYYLPLGKTLKPGLQGLLTGILPGLEEGSEYYERTNMLLEKVAAAVDQSAFYSALWGSLLTSPAVRLPGITYVLAHLNRKLSMEDQLYIIGSDIELMVEAVSTSVQDSSVLVQRSTLDLILFCFPFHMSQATRPDMIRILSAALHVVLRRDMSLNRRLYAWLLGFDNNGAIIGPRSTRHSNPEEHATYYFTTFSKELLVQAMVGILQVNGFGEENTLMQDLKPFRILISLLDKPELGPVILEDVLIEVFRTLYSQCKAELDLQTEPPFSKDHAQLSSKLRENKKTAELIKTANLLFNSFEPYYMWDYVARWFEECCRRTLHVRLQIGPGDSNDSSELQLTNFCLLVDFLLDIVSLPTRSMRVLCQETYIEIQTEHLPQLLLRMISALTSHLQTLHLSELTDSLRLCSKILSKVQPPLLSASTGGVLQFPSGQNNSVKEWEDKKVSSVSHENPTEVFEDGENPPSSRSSESGFTEFIQYQADRTDDIDRELSEGQGAAAIPIGSTSSETETASTVGSEETIIQTPSVVTQGTATRSRKTAQKTAMQCCLEYVQQFLTRLINLYIIQNNSFSQSLATEHQGDLGREQGETSKWDRNSQGDVKEKNISKQKTSKEYLSAFLAACQLFLECSSFPVYIAEGNHTSELRSEKLETDCEHVQPPQWLQTLMNACSQASDFSVQSVAISLVMDLVGLTQSVAMVTGENINSVEPAQPLSPNQGRVAVVIRPPLTQGNLRYIAEKTEFFKHVALTLWDQLGDGTPQHHQKSVELFYQLHNLVPSSSICEDVISQQLTHKDKKIRMEAHAKFAVLWHLTRDLHINKSSSFVRSFDRSLFIMLDSLNSLDGSTSSVGQAWLNQVLQRHDIARVLEPLLLLLLHPKTQRVSVQRVQAERYWNKSPCYPGEESDKHFMQNFACSNVSQVQLITSKGNGEKPLTMDEIENFSLTVNPLSDRLSLLSTSSETIPMVVSDFDLPDQQIEILQSSDSGCSQSSAGDNLSYEVDPETVNAQEDSQMPKESSPDDDVQQVVFDLICKVVSGLEVESASVTSQLEIEAMPPKCSDIDPDEETIKIEDDSIQQSQNALLSNESSQFLSVSAEGGHECVANGISRNSSSPCISGTTHTLHDSSVASIETKSRQRSHSSIQFSFKEKLSEKVSEKETIVKESGKQPGAKPKVKLARKKDDDKKKSSNEKLKQTSVFFSDGLDLENWYSCGEGDISEIESDMGSPGSRKSPNFNIHPLYQHVLLYLQLYDSSRTLYAFSAIKAILKTNPIAFVNAISTTSVNNAYTPQLSLLQNLLARHRISVMGKDFYSHIPVDSNHNFRSSMYIEILISLCLYYMRSHYPTHVKVTAQDLIGNRNMQMMSIEILTLLFTELAKVIESSAKGFPSFISDMLSKCKVQKVILHCLLSSIFSAQKWHSEKMAGKNLVAVEEGFSEDSLINFSEDEFDNGSTLQSQLLKVLQRLIVLEHRVMTIPEENETGFDFVVSDLEHISPHQPMTSLQYLHAQPITCQGMFLCAVIRALHQHCACKMHPQWIGLITSTLPYMGKVLQRVVVSVTLQLCRNLDNLIQQYKYETGLSDSRPLWMASIIPPDMILTLLEGITAIIHYCLLDPTTQYHQLLVSVDQKHLFEARSGILSILHMIMSSVTLLWSILHQADSSEKMTIAASASLTTINLGATKNLRQQILELLGPISMNHGVHFMAAIAFVWNERRQNKTTTRTKVIPAASEEQLLLVELVRSISVMRAETVIQTVKEVLKQPPAIAKDKKHLSLEVCMLQFFYAYIQRIPVPNLVDSWASLLILLKDSIQLSLPAPGQFLILGVLNEFIMKNPSLENKKDQRDLQDVTHKIVDAIGAIAGSSLEQTTWLRRNLEVKPSPKIMVDGTNLESDVEDMLSPAMETANITPSVYSVHALTLLSEVLAHLLDMVFYSDEKERVIPLLVNIMHYVVPYLRNHSAHNAPSYRACVQLLSSLSGYQYTRRAWKKEAFDLFMDPSFFQMDASCVNHWRAIMDNLMTHDKTTFRDLMTRVAVAQSSSLNLFANRDVELEQRAMLLKRLAFAIFSSEIDQYQKYLPDIQERLVESLRLPQVPTLHSQVFLFFRVLLLRMSPQHLTSLWPTMITELVQVFLLMEQELTADEDISRTSGPSVAGLETTYTGGNGFSTSYNSQRWLNLYLSACKFLDLALALPSENLPQFQMYRWAFIPEASDDSGLEVRRQGIHQREFKPYVVRLAKLLRKRAKKNPEEDNSGRTLGWEPGHLLLTICTVRSMEQLLPFFNVLSQVFNSKVTSRCGGHSGSPILYSNAFPNKDMKLENHKPCSSKARQKIEEMVEKDFLEGMIKT

SEQ ID NO: 158 - protein, 651 aa, Homo sapiens
MLRLQMTDGHISCTAVEFSYMSKISLNTPPGTKVKLSGIVDIKNGFLLLNDSNTTVLGGEVEHLIEKWELQRSLSKHNRSNIGTEGGPPPFVPFGQKCVSHVQVDSRELDRRKTLQVTMPVKPTNDNDEFEKQRTAAIAEVAKSKETKTFGGGGGGARSNLNMNAAGNRNREVLQKEKSTKSEGKHEGVYRELVDEKALKHITEMGFSKEASRQALMDNGNNLEAALNVLLTSNKQKPVMGPPLRGRGKGRGRIRSEDEEDLGNARPSAPSTLFDFLESKMGTLNVEEPKSQPQQLHQGQYRSSNTEQNGVKDNNHLRHPPRNDTRQPRNEKPPRFQRDSQNSKSVLEGSGLPRNRGSERPSTSSVSEVWAEDRIKCDRPYSRYDRTKDTSYPLGSQHSDGAFKKRDNSMQSRSGKGPSFAEAKENPLPQGSVDYNNQKRGKRESQTSIPDYFYDRKSQTINNEAFSGIKIEKHFNVNTDYQNPVRSNSFIGVPNGEVEMPLKGRRIGPIKPAGPVTAVPCDDKIFYNSGPKRRSGPIKPEKILESSIPMEYAKMWKPGDECFALYWEDNKFYRAEVEALHSSGMTAVVKFIDYGNYEEVLLSNIKPIQTEAWEEEGTYDQTLEFRRGGDGQPRRSTRPTQQFYQPPRARN

SEQ ID NO: 159 - protein, 520 aa, Homo sapiens
MAALKLLSSGLRLCASARGSGATWYKGCVCSFSTSAHRHTKFYTDPVEAVKDIPDGATVLVGGFGLCGIPENLIDALLKTGVKGLTAVSNNAGVDNFGLGLLLRSKQIKRMVSSYVGENAEFERQYLSGELEVELTPQGTLAERIRAGGAGVPAFYTPTGYGTLVQEGGSPIKYNKDGSVAIASKPREVREFNGQHFILEEAITGDFALVKAWKADRAGNVIFRKSARNFNLPMCKAAETTVVEVEEIVDIGAFAPEDIHIPQIYVHRLIKGEKYEKRIERLSIRKEGDGEAKSAKPGDDVRERIIKRAALEFEDGMYANLGIGIPLLASNFISPNITVHLQSENGVLGLGPYPRQHEADADLINAGKETVTILPGASFFSSDESFAMIRGGHVDLTMLGAMQVSKYGDLANWMIPGKMVKGMGGAMDLVSSAKTKVVVTMEHSAKGNAHKIMEKCTLPLTGKQCVNRIITEKAVFDVDKKKGLTLIELWEGLTVDDVQKSTGCDFAVSPKLMPMQQIAN

SEQ ID NO: 160 - protein, 553 aa, Homo sapiens
MAFEDVAVYFSQEEWGLLDTAQRALYRRVMLDNFALVASLGLSTSRPRVVIQLERGEEPWVPSGTDTTLSRTTYRRRNPGSWSLTEDRDVSGEWPRAFPDTPPGMTTSVFPVAGACHSVKSLQRQRGASPSRERKPTGVSVIYWERLLLGSGSGQASVSLRLTSPLRPPEGVRLREKTLTEHALLGRQPRTPERQKPCAQEVPGRTFGSAQDLEAAGGRGHHRMGAVWQEPHRLLGGQEPSTWDELGEALHAGEKSFECRACSKVFVKSSDLLKHLRTHTGERPYECAQCGKAFSQTSHLTQHQRIHSGETPYACPVCGKAFRHSSSLVRHQRIHTAEKSFRCSECGKAFSHGSNLSQHRKIHAGGRPYACAQCGRRFCRNSHLIQHERTHTGEKPFVCALCGAAFSQGSSLFKHQRVHTGEKPFACPQCGRAFSHSSNLTQHQLLHTGERPFRCVDCGKAFAKGAVLLSHRRIHTGEKPFVCTQCGRAFRERPALFHHQRIHTGEKTVRRSRASLHPQARSVAGASSEGAPAKETEPTPASGPAAVSQPAEV

SEQ ID NO: 161 - protein, 594 aa, Homo sapiens
MAAAVLRDSTSVPVTAEAKLMGFTQGCVTFEDVAIYFSQEEWGLLDEAQRLLYRDVMLENFALITALVCWHGMEDEETPEQSVSVEGVPQVRTPEASPSTQKIQSCDMCVPFLTDILHLTDLPGQELYLTGACAVFHQDQKHHSAEKPLESDMDKASFVQCCLFHESGMPFTSSEVGKDFLAPLGILQPQAIANYEKPNKISKCEEAFHVGISHYKWSQCRRESSHKHTFFHPRVCTGKRLYESSKCGKACCCECSLVQLQRVHPGERPYECSECGKSFSQTSHLNDHRRIHTGERPYVCGQCGKSFSQRATLIKHHRVHTGERPYECGECGKSFSQSSNLIEHCRIHTGERPYECDECGKAFGSKSTLVRHQRTHTGEKPYECGECGKLFRQSFSLVVHQRIHTTARPYECGQCGKSFSLKCGLIQHQLIHSGARPFECDECGKSFSQRTTLNKHHKVHTAERPYVCGECGKAFMFKSKLVRHQRTHTGERPFECSECGKFFRQSYTLVEHQKIHTGLRPYDCGQCGKSFIQKSSLIQHQVVHTGERPYECGKCGKSFTQHSGLILHRKSHTVERPRDSSKCGKPYSPRSNIV

SEQ ID NO: 162 - protein, 622 aa, Homo sapiens
MATVLSRALKLPGKKSPDLGEYDPLTQADSDESEDDLVLNLQKNGGVKNGKSPLGEAPEPDSDAEVAEAAKPHLSEVTTEGYPSEPLGGLEQKAASSLVSYVRTSVFLLTLGISMILVLLCAFLIPCPPRDLHSTWSRHLGSQGGGDLSPLELADVNGDGLRDVLLSFVMSRNGSAVGVSRPAANLVCLSGMNGSTLWSSLLPEEARDITCLELMPGSLAETICLVTGTHKMLSAFNATSGKAIWTLNPNYLSNGTLAAPVVVLPDLDEDGVRDLVVLAIGELQPDLCFLLVSGRTGNPVGRPVKYNIVGVGNLIGPQVYITTNGAVYILFGFGNIQAVALRDIFVQAQNRDSSPPSLQIEEPEWEKRRSINLSELIDVYSDGVELLQMVKAPDSNCSNLLITTRQSLVLLRGQNLTPYWALRLQGLRSQPTPGYFTDDQTLDFLLQIQDGVGMKKMMVVDGDSGSIVWSYRAPCHMKETPATSAVTSDQKSVFLFWAEGLSAASPNSDIILGTEPPSLHHLYLLHPAFPSILLDLANTTGTVTASEVGINDLWKDAFYVTRTTGPSSEGHPAALVVSKLSLRWALMEGQMAQLQESTPKIGRGELRRFLSRIKFVEAPYEI

SEQ ID NO: 163 - protein, 303 aa, Homo sapiens
MGRPLLLPLLPLLLPPAFLQPSGSTGSGPSYLYGVTQPKHLSASMGGSVEIPFSFYYPWELATAPDVRISWRRGHFHRQSFYSTRPPSIHKDYVNRLFLNWTEGQKSGFLRISNLQKQDQSVYFCRVELDTRSSGRQQWQSIEGTKLSITQAVTTTTQRPSSMTTTWRLSSTTTTTGLRVTQGKRRSDSWHISLETAVGVAVAVTVLGIMILGLICLLRWRRRKGQQRTKATTPAREPFQNTEEPYENIRNEGQNTDPKLNPKDDGIVYASLALSSSTSPRAPPSHRPLKSPQNETLYSVLKA

SEQ ID NO: 164 - protein, 651 aa, Homo sapiens
MAAPLLHTRLPGDAAASSSAVKKLGASRTGISNMRALENDFFNSPPRKTVRFGGTVTEVLLKYKKGETNDFELLKNQLLDPDIKDDQIINWLLEFRSSIMYLTKDFEQLISIILRLPWLNRSQTVVEEYLAFLGNLVSAQTVFLRPCLSMIASHFVPPRVIIKEGDVDVSDSDDEDDNLPANFDTCHRALQIIARYVPSTPWFLMPILVEKFPFVRKSERTLECYVHNLLRISVYFPTLRHEILELIIEKLLKLDVNASRQGIEDAEETATQTCGGTDSTEGLFNMDEDEETEHETKAGPERLDQMVHPVAERLDILMSLVLSYMKDVCYVDGKVDNGKTKDLYRDLINIFDKLLLPTHASCHVQFFMFYLCSFKLGFAEAFLEHLWKKLQDPSNPAIIRQAAGNYIGSFLARAKFIPLITVKSCLDLLVNWLHIYLNNQDSGTKAFCDVALHGPFYSACQAVFYTFVFRHKQLLSGNLKEGLQYLQSLNFERIVMSQLNPLKICLPSVVNFFAAITNKYQLVFCYTIIERNNRQMLPVIRSTAGGDSVQICTNPLDTFFPFDPCVLKRSKKFIDPIYQVWEDMSAEELQEFKKPMKKDIVEDEDDDFLKGEVPQNDTVIGITPSSFDTHFRSPSSSVGSPPVLYMQPSPL

SEQ ID NO: 165 - protein, 927 aa, Homo sapiens
MEMPLPPDDQELRNVIDKLAQFVARNGPEFEKMTMEKQKDNPKFSFLFGGEFYSYYKCKLALEQQQLICKQQTPELEPAATMPPLPQPPLAPAAPIPPAQGAPSMDELIQQSQWNLQQQEQHLLALRQEQVTAAVAHAVEQQMQKLLEETQLDMNEFDNLLQPIIDTCTKDAISAGKNWMFSNAKSPPHCELMAGHLRNRITADGAHFELRLHLIYLINDVLHHWALTRGKSLPHSQRKQARELLAALQKVVVPIYCTSFLAVEEDKQQKIARLLQLWEKNGYFDDSIIQQLQSPALGLGQYQATLINEYSSVVQPVQLAFQQQIQTLKTQHEEFVTSLAQQQQQQQQQQQQLQMPQMEAEVKATPPPPAPPPAPAPAPAIPPTTQPDDSKPPIQMPGSSEYEAPGGVQDPAAAGPRGPGPHDQIPPNKPPWFDQPHPVAPWGQQQPPEQPPYPHHQGGPPHCPPWNNSHEGMWGEQRGDPGWNGQRDAPWNNQPDAAWNSQFEGPWNSQHEQPPWGGGQREPPFRMQRPPHFRGPFPPHQQHPQFNQPPHPHNFNRFPPRFMQDDFPPRHPFERPPYPHRFDYPQGDFPAEMGPPHHHPGHRMPHPGINEHPPWAGPQHPDFGPPPHGFNGQPPHMRRQGPPHINHDDPSLVPNVPYFDLPAGLMAPLVKLEDHEYKPLDPKDIRLPPPMPPSERLLAAVEAFYSPPSHDRPRNSEGWEQNGLYEFFRAKMRARRRKGQEKRNSGPSRSRSRSKSRGRSSSRSNSRSSKSSGSYSRSRSRSCSRSYSRSRSRSRSRSRSSRSRSRSQSRSRSKSYSPGRRRRSRSRSPTPPSSAGLGSNSAPPIPDSRLGEENKGHQMLVKMGWSGSGGLGAKEQGIQDPIKGGDVRDKWDQYKGVGVALDDPYENYRRNKSYSFIARMKARDECK

SEQ ID NO: 166 - protein, 630 aa, Homo sapiens
MQGGNSGVRKREEEGDGAGAVAAPPAIDFPAEGPDPEYDESDVPAEIQVLKEPLQQPTFPFAVANQLLLVSLLEHLSHVHEPNPLRSRQVFKLLCQTFIKMGLLSSFTCSDEFSSLRLHHNRAITHLMRSAKERVRQDPCEDISRIQKIRSREVALEAQTSRYLNEFEELAILGKGGYGRVYKVRNKLDGQYYAIKKILIKGATKTVCMKVLREVKVLAGLQHPNIVGYHTAWIEHVHVIQPRADRAAIELPSLEVLSDQEEDREQCGVKNDESSSSSIIFAEPTPEKEKRFGESDTENQNNKSVKYTTNLVIRESGELESTLELQENGLAGLSASSIVEQQLPLRRNSHLEESFTSTEESSEENVNFLGQTEAQYHLMLHIQMQLCELSLWDWIVERNKRGREYVDESACPYVMANVATKIFQELVEGVFYIHNMGIVHRDLKPRNIFLHGPDQQVKIGDFGLACTDILQKNTDWTNRNGKRTPTHTSRVGTCLYASPEQLEGSEYDAKSDMYSLGVVLLELFQPFGTEMERAEVLTGLRTGQLPESLRKRCPVQAKYIQHLTRRNSSQRPSAIQLLQSELFQNSGNVNLTLQMKIIEQEKEIAELKKQLNLLSQDKGVRDDGKDGGVG

SEQ ID NO: 167 - protein, 588 aa, Homo sapiens
MASKKREVQLQTVINNQSLWDEMLQNKGLTVIDVYQAWCGPCRAMQPLFRKLKNELNEDEILHFAVAEADNIVTLQPFRDKCEPVFLFSVNGKIIEKIQGANAPLVNKKVINLIDEERKIAAGEMARPQYPEIPLVDSDSEVSEESPCESVQELYSIAIIKPDAVISKKVLEIKRKITKAGFIIEAEHKTVLTEEQVVNFYSRIADQCDFEEFVSFMTSGLSYILVVSQGSKHNPPSEETEPQTDTEPNERSEDQPEVEAQVTPGMMKNKQDSLQEYLERQHLAQLCDIEEDAANVAKFMDAFFPDFKKMKSMKLEKTLALLRPNLFHERKDDVLRIIKDEDFKILEQRQVVLSEKEAQALCKEYENEDYFNKLIENMTSGPSLALVLLRDNGLQYWKQLLGPRTVEEAIEYFPESLCAQFAMDSLPVNQLYGSDSLETAEREIQHFFPLQSTLGLIKPHATSEQREQILKIVKEAGFDLTQVKKMFLTPEQIEKIYPKVTGKDFYKDLLEMLSVGPSMVMILTKWNAVAEWRRLMGPTDPEEAKLLSPDSIRAQFGISKLKNIVHGASNAYEAKEVVNRLFEDPEEN

SEQ ID NO: 168 - protein, 224 aa, Homo sapiens
MPGRAPLRTVPGALGAWLLGGLWAWTLCGLCSLGAVGAPRPCQAPQQWEGRQVMYQQSSGRNSRALLSYDGLNQRVRVLDERKALIPCKRLFEYILLYKDGVMFQIDQATKQCSKMTLTQPWDPLDIPQNSTFEDQYSIGGPQEQITVQEWSDRKSARSYETWIGIYTVKDCYPVQETFTINYSVILSTRFFDIQLGIKDPSVFTPPSTCQMAQLEKMSEDCSW

SEQ ID NO: 169 - protein, 344 aa, Homo sapiens
MGPPSAPPCRLHVPWKEVLLTASLLTFWNPPTTAKLTIESTPFNVAEGKEVLLLAHNLPQNRIGYSWYKGERVDGNSLIVGYVIGTQQATPGPAYSGRETIYPNASLLIQNVTQNDTGFYTLQVIKSDLVNEEATGQFHVYPELPKPSISSNNSNPVEDKDAVAFTCEPEVQNTTYLWWVNGQSLPVSPRLQLSNGNMTLTLLSVKRNDAGSYECEIQNPASANRSDPVTLNVLYGPDVPTISPSKANYRPGENLNLSCHAASNPPAQYSWFINGTFQQSTQELFIPNITVNNSGSYMCQAHNSATGLNRTTVTMITVSGSAPVLSAVATVGITIGVLARVALI

SEQ ID NO: 170 - protein, 387 aa, Homo sapiens
MSTFFSDTAWICLAVPTVLCGTVFCKYKKSSGQLWSWMVCLAGLCAVCLLILSPFWGLILFSVSCFLMYTYLSGQELLPVDQKAVLVTGGDCGLGHALCKYLDELGFTVFAGVLNENGPGAEELRRTCSPRLSVLQMDITKPVQIKDAYSKVAAMLQDRGLWAVINNAGVLGFPTDGELLLMTDYKQCMAVNFFGTVEVTKTFLPLLRKSKGRLVNVSSMGGGAPMERLASYGSSKAAVTMFSSVMRLELSKWGIKVASIQPGGFLTNIAGTSDKWEKLEKDILDHLPAEVQEDYGQDYILAQRNFLLLINSLASKDFSPVLRDIQHAILAKSPFAYYTPGKGAYLWICLAHYLPIGIYDYFAKRHFGQDKPMPRALRMPNYKKKAT

SEQ ID NO: 171 - protein, 559 aa, Homo sapiens
MADERKDEAKAPHWTSAPLTEASAHSHPPEIKDQGGAGEGLVRSANGFPYREDEEGAFGEHGSQGTYSNTKENGINGELTSADRETAEEVSARIVQVVTAEAVAVLKGEQEKEAQHKDQTAALPLAAEETANLPPSPPPSPASEQTVTVEEAAGGESALAPSVFKQAKDKVSNSTLSKIPALQGSTKSPRYSSACPSTTKRATFSDSLLIQPTSAGSTDRLPYSKSGNKDGVTKSPEKRSSLPRPSSILPPRRGVSGDRDENSFSLNSSISSSARRTTRSEPIRRAGKSGTSTPTTPGSTAITPGTPPSYSSRTPGTPGTPSYPRTPHTPGTPKSAILVPSEKKVAIIRTPPKSPATPKQLRLINQPLPDLKNVKSKIGSTDNIKYQPKGGQVRILNKKIDFSKVQSRCGSKDNIKHSAGGGNVQIVTKKIDLSHVTSKCGSLKNIRHRPGGGRVKIESVKLDFKEKAQAKVGSLDNAHHVPGGGNVKIDSQKLNFREHAKARVDHGAEIITQSPGRSSVASPRRLSNVSSSGSINLLESPQLATLAEDVTAALAKQGL

SEQ ID NO: 172 - protein, 779 aa, Homo sapiens
MASFVTEVLAHSGRLEKEDLGTRISRLTRRVEEIKGEVCNMISKKYSEFLPSMQSAQGLITQVDKLSEDIDLLKSRIESEVRRDLHVSTGEFTDLKQQLERDSVVLSLLKQLQEFSTAIEEYNCALTEKKYVTGAQRLEEAQKCLKLLKSRKCFDLKILKSLSMELTIQKQNILYHLGEEWQKLIVWKFPPSKDTSSLESYLQTELHLYTEQSHKEEKTPMPPISSVLLAFSVLGELHSKLKSFGQMLLKYILRPLASCPSLHAVIESQPNIVIIRFESIMTNLEYPSPSEVFTKIRLVLEVLQKQLLDLPLDTDLENEKTSTVPLAEMLGDMIWEDLSECLIKNCLVYSIPTNSSKLQQYEEIIQSTEEFENALKEMRFLKGDTTDLLKYARNINSHFANKKCQDVIVAARNLMTSEIHNTVKIIPDSKINVPELPTPDEDNKLEVQKVSNTQYHEVMNLEPENTLDQHSFSLPTCRISESVKKLMELAYQTLLEATTSSDQCAVQLFYSVRNIFHLFHDVVPTYHKENLQKLPQLAAIHHNNCMYIAHHLLTLGHQFRLRLAPILCDGTATFVDLVPGFRRLGTECFLAQMRAQKGELLERLSSARNFSNMDDEENYSAASKAVRQVLHQLKRLGIVWQDVLPVNIYCKAMGTLLNTAISEVIGKITALEDISTEDGDRLYSLCKTVMDEGPQVFAPLSEESKNKKYQEEVPVYVPKWMPFKELMMMLQASLQEIGDRWADGKGPLAAAFSSSEVKALIRALFQNTERRAAALAKIK

SEQ ID NO: 173 - protein, 1822 aa, Homo sapiens
MAGPRPSPWARLLLAALISVSLSGTLANRCKKAPVKSCTECVRVDKDCAYCTDEMFRDRRCNTQAELLAAGCQRESIVVMESSFQITEETQIDTTLRRSQMSPQGLRVRLRPGEERHFELEVFEPLESPVDLYILMDFSNSMSDDLDNLKKMGQNLARVLSQLTSDYTIGFGKFVDKVSVPQTDMRPEKLKEPWPNSDPPFSFKNVISLTEDVDEFRNKLQGERISGNLDAPEGGFDAILQTAVCTRDIGWRPDSTHLLVFSTESAFHYEADGANVLAGIMSRNDERCHLDTTGTYTQYRTQDYPSVPTLVRLLAKHNIIPIFAVTNYSYSYYEKLHTYFPVSSLGVLQEDSSNIVELLEEAFNRIRSNLDIRALDSPRGLRTEVTSKMFQKTRTGSFHIRRGEVGIYQVQLRALEHVDGTHVCQLPEDQKGNIHLKPSFSDGLKMDAGIICDVCTCELQKEVRSARCSFNGDFVCGQCVCSEGWSGQTCNCSTGSLSDIQPCLREGEDKPCSGRGECQCGHCVCYGEGRYEGQFCEYDNFQCPRTSGFLCNDRGRCSMGQCVCEPGWTGPSCDCPLSNATCIDSNGGICNGRGHCECGRCHCHQQSLYTDTICEINYSAIHPGLCEDLRSCVQCQAWGTGEKKGRTCEECNFKVKMVDELKRAEEVVVRCSFRDEDDDCTYSYTMEGDGAPGPNSTVLVHKKKDCPPGSFWWLIPLLLLLLPLLALLLLLCWKYCACCKACLALLPCCNRGHMVGFKEDHYMLRENLMASDHLDTPMLRSGNLKGRDVVRWKVTNNMQRPGFATHAASINPTELVPYGLSLRLARLCTENLLKPDTRECAQLRQEVEENLNEVYRQISGVHKLQQTKFRQQPNAGKKQDHTIVDTVLMAPRSAKPALLKLTEKQVEQRAFHDLKVAPGYYTLTADQDARGMVEFQEGVELVDVRVPLFIRPEDDDEKQLLVEAIDVPAGTATLGRRLVNITIIKEQARDVVSFEQPEFSVSRGDQVARIPVIRRVLDGGKSQVSYRTQDGTAQGNRDYIPVEGELLFQPGEAWKELQVKLLELQEVDSLLRGRQVRRFHVQLSNPKFGAHLGQPHSTTIIIRDPDELDRSFTSQMLSSQPPPHGDLGAPQNPNAKAAGSRKIHFNWLPPSGKPMGYRVKYWIQGDSESEAHLLDSKVPSVELTNLYPYCDYEMKVCAYGAQGEGPYSSLVSCRTHQEVPSEPGRLAFNVVSSTVTQLSWAEPAETNGEITAYEVCYGLVNDDNRPIGPMKKVLVDNPKNRMLLIENLRESQPYRYTVKARNGAGWGPEREAIINLATQPKRPMSIPIIPDIPIVDAQSGEDYDSFLMYSDDVLRSPSGSQRPSVSDDTGCGWKFEPLLGEELDLRRVTWRLPPELIPRLSASSGRSSDAEAPHGPPDDGGAGGKGGSLPRSATPGPPGEHLVNGRMDFAFPGSTNSLHRMTTTSAAAYGTHLSPHVPHRVLSTSSTLTRDYNSLTRSEHSHSTTLPRDYSTLTSVSSHDSRLTAGVPDTPTRLVFSALGPTSLRVSWQEPRCERPLQGYSVEYQLLNGGELHRLNIPNPAQTSVVVEDLLPNHSYVFRVRAQSQEGWGREREGVITIESQVHPQSPLCPLPGSAFTLSTPSAPGPLVFTALSPDSLQLSWERPRRPNGDIVGYLVTCEMAQGGGPATAFRVDGDSPESRLTVPGLSENVPYKFKVQARTTEGFGPEREGIITIESQDGGPFPQLGSRAGLFQHPLQSEYSSITTTHTSATEPFLVDGLTLGAQHLEAGGSLTRHVTQEFVSRTLTTSGTLSTHMDQQFFQT

SEQ ID NO: 174 - protein, 476 aa, Homo sapiens
MSGPTWLPPKQPEPARAPQGRAIPRGTPGPPPAHGAALQPHPRVNFCPLPSEQCYQAPGGPEDRGPAWVGSHGVLQHTQGLPADRGGLRPGSLDAEIDLLSSTLAELNGGRGHASRRPDRQAYEPPPPPAYRTGSLKPNPASPLPASPYGGPTPASYTTASTPAGPAFPVQVKVAQPVRGCGPPRRGASQASGPLPGPHFPLPGRGEVWGPGYRSQREPGPGAKEEAAGVSGPAGRGRGGEHGPQVPLSQPPEDELDRLTKKLVHDMNHPPSGEYFGQCGGCGEDVVGDGAGVVALDRVFHVGCFVCSTCRAQLRGQHFYAVERRAYCEGCYVATLEKCATCSQPILDRILRAMGKAYHPGCFTCVVCHRGLDGIPFTVDATSQIHCIEDFHRKFAPRCSVCGGAIMPEPGQEETVRIVALDRSFHIGCYKCEECGLLLSSEGECQGCYPLDGHILCKACSAWRIQELSATVTTDC

SEQ ID NO: 175 - protein, 769 aa, Homo sapiens
MRLLRRWAFAALLLSLLPTPGLGTQGPAGALRWGGLPQLGGPGAPEVTEPSRLVRESSGGEVRKQQLDTRVRQEPPGGPPVHLAQVSFVIPAFNSNFTLDLELNHHLLSSQYVERHFSREGTTQHSTGAGDHCYYQGKLRGNPHSFAALSTCQGLHGVFSDGNLTYIVEPQEVAGPWGAPQGPLPHLIYRTPLLPDPLGCREPGCLFAVPAQSAPPNRPRLRRKRQVRRGHPTVHSETKYVELIVINDHQLFEQMRQSVVLTSNFAKSVVNLADVIYKEQLNTRIVLVAMETWADGDKIQVQDDLLETLARLMVYRREGLPEPSDATHLFSGRTFQSTSSGAAYVGGICSLSHGGGVNEYGNMGAMAVTLAQTLGQNLGMMWNKHRSSAGDCKCPDIWLGCIMEDTGFYLPRKFSRCSIDEYNQFLQEGGGSCLFNKPLKLLDPPECGNGFVEAGEECDCGSVQECSRAGGNCCKKCTLTHDAMCSDGLCCRRCKYEPRGVSCREAVNECDIAETCTGDSSQCPPNLHKLDGYYCDHEQGRCYGGRCKTRDRQCQVLWGHAAADRFCYEKLNVEGTERGSCGRKGSGWVQCSKQDVLCGFLLCVNISGAPRLGDLVGDISSVTFYHQGKELDCRGGHVQLADGSDLSYVEDGTACGPNMLCLDHRCLPASAFNFSTCPGSGERRICSHHGVCSNEGKCICQPDWTGKDCSIHNPLPTSPPTGETERYKGPSGTNIIIGSIAGAVLVAAIVLGGTGWGFKNIRRGRSGGA

SEQ ID NO: 176 - protein, 551 aa, Homo sapiens
MRDYDEVIAFLGEWGPFQRLIFFLLSASIIPNGFNGMSVVFLAGTPEHRCRVPDAANLSSAWRNNSVPLRLRDGREVPHSCSRYRLATIANFSALGLEPGRDVDLGQLEQESCLDGWEFSQDVYLSTVVTEWNLVCEDNWKVPLTTSLFFVGVLLGSFVSGQLSDRFGRKNVLFATMAVQTGFSFLQIFSISWEMFTVLFVIVGMGQISNYVVAFILGTEILGKSVRIIFSTLGVCTFFAVGYMLLPLFAYFIRDWRMLLLALTVPGVLCVPLWWFIPESPRWLISQRRFREAEDIIQKAAKMNNIAVPAVIFDSVEELNPLKQQKAFILDLFRTRNIAIMTIMSLLLWMLTSVGYFALSLDAPNLHGDAYLNCFLSALIEIPAYITAWLLLRTLPRRYIIAAVLFWGGGVLLFIQLVPVDYYFLSIGLVMLGKFGITSAFSMLYVFTAELYPTLVRNMAVGVTSTASRVGSIIAPYFVYLGAYNRMLPYIVMGSLTVLIGILTLFFPESLGMTLPETLEQMQKVKWFRSGKKTRDSMETEENPKVLITAF

SEQ ID NO: 177 - protein, 493 aa, Homo sapiens [sequence omitted]

SEQ ID NO: 178 - protein, 175 aa, Homo sapiens
MQRRLVQQWSVAVFLLSYAVPSCGRSVEGLSRRLKRAVSEHQLLHDKGKSIQDLRRRFFLHHLIAEIHTAEIRATSEVSPNSKPSPNTKNHPVRFGSDDEGRYLTQETNKVETYKEQPLKTPGKKKKGKPGKRKEQEKKKRRTRSAWLDSGVTGSGLEGDHLSDTSTTSLELDSR

SEQ ID NO: 179 - protein, 450 aa, Homo sapiens
MLWKITDNVKYEEDCEDRHDGSSNGNPRVPHLSSAGQHLYSPAPPLSHTGVAEYQPPPYFPPPYQQLAYSQSADPYSHLGEAYAAAINPLHQPAPTGSQQQAWPGRQSQEGAGLPSHHGRPAGLLPHLSGLEAGAVSARRDAYRRSDLLLPHAHALDAAGLAENLGLHDMPHQMDEVQNVDDQHLLLHDQTVIRKGPISMTKNPLNLPCQKELVGAVMNPTEVFCSVPGRLSLLSSTSKYKVTVAEVQRRLSPPECLNASLLGGVLRRAKSKNGGRSLREKLDKIGLNLPAGRRKAAHVTLLTSLVEGEAVHLARDFAYVCEAEFPSKPVAEYLTRPHLGGRNEMAARKNMLLAAQQLCKEFTELLSQDRTPHGTSRLAPVLETNIQNCLSHFSLITHGFGSQAICAAVSALQNYIKEALIVIDKSYMNPGDQSPADSNKTLEKMEKHRK

SEQ ID NO: 180 - protein, 365 aa, Homo sapiens
MDGPAEPQIPGLWDTYEDDISEISQKLPGEYFRYKGVPFPVGLYSLESISLAENTQDVRDDDIFIITYPKSGTTWMIEIICLILKEGDPSWIRSVPIWERAPWCETIVGAFSLPDQYSPRLMSSHLPIQIFTKAFFSSKAKVIYMGRNPRDVVVSLYHYSKIAGQLKDPGTPDQFLRDFLKGEVQFGSWFDHIKGWLRMKGKDNFLFITYEELQQDLQGSVERICGFLGRPLGKEALGSVVAHSTFSAMKANTMSNYTLLPPSLLDHRRGAFLRKGVCGDWKNHFTVAQSEAFDRAYRKQMRGMPTFPWDEDPEEDGSPDPEPSPEPEPKPSLEPNTSLEREPRPNSSPSPSPGQASETPHPRPS

SEQ ID NO: 181 - protein, 723 aa, Homo sapiens
MSTATGPEAAPKPSAKSIYEQRKRYSTVVMADVSQYPVNHLVTFCLGEDDGVHTVEDASRKLAVMDSQGRVWAQEMLLRVSPDHVTLLDPASKEELESYPLGAIVRCDAVMPPGRSRSLLLLVCQEPERAQPDVHFFQGLRLGAELIREDIQGALHNYRSGRGERRAAALRATQEELQRDRSPAAETPPLQRRPSVRAVISTVERGAGRGRPQAKPIPEAEEAQRPEPVGTSSNADSASPDLGPRGPDLAVLQAEREVDILNHVFDDVESFVSRLQKSAEAARVLEHRERGRRSRRRAAGEGLLTLRAKPPSEAEYTDVLQKIKYAFSLLARLRGNIADPSSPELLHFLFGPLQMIVNTSGGPEFASSVRRPHLTSDAVALLRDNVTPRENELWTSLGDSWTRPGLELSPEEGPPYRPEFFSGWEPPVTDPQSRAWEDPVEKQLQHERRRRQQSAPQVAVNGHRDLEPESEPQLESETAGKWVLCNYDFQARNSSELSVKQRDVLEVLDDSRKWWKVRDPAGQEGYVPYNILTPYPGPRLHHSQSPARSLNSTPPPPPAPAPAPPPALARPRWDRPRWDSCDSLNGLDPSEKEKFSQMLIVNEELQARLAQGRSGPSRAVPGPRAPEPQLSPGSDASEVRAWLQAKGFSSGTVDALGVLTGAQLFSLQKEELRAVSPEEGARVYSQVTVQRSLLEDKEKVSELEAVMEKQKKKVEGEVEMEVI

SEQ ID NO: 182 - protein, 845 aa, Homo sapiens
MEPSPEPPSLESMKGDTRHLNGEEDAGGREDSILVNGACSDQSSDSPPILEAIRTPEIRGRRSSSRLSKREVSSLLSYTQDLTGDGDGEDGDGSDTPVMPKLFRETRTRSESPAVRTRNNNSVSSRERHRPSPRSTRGRQGRNHVDESPVEFPATRSLRRRATASAGTPWPSPPSSYLTIDLTDDTEDTHGTPQSSSTPYARLAQDSQQGGMESPQVEADSGDGDSSEYQDGKEFGIGDLVWGKIKGFSWWPAMVVSWKATSKRQAMSGMRWVQWFGDGKFSEVSADKLVALGLFSQHFNLATFNKLVSYRKAMYHALEKARVRAGKTFPSSPGDSLEDQLKPMLEWAHGGFKPTGIEGLKPNNTQPENKTRRRTADDSATSDYCPAPKRLKTNCYNNGKDRGDEDQSREQMASDVANNKSSLEDGCLSCGRKNPVSFHPLFEGGLCQTCRDRFLELFYMYDDDGYQSYCTVCCEGRELLLCSNTSCCRCFCVECLEVLVGTGTAAEAKLQEPWSCYMCLPQRCHGVLRRRKDWNVRLQAFFTSDTGLEYEAPKLYPAIPAARRRPIRVLSLFDGIATGYLVLKELGIKVGKYVASEVCEESIAVGTVKHEGNIKYVNDVRNITKKNIEEWGPFDLVIGGSPCNDLSNVNPARKGLYEGTGRLFFEFYHLLNYSRPKEGDDRPFFWMFENVVAMKVGDKRDISRFLECNPVMIDAIKVSAAHRARYFWGNLPGMNRPVIASKNDKLELQDCLEYNRIAKLKKVQTITTKSNSIKQGKNQLFPVVMNGKEDVLWCTELERIFGFPVHYTDVSNMGRGARQKLLGRSWSVPVIRHLFAPLKDYFACE

SEQ ID NO: 183 - protein, 298 aa, Homo sapiens
MTLNTEQEAKTPLHRRASTPLPLSPRGHQPGRLSTVPSTQSQHPRLGQSASLNPPTQKPSPAPDDWSSESSDSEGSWEALYRVVLLGDPGVGKTSLASLFAGKQERDLHEQLGEDVYERTLTVDGEDTTLVVVDTWEAEKLDKSWSQESCLQGGSAYVIVYSIADRGSFESASELRIQLRRTHQADHVPIILVGNKADLARCREVSVEEGRACAVVFDCKFIETSATLQHNVAELFEGVVRQLRLRRRDSAAKEPPAPRRPASLAQRARRFLARLTARSARRRALKARSKSCHNLAVL

SEQ ID NO: 184 - protein, 779 aa, Homo sapiens
MEEKDYSEADGLSERTTPSKAQKSPQKIAKKYKSAICRVTLLDASEYECEVEKHGRGQVLFDLVCEHLNLLEKDYFGLTFCDADSQKNWLDPSKEIKKQIRSSPWNFAFTVKFYPPDPAQLTEDITRYYLCLQLRADIITGRLPCSFVTHALLGSYAVQAELGDYDAEEHVGNYVSELRFAPNQTRELEERIMELHKTYRGMTPGEAEIHFLENAKKLSMYGVDLHHAKDSEGIDIMLGVCANGLLIYRDRLRINRFAWPKILKISYKRSNFYIKIRPGEYEQFESTIGFKLPNHRSAKRLWKVCIEHHTFFRLVSPEPPPKGFLVMGSKFRYSGRTQAQTRQASALIDRPAPFFERSSSKRYTMSRSLDGAEFSRPASVSENHDAGPDGDKRDEDGESGGQRSEAEEGEVRTPTKIKELKFLDKPEDVLLKHQASINELKRTLKEPNSKLIHRDRDWERERRLPSSPASPSPKGTPEKANERAGLREGSEEKVKPPRPRAPESDTGDEDQDQERDTVFLKDNHLAIERKCSSITVSSTSSLEAEVDFTVIGDYHGSAFEDFSRSLPELDRDKSDSDTEGLLFSRDLNKGAPSQDDESGGIEDSPDRGACSTPDMPQFEPVKTETMTVSSLAIRKKIEPEAVLQTRVSAMDNTQENSLKSGKGAAAMIPGPQTVATEIRSLSPIIGKDVLTSTYGATAETLSTSTTTHVTKTVKGGFSETRIEKRIIITGDEDVDQDQALALAIKEAKLQHPDMLVTKAVVYRETDPSPEERDKKPQES

SEQ ID NO: 185 - protein, 706 aa, Homo sapiens
MAGIRVTKVDWQRSRNGAAHHTQEYPCPELVVRRGQSFSLTLELSRALDCEEILIFTMETGPRASEALHTKAVFQTSELERGEGWTAAREAQMEKTLTVSLASPPSAVIGRYLLSIRLSSHRKHSNRRLGEFVLLFNPWCAEDDVFLASEEERQEYVLSDSGIIFRGVEKHIRAQGWNYGQFEEDILNICLSILDRSPGHQNNPATDVSCRHNPIYVTRVISAMVNSNNDRGVVQGQWQGKYGGGTSPLHWRGSVAILQKWLKGRYKPVKYGQCWVFAGVLCTVLRCLGIATRVVSNFNSAHDTDQNLSVDKYVDSFGRTLEDLTEDSMWNFHVWNESWFARQDLGPSYNGWQVLDATPQEESEGVFRCGPASVTAIREGDVHLAHDGPFVFAEVNADYITWLWHEDESRERVYSNTKKIGRCISTKAVGSDSRVDITDLYKYPEGSRKERQVYSKAVNRLFGVEASGRRIWIRRAGGRCLWRDDLLEPATKPSIAGKFKVLEPPMLGHDLRLALCLANLTSRAQRVRVNLSGATILYTRKPVAEILHESHAVRLGPQEEKRIPITISYSKYKEDLTEDKKILLAAMCLVTKGEKLLVEKDITLEDFITIKVLGPAMVGVAVTVEVTVVNPLIERVKDCALMVEGSGLLQEQLSIDVPTLEPQERASVQFDITPSKSGPRQLQVDLVSPHFPDIKGFVIVHVATAK

SEQ ID NO: 186 - protein, 1873 aa, Homo sapiens
MFSRRSHGDVKKSTQKVLDPKKDVLTRLKHLRALLDNVDANDLKQFFETNYSQIYFIFYENFIALENSLKLKGNNKSQREELDSILFLFEKILQFLPERIFFRWHYQSIGSTLKKLLHTGNSIKIRCEGIRLFLLWLQALQTNCAEEQVLIFACLVPGFPAVMSSRGPCTLETLINPSPSVADVKIYPEEITPLLPAISGEKIAEDQTCFFLQILLKYMVIQAASLEWKNKENQDTGFKFLFTLFRKYYLPHLFPSFTKLTNIYKPVLDIPHLRPKPVYITTTRDNENIYSTKIPYMAARVVFIKWIVTFFLEKKYLTATQNTKNGVDVLPKIIQTVGGGAVQERAPELDGGGPTEQDKSHSNSSTLSDRRLSNSSLCSIEEEHRMVYEMVQRILLSTRGYVNFVNEVFHQAFLLPSCEIAVTRKVVQVYRKWILQDKPVFMEEPDRKDVAQEDAEKLGFSETDSKEASSESSGHKRSSSWGRTYSFTSAMSRGCVTEEENTNVKAGVQALLQVFLTNSANIFLLEPCAEVPVLLKEQVDACKAVLIIFRRMIMELTMNKKTWEQMLQILLRITEAVMQKPKDKQIKDLFAQSLAGLLFRTLMVAWIRANLCVYISRELWDDFLGVLSSLTEWEELINEWANIMDSLTAVLARTVYGVEMTNLPLDKLSEQKEKKQRGKGCVLDPQKGTTVGRSFSLSWRSHPDVTEPMRFRSATTSGAPGVEKARNIVRQKATEVEECQQSENAPAAGSGHLTVGQQQQVLRSSSTSDIPEPLCSDSSQGQKAENTQNSSSSEPQPIQENKGHVKREHEGITILVRRSSSPAELDLKDDLQQTQGKCRERQKSESTNSDTTLGCTNEAELSMGPWQTCEEDPELNTPTDVVADADARHWLQLSPTDASNLTDSSECLTDDCSIIAGGSLTGWHPDSAAVLWRRVLGILGDVNNIQSPKIHARVFCYLYELWYKLAKIRDNLAISLDNQSSPSPPVLIPPLRMFASWLFKAATLPNEYKEGKLQAYRLICAMMTRRQDVLPNSDFLVHFYLVMHLGLTSEDQDILNTIIRHCPPRFFSLGFPGFSMLVGDFITAAARVLSTDILTAPRSEAVTVLGSLVCFPNTYQEIPLLQSVPEVNEAITGTEDVKHYLINILLKNATEEPNEYARCIAVCSLGVWICEELAQCTSHPQVKEAINVIGVTLKFPNKIVAQVACDVLQLLVSYWEKLQMFETSLPRKMAEILVATVAFLLPSAEYSSVETDKKFIVSLLLCLLDWCMALPVSVLLHPVSTAVLEEQHSARAPLLDYIYRVLHCCVCGSSTYTQQSHYILTLADLSSTDYDPFLPLANVKSSEPVQYHSSAELGNLLTVEEEKKRRSLELIPLTARMVMAHLVNHLGHYPLSGGPAILHSLVSENHDNAHVEGSELSFEVFRSPNLQLFVFNDSTLISYLQTPTEGPVGGSPVGSLSDVRVIVRDISGKYSWDGKVLYGPLEGCLAPNGRNPSFLISSWHRDTFGPQKDSSQVEEGDDVLDKLLENIGHTSPECLLPSQLNLNEPSLTPCGMNYDQEKEIIEVILRQNAQEDEYIQSHNFDSAMKVTSQGQPSPVEPRGPFYFCRLLLDDLGMNSWDRRKNFHLLKKNSKLLRELKNLDSRQCRETHKIAVFYIAEGQEDKCSILSNERGSQAYEDFVAGLGWEVDLSTHCGFMGGLQRNGSTGQTAPYYATSTVEVIFHVSTRMPSDSDDSLTKKLRHLGNDEVHIVWSEHSRDYRRGIIPTAFGDVSIIIYPMKNHMFFIAITKKPEVPFFGPLFDGAIVSGKLLPSLVCATCINASRAVKCLIPLYQSFYEERALYLEAIIQNHREVMTFEDFAAQVFSPSPSYSLSGTD

SEQ ID NO: 187 - protein, 288 aa, Homo sapiens [sequence omitted]

SEQ ID NO: 188 - protein, 851 aa, Homo sapiens
MSSKQEIMSDQRFRRVAKDPRFWEMPEKDRKVKIDKRFRAMFHDKKFKLNYAVDKRGRPISHSTTEDLKRFYDLSDSDSNLSGEDSKALSQKKIKKKKTQTKKEIDSKNLVEKKKETKKANHKGSENKTDLDNSIGIKKMKTSCKFKIDSNISPKKDSKEFTQKNKKEKKNIVQHTTDSSLEEKQRTLDSGTSEIVKSPRIECSKTRREMQSVVQLIMTRDSDGYENSTDGEMCDKDALEEDSESVSEIGSDEESENEITSVGRASGDDDGSEDDEEEDEDEEEDEDEDSEDDDKSDSGPDLARGKGNIETSSEDEDDTADLFPEESGFEHAWRELDKDAPRADEITRRLAVCNMDWDRLKAKDLLALFNSFKPKGGVIFSVKIYPSEFGKERMKEEQVQGPVELLSIPEDAPEKDWTSREKLRDYQFKRLKYYYAVVDCDSPETASKIYEDCDGLEFESSCSFIDLRFIPDDITFDDEPKDVASEVNLTAYKPKYFTSAAMGTSTVEITWDETDHERITMLNRKFKKEELLDMDFQAYLASSSEDEEEIEEELQGDDGVNVEEDGKTKKSQKDDEEQIAKYRQLLQVIQEKEKKGKENDMEMEIKWVPGLKESAEEMVKNKLEGKDKLTPWEQFLEKKKEKKRLKRKQKALAEEASEEELPSDVDLNDPYFAEEVKQIGINKKSVKSAKDGTSPEEEIEIERQKAEMALLMMDEDEDSKKHFNYNKIVEHQNLSKKKKKQLMKKKELIEDDFEVNVNDARFQAMYTSHLFNLDPSDPNFKKTKAMEKILEEKARQRERKEQELTQAIKKKESEIEKESQRKSIDPALSMLIKSIKTKTEQFQARKKQKVK

SEQ ID NO: 189 - protein, 400 aa, Homo sapiens
MMDLRNTPAKSLDKFIEDYLLPDTCFRMQINHAIDIICGFLKERCFRGSSYPVCVSKVVKGGSSGKGTTLRGRSDADLVVFLSPLTTFQDQLNRRGEFIQEIRRQLEACQRERAFSVKFEVQAPRWGNPRALSFVLSSLQLGEGVEFDVLPAFDALGQLTGGYKPNPQIYVKLIEECTDLQKEGEFSTCFTELQRDFLKQRPTKLKSLIRLVKHWYQNCKKKLGKLPPQYALELLTVYAWERGSMKTHFNTAQGFRTVLELVINYQQLCIYWTKYYDFKNPIIEKYLRRQLTKPRPVILDPADPTGNLGGGDPKGWRQLAQEAEAWLNYPCFKNWDGSPVSSWILLAESNSADDETDDPRRYQKYGYIGTHEYPHFSHRPSTLQAASTPQAEEDWTCTIL

SEQ ID NO: 190 - protein, 970 aa, Homo sapiens
MDAAEPGLPPGPEGRKRYSDIFRSLDNLEISLGNVTLEMLAGDPLLSEDPEPDKTPTATVTNEASCWSGPSPEGPVPLTGEELDLRLIRTKGGVDAALEYAKTWSRYAKELLAWTEKRASYELEFAKSTMKIAEAGKVSIQQQSHMPLQYIYTLFLEHDLSLGTLAMETVAQQKRDYYQPLAAKRTEIEKWRKEFKEQWMKEQKRMNEAVQALRRAQLQYVQRSEDLRARSQGSPEDSAPQASPGPSKQQERRRRSREEAQAKAQEAEALYQACVREANARQQDLEIAKQRIVSHVRKLVFQGDEVLRRVTLSLFGLRGAQAERGPRAFAALAECCAPFEPGQRYQEFVRALRPEAPPPPPPAFSFQEFLPSLNSSPLDIRKKLSGPLPPRLDENSAEPGPWEDPGTGWRWQGTPGPTPGSDVDSVGGGSESRSLDSPTSSPGAGTRQLVKASSTGTESSDDFEERDPDLGDGLENGLGSPFGKWTLSSAAQTHQLRRLRGPAKCRECEAFMVSGTECEECFLTCHKRCLETLLILCGHRRLPARTPLFGVDFLQLPRDFPEEVPFVVTKCTAEIEHRALDVQGIYRVSGSRVRVERLCQAFENGRALVELSGNSPHDVSSVLKRFLQELTEPVIPFHLYDAFISLAKTLHADPGDDPGTPSPSPEVIRSLKTLLVQLPDSNYNTLRHLVAHLFRVAARFMENKMSANNLGIVFGPTLLRPPDGPRAASAIPVTCLLDSGHQAQLVEFLIVHYEQIFGMDELPQATEPPPQDSSPAPGPLTTSSQPPPPHLDPDSQPPVLASDPGPDPQHHSTLEQHPTATPTEIPTPQSDQREDVAEDTKDGGGEVSSQGPEDSLLGTQSRGHFSRQPVKYPRGGVRPVTHQLSSLALVASKLCEETPITSVPRGSLRGRGPSPAAASPEGSPLRRTPLPKHFEITQETARLLSKLDSEAVPRATCCPDVQPEEAEDHL

SEQ ID NO: 191 - protein, 946 aa, Homo sapiens
MAAHGKLRRERGLQAEYETQVKEMRWQLSEQLRCLELQGELRRELLQELAEFMRRRAEVELEYSRGLEKLAERFSSRGGRLGSSREHQSFRKEPSLLSPLHCWAVLLQHTRQQSRESAALSEVLAGPLAQRLSHIAEDVGRLVKKSRDLEQQLQDELLEVVSELQTAKKTYQAYHMESVNAEAKLREAERQEEKRAGRSVPTTTAGATEAGPLRKSSLKKGGRLVEKRQAKFMEHKLKCTKARNEYLLSLASVNAAVSNYYLHDVLDLMDCCDTGFHLALGQVLRSYTAAESRTQASQVQGLGSLEEAVEALDPPGDKAKVLEVHATVFCPPLRFDYHPHDGDEVAEICVEMELRDEILPRAQNIQSRLDRQTIETEEVNKTLKATLQALLEVVASDDGDVLDSFQTSPSTESLKSTSSDPGSRQAGRRRGQQQETETFYLTKLQEYLSGRSILAKLQAKHEKLQEALQRGDKEEQEVSWTQYTQRKFQKSRQPRPSSQYNQRLFGGDMEKFIQSSGQPVPLVVESCIRFINLNGLQHEGIFRVSGAQLRVSEIRDAFERGEDPLVEGCTAHDLDSVAGVLKLYFRSLEPPLFPPDLFGELLASSELEATAERVEHVSRLLWRLPAPVLVVLRYLFTFLNHLAQYSDENMMDPYNLAVCFGPTLLPVPAGQDPVALQGRVNQLVQTLIVQPDRVFPPLTSLPGPVYEKCMAPPSASCLGDAQLESLGADNEPELEAEMPAQEDDLEGVVEAVACFAYTGRTAQELSFRRGDVLRLHERASSDWWRGEHNGMRGLIPHKYITLPAGTEKQVVGAGLQTAGESGSSPEGLLASELVHRPEPCTSPEAMGPSGHRRRCLVPASPEQHVEVDKAVAQNMDSVFKELLGKTSVRQGLGPASTTSPSPGPRSPKAPPSSRLGRNKGFSRGPGAPASPSASHPQGLDTTPKPH

SEQ ID NO: 192 - protein, 1587 aa, Homo sapiens
MGDVKALLFVAAARARRLGGAAASESLAVSEAFCRVRSCQPKKCAGPQRCLNPVPAVPSPSPSVRKRQVSLNWQPLTLQEARALLKRRRPRGPGGRGLLRRRPPQRAPAGKAPVLCPLICHNGGVCVKPDRCLCPPDFAGKFCQLHSSGARPPAPAVPGLTRSVYTMPLANHRDDEHGVASMVSVHVEHPQEASVVVHQVERVSGPWEEADAEAVARAEAAARAEAAAPYTVLAQSAPREDGYSDASGFGYCFRELRGGECASPLPGLRTQEVCCRGAGLAWGVHDCQLCSERLGNSERVSAPDGPCPTGFERVNGSCEDVDECATGGRCQHGECANTRGGYTCVCPDGFLLDSSRSSCISQHVISEAKGPCFRVLRDGGCSLPILRNITKQICCCSRVGKAWGRGCQLCPPFGSEGFREICPAGPGYHYSASDLRYNTRPLGQEPPRVSLSQPRTLPATSRPSAGFLPTHRLEPRPEPRPDPRPGPELPLPSIPAWTGPEIPESGPSSGMCQRNPQVCGPGRCISRPSGYTCACDSGFRLSPQGTRCIDVDECRRVPPPCAPGRCENSPGSFRCVCGPGFRAGPRAAECLDVDECHRVPPPCDLGRCENTPGSFLCVCPAGYQAAPHGASCQDVDECTQSPGLCGRGACKNLPGSFRCVCPAGFRGSACEEDVDECAQEPPPCGPGRCDNTAGSFHCACPAGFRSRGPGAPCQDVDECARSPPPCTYGRCENTEGSFQCVCPMGFQPNTAGSECEDVDECENHLACPGQECVNSPGSFQCRTCPSGHHLHRGRCTDVDECSSGAPPCGPHGHCTNTEGSFRCSCAPGYRAPSGRPGPCADVNECLEGDFCFPHGECLNTDGSFACTCAPGYRPGPRGASCLDVDECSEEDLCQSGICTNTDGSFECICPPGHRAGPDLASCLDVDECRERGPALCGSQRCENSPGSYRCVRDCDPGYHAGPEGTCDDVDECQEYGPEICGAQRCENTPGSYRCTPACDPGYQPTPGGGCQDVDECRNRSFCGAHAVCQNLPGSFQCLCDQGYEGARDGRHCVDVNECETLQGVCGAALCENVEGSFLCVCPNSPEEFDPMTGRCVPPRTSAGTFPGSQPQAPASPVLPARPPPPPLPRRPSTPRQGPVGSGRRECYFDTAAPDACDNILARNVTWQECCCTVGEGWGSGCRIQQCPGTETAEYQSLCPHGRGYLAPSGDLSLRRDVDECQLFRDQVCKSGVCVNTAPGYSCYCSNGYYYHTQRLECIDNDECADEEPACEGGRCVNTVGSYHCTCEPPLVLDGSQRRCVSNESQSLDDNLGVCWQEVGADLVCSHPRLDRQATYTECCCLYGEAWGMDCALCPAQDSDDFEALCNVLRPPAYSPPRPGGFGLPYEYGPDLGPPYQGLPYGPELYPPPALPYDPYPPPPGPFARREAPYGAPRFDMPDFEDDGGPYGESEAPAPPGPGTRWPYRSRDTRRSFPEPEEPPEGGSYAGSLAEPYEELEAEECGILDGCTNGRCVRVPEGFTCRCFDGYRLDMTRMACVDINECDEAEAASPLCVNARCLNTDGSFRCICRPGFAPTHQPHHCAPARPRA

SEQ ID NO: 193 - protein, 308 aa, Homo sapiens
MGEIKVSPDYNWFRGTVPLKKIIVDDDDSKIWSLYDAGPRSIRCPLIFLPPVSGTADVFFRQILALTGWGYRVIALQYPVYWDHLEFCDGFRKLLDHLQLDKVHLFGASLGGFLAQKFAEYTHKSPRVHSLILCNSFSDTSIFNQTWTANSFWLMPAFMLKKIVLGNFSSGPVDPMMADAIDFMVDRLESLGQSELASRLTLNCQNSYVEPHKIRDIPVTIMDVFDQSALSTEAKEEMYKLYPNARRAHLKTGGNFPYLCRSAEVNLYVQIHLLQFHGTKYAAIDPSMVSAEELEVQKGSLGISQEEQ

SEQ ID NO: 194 - protein, 153 aa, Homo sapiens
MERLKTVAGSKMQGLLERVNTEIHFVTKCAFQPPPSCLRFVQTNISRLLQETSEQLVALKPWITRQNFSRCLELQCQPDSSTLPPPWSPRPLEATAPTAPQPPLLLLLLLPVGLLLLAAAWCLHWQRTRRRTPRPGEQVPPVPSPQDLLLVEH

SEQ ID NO: 195 - protein, 1498 aa, Homo sapiens
MDGASAEQDGLQEDRSHSGPSSLPEAPLKPPGPLVPPDQQDKVQCAEVNRASTEGESPDGPGQGGLCQNGPTPPFPDPPSSLDPTTSPVGPDASPGVAGFHDNLRKSQGTSAEGSVRKEALQSLRLSLPMQETQLCSTDSPLPLEKEEQVRLQARKWLEEQLKQYRVKRQQERSSQPATKTRLFSTLDPELMLNPENLPRASTLAMTKEYSFLRTSVPRGPKVGSLGLPAHPREKKTSKSSKIRSLADYRTEDSNAGNSGGNVPAPDSTKGSLKQNRSSAASVVSEISLSPDTDDRLENTSLAGDSVSEVDGNDSDSSSYSSASTRGTYGILSKTVGTQDTPYMVNGQEIPADTLGQFPSIKDVLQAAAAEHQDQGQEVNGEVRSRRDSICSSVSLESSAAETQEEMLQVLKEKMRLEGQLEALSLEASQALKEKAELQAQLAALSTKLQAQVECSHSSQQRQDSLSSEVDTLKQSCWDLERAMTDLQNMLEAKNASLASSNNDLQVAEEQYQRLMAKVEDMQRSMLSKDNTVHDLRQQMTALQSQLQQVQLERTTLTSKLKASQAEISSLQSVRQWYQQQLALAQEARVRLQGEMAHIQVGQMTQAGLLEHLKLENVSLSQQLTETQHRSMKEKGRIAAQLQGIEADMLDQEAAFMQIQEAKTMVEEDLQRRLEEFEGERERLQRMADSAASLEQQLEQVKLTLLQRDQQLEALQQEHLDLMKQLTLTQEALQSREQSLDALQTHYDELQARLGELQGEAASREDTICLLQNEKIILEAALQAAKSGKEELDRGARRLEEGTEETSETLEKLREELAIKSGQVEHLQQETAALKKQMQKIKEQFLQQKVMVEAYRRDATSKDQLISELKATRKRLDSELKELRQELMQVHGEKRTAEAELSRLHREVAQVRQHMADLEGHLQSAQKERDEMETHLQSLQFDKEQMVAVTEANEALKKQIEELQQEARKAITEQKQKMRRLGSDLTSAQKEMKTKHKAYENAVGILSRRLQEALAAKEAADAELGQLRAQGGSSDSSLALHERIQALEAELQAVSHSKTLLEKELQEVIALTSQELEESREKVLELEDELQESRGFRKKIKRLEESNKKLALELEHEKGKLTGLGQSNAALREHNSILETALAKREADLVQLNLQVQAVLQRKEEEDRQMKHLVQALQASLEKEKEKVNSLKEQVAAAKVEAGHNRRHFKAASLELSEVKKELQAKEHLVQKLQAEADDLQIREGKHSQEIAQFQAELAEARAQLQLLQKQLDEQLSKQPVGNQEMENLKWEVDQKEREIQSLKQQLDLTEQQGRKELEGLQQLLQNVKSELEMAQEDLSMTQKDKFMLQAKVSELKNNMKTLLQQNQQLKLDLRRGAAKTRKEPKGEASSSNPATPIKIPDCPVPASLLEELLRPPPAVSKEPLKNLNSCLQQLKQEMDSLQRQMEEHALTVHESLSSWTPLEPATASPVPPGGHAGPRGDPQRHSQSRASKEGPGE

SEQ ID NO: 196 - protein, 1203 aa, Homo sapiens
MAACGRVRRMFRLSAALHLLLLFAAGAEKLPGQGVHSQGQGPGANFVSFVGQAGGGGPAGQQLPQLPQSSQLQQQQQQQQQQQQPQPPQPPFPAGGPPARRGGAGAGGGWKLAEEESCREDVTRVCPKHTWSNNLAVLECLQDVREPENEISSDCNHLLWNYKLNLTTDPKFESVAREVCKSTITEIKECADEPVGKGYMVSCLVDHRGNITEYQCHQYITKMTAIIFSDYRLICGFMDDCKNDINILKCGSIRLGEKDAHSQGEVVSCLEKGLVKEAEEREPKIQVSELCKKAILRVAELSSDDFHLDRHLYFACRDDRERFCENTQAGEGRVYKCLFNHKFEESMSEKCREALTTRQKLIAQDYKVSYSLAKSCKSDLKKYRCNVENLPRSREARLSYLLMCLESAVHRGRQVSSECQGEMLDYRRMLMEDFSLSPEIILSCRGEIEHHCSGLHRKGRTLHCLMKVVRGEKGNLGMNCQQALQTLIQETDPGADYRIDRALNEACESVIQTACKHIRSGDPMILSCLMEHLYTEKMVEDCEHRLLELQYFISRDWKLDPVLYRKCQGDASRLCHTHGWNETSEFMPQGAVFSCLYRHAYRTEEQGRRLSRECRAEVQRILHQRAMDVKLDPALQDKCLIDLGKWCSEKTETGQELECLQDHLDDLVVECRDIVGNLTELESEDIQIEALLMRACEPIIQNFCHDVADNQIDSGDLMECLIQNKHQKDMNEKCAIGVTHFQLVQMKDFRFSYKFKMACKEDVLKLCPNIKKKVDVVICLSTTVRNDTLQEAKEHRVSLKCRRQLRVEELEMTEDIRLEPDLYEACKSDIKNFCSAVQYGNAQIIECLKENKKQLSTRCHQKVFKLQETEMMDPELDYTLMRVCKQMIKRFCPEADSKTMLQCLKQNKNSELMDPKCKQMITKRQITQNTDYRLNPMLRKACKADIPKFCHGILTKAKDDSELEGQVISCLKLRYADQRLSSDCEDQIRIIIQESALDYRLDPQLQLHCSDEISSLCAEEAAAQEQTGQVEECLKVNLLKIKTELCKKEVLNMLKESKADIFVDPVLHTACALDIKHHCAAITPGRGRQMSCLMEALEDKRVRLQPECKKRLNDRIEMWSYAAKVAPADGFSDLAMQVMTSPSKNYILSVISGSICILFLIGLMCGRITKRVTRELKDRLQYRSETMAYKGLVWSQDVTGSPA

SEQ ID NO: 197 - protein, 1253 aa, Homo sapiens
RVAREIVETERAYVRDLRSIVEDYLGPLLDGGVLGLSVEQVGTLFANIEDIYEFSSELLEDLENSSSAGGIAECFVQRSEDFDIYTLYCMNYPSSLALLRELSLSPPAALWLQERQAQLRHSLPLQSFLLKPVQRILKYHLLLQELGKHWAEGPGTGGREMVEEAIVSMTAVAWYINDMKRKQEHAARLQEVQRRLGGWTGPELSAFGELVLEGAFRGGGGGGPRLRGGERLLFLFSRMLLVAKRRGLEYTYKGHIFCCNLSVSESPRDPLGFKVSDLTIPKHRHLLQAKNQEEKRLWIHCLQRLFFENHPASIPAKAKQVLLENSLHCAPKSKPVLEPLTPPLGSPRPRDARSFTPGRRNTAKPGFKHAGSEGELYPPESQPPVSGSAPPEDLEDAGPPTLDPSGTSITEEILELLNQRGLRDPGPSTHDIPKFPGDSQVPGDSETLTFQALPSRDSSEEEEEEEEGLEMDERGPSPLHVLEGLESSIAAEMPSIPCLTKIPDVPNLPEIPSRCEIPEGSRLPSLSDISDVFEMPCLPAIPSVPNTPSLSSTPTLSCDSWLQGPLQEPAEAPATRRELFSGSNPGKLGEPPSGGKAGPEEDEEGVSFTDFQPQDVTQHQGFPDELAFRSCSEIRSAWQALEQGQLARPGFPEPLLILEDSDLGGDSGSGKAGAPSSERTASRVRELARLYSERIQQMQRAETRASANAPRRRPRVLAQPQPSPCLPQEQAEPGLLPAFGHVLVCELAFPLTCAQESVPLGPAVWVQAAIPLSKQGGSPDGQGLHVSNLPKQDLPGIHVSAATLLPEQGGSRHVQAPAATPLPKQEGPLHLQVPALTTFSDQGHPEIQVPATTPLPEHRSHMVIPAPSTAFCPEQGHCADIHVPTTPALPKEICSDFTVSVTTPVPKQEGHLDSESPTNIPLTKQGGSRDVQGPDPVCSQPIQPLSWHGSSLDPQGPGDTLPPLPCHLPDLQIPGTSPLPAHGSHLDHRIPANAPLSLSQELPDTQVPATTPLPLPQVLTDIWVQALPTSPKQGSLPDIQGPAAAPPLPEPSLTDTQVQKLTPSLEQKSLIDAHVPAATPLPERGGSLDIQGLSPTPVQTTMVLSKPGGSLASHVARLESSDLTPPHSPPPSSRQLLGPNAAALSRYLAASYISQSLARRQGPGGGAPAASRGSWSSAPTSRASSPPPQPQPPPPPARRLSYATTVNIHVGGGGRLRPAKAQVRLNHPALLASTQESMGLHRAQGAPDAPFHM

SEQ ID NO: 198 - protein, 618 aa, Homo sapiens
MVSPRMSGLLSQTVILALIFLPQTRPAGVFELQIHSFGPGPGPGAPRSPCSARLPCRLFFRVCLKPGLSEEAAESPCALGAALSARGPVYTEQPGAPAPDLPLPDGLLQVPFRDAWPGTFSFIIETWREELGDQIGGPAWSLLARVAGRRRLAAGGPWARDIQRAGAWELRFSYRARCEPPAVGTACTRLCRPRSAPSRCGPGLRPCAPLEDECEAPLVCRAGCSPEHGFCEQPGECRCLEGWTGPLCTVPVSTSSCLSPRGPSSATTGCLVPGPGPCDGNPCANGGSCSETPRSFECTCPRGFYGLRCEVSGVTCADGPCFNGGLCVGGADPDSAYICHCPPGFQGSNCEKRVDRCSLQPCRNGGLCLDLGHALRCRCRAGFAGPRCEHDLDDCAGRACANGGTCVEGGGAHRCSCALGFGGRDCRERADPCAARPCAHGGRCYAHFSGLVCACAPGYMGARCEFPVHPDGASALPAAPPGLRPGDPQRYLLPPALGLLVAAGVAGAALLLVHVRRRGHSQDAGSRLLAGTPEPSVHALPDALNNLRTQEGSGDGPSSSVDWNRPEDVDPQGIYVISAPSIYAREVATPLFPPLHTGRAGQRQHLLFPYPSSILSVK

SEQ ID NO: 199 - protein, 1098 aa, Homo sapiens
MTLQELVHKAASCYMDRVAVCFDECNNQLPVYYTYKTVVNAASELSNFLLLHCDFQGIREIGLYCQPGIDLPSWILGILQVPAAYVPIEPDSPPSLSTHFMKKCNLKYILVEKKQINKFKSFHETLLNYDTFTVEHNDLVLFRLHWKNTEVNLMLNDGKEKYEKEKIKSISSEHVNEEKAEEHMDLRLKHCLAYVLHTSGTTGIPKIVRVPHKCIVPNIQHFRVLFDITQEDVLFLASPLTFDPSVVEIFLALSSGASLLIVPTSVKLLPSKLASVLFSHHRVTVLQATPTLLRRFGSQLIKSTVLSATTSLRVLALGGEAFPSLTVLRSWRGEGNKTQIFNVYGITEVSSWATIYRIPEKTLNSTLKCELPVQLGFPLLGTVVEVRDTNGFTIQEGSGQVFLGGRNRVCFLDDEVTVPLGTMRATGDFVTVKDGEIFFLGRKDSQIKRHGKRLNIELVQQVAEELQQVESCAVTWYNQEKLILFMVSKDASVKEYIFKELQKYLPSHAVPDELVLIDSLPFTSHGKIDVSELNKIYLNYINLKSENKLSGKEDLWEKLQYLWKSTLNLPEDLLRVPDESLFLNSGGDSLKSIRLLSEIEKLVGTSVPGLLEIILSSSILEIYNHILQTVVPDEDVTFRKSCATKRKLSDINQEEASGTSLHQKAIMTFTCHNEINAFVVLSRGSQILSLNSTRFLTKLGHCSSACPSDSVSQTNIQNLKGLNSPVLIGKSKDPSCVAKVSEEGKPAIGTQKMELHVRWRSDTGKCVDASPLVVIPTFDKSSTTVYIGSHSHRMKAVDFYSGKVKWEQILGDRIESSACVSKCGNFIVVGCYNGLVYVLKSNSGEKYWMFTTEDAVKSSATMDPTTGLIYIGSHDQHAYALDIYRKKCVWKSKCGGTVFSSPCLNLIPHHLYFATLGGLLLAVNPATGNVIWKHSCGKPLFSSPQCCSQYICIGCVDGNLLCFTHFGEQVWQFSTSGPIFSSPCTSPSEQKIFFGSHDCFIYCCNMKGHLQWKFETTSRVYATPFAFHNYNGSNEMLLAAASTDGKVWILESQSGQLQSVYELPGEVFSSPVVLESMLIIGCRDNYVYCLDLLGGNQK

SEQ ID NO: 200 - protein, 1761 aa, Homo sapiens
MQFQLTLFLHLGWLSYSKAQDDCNRGACHPTTGDLLVGRNTQLMASSTCGLSRAQKYCILSYLEGEQKCFICDSRFPYDPYDQPNSHTIENVIVSFEPDREKKWWQSENGLDHVSIRLDLEALFRFSHLILTFKTFRPAAMLVERSTDYGHNWKVFKYFAKDCATSFPNITSGQAQGVGDIVCDSKYSDIEPSTGGEVVLKVLDPSFEIENPYSPYIQDLVTLTNLRINFTKLHTLGDALLGRRQNDSLDKYYYALYEMIVRGSCFCNGHASECRPMQKMRGDVFSPPGMVHGQCVCQHNTDGPNCERCKDFFQDAPWRPAADLQDNACRSCSCNSHSSRCHFDMTTYLASGGLSGGVCEDCQHNTEGQHCDRCRPLFYRDPLKTISDPYACIPCECDPDGTISGGICVSHSDPALGSVAGQCLCKENVEGAKCDQCKPNHYGLSATDPLGCQPCDCNPLGSLPFLTCDVDTGQCLCLSYVTGAHCEECTVGYWGLGNHLHGCSPCDCDIGGAYSNVCSPKNGQCECRPHVTGRSCSEPAPGYFFAPLNFYLYEAEEATTLQGLAPLGSETFGQSPAVHVVLGEPVPGNPVTWTGPGFARVLPGAGLRFAVNNIPFPVDFTIAIHYETQSAADWTVQIVVNPPGGSEHCIPKTLQSKPQSFALPAATRIMLLPTPICLEPDVQYSIDVYFSQPLQGESHAHSHVLVDSLGLIPQINSLENFCSKQDLDEYQLHNCVEIASAMGPQVLPGACERLIISMSAKLHDGAVACKCHPQGSVGSSCSRLGGQCQCKPLVVGRCCDRCSTGSYDLGHHGCHPCHCHPQGSKDTVCDQVTGQCPCHGEVSGRRCDRCLAGYFGFPSCHPCPCNRFAELCDPETGSCFNCGGFTTGRNCERCIDGYYGNPSSGQPCRPCLCPDDPSSNQYFAHSCYQNLWSSDVICNCLQGYTGTQCGECSTGFYGNPRISGAPCQPCACNNNIDVTDPESCSRVTGECLRCLHNTQGANCQLCKPGHYGSALNQTCRRCSCHASGVSPMECPPGGGACLCDPVTGACPCLPNVTGLACDRCADGYWNLVPGRGCQSCDCDPRTSQSSHCDQLTGQCPCKLGYGGKRCSECQENYYGDPPGRCIPCDCNRAGTQKPICDPDTGMCRCREGVSGQRCDRCARGHSQEFPTCLQCHLCFDQWDHTISSLSKAVQGLMRLAANMEDKRETLPVCEADFKDLRGNVSEIERILKHPVFPSGKFLKVKDYHDSVRRQIMQLNEQLKAVYEFQDLKDTIERAKNEADLLLEDLQEEIDLQSSVLNASIADSSENIKKYYHISSSAEKKINETSSTINTSANTRNDLLTILDTLTSKGNLSLERLKQIKIPDIQILNEKVCGDPGNVPCVPLPCGGALCTGRKGHRKCRGPGCHGSLTLSTNALQKAQEAKSIIRNLDKQVRGLKNQIESISEQAEVSKNNALQLREKLGNIRNQSDSEEENINLFIKKVKNFLLEENVPPEDIEKVANGVLDIHLPIPSQNLTDELVKIQKHMQLCEDYRTDENRLNEEADGAQKLLVKAKAAEKAANILLNLDKTLNQLQQAQITQGRANSTITQLTANITKIKKNVLQAENQTREMKSELELAKQRSGLEDGLSLLQTKLQRHQDHAVNAKVQAESAQHQAGSLEKEFVELKKQYAILQRKTSTTGLTKETLGKVKQLKDAAEKLAGDTEAKIRRITDLERKIQDLNLSRQAKADQLRILEDQVVAIKNEIVEQEKKYARCYS

SEQ ID NO: 201 - protein, 509 aa, Homo sapiens
MQSWSRVYCSLAKRGHFNRISHGLQGLSAVPLRTYADQPIDADVTVIGSGPGGYVAAIKAAQLGFKTVCIEKNETLGGTCLNVGCIPSKALLNNSHYYHMAHGKDFASRGIEMSEVRLNLDKMMEQKSTAVKALTGGIAHLFKQNKVVHVNGYGKITGKNQVTATKADGGTQVIDTKNILIATGSEVTPFPGITIDEDTIVSSTGALSLKKVPEKMVVIGAGVIGVELGSVWQRLGADVTAVEFLGHVGGVGIDMEISKNFQRILQKQGFKFKLNTKVTGATKKSDGKIDVSIEAASGGKAEVITCDVLLVCIGRRPFTKNLGLEELGIELDPRGRIPVNTRFQTKIPNIYAIGDVVAGPMLAHKAEDEGIICVEGMAGGAVHIDYNCVPSVIYTHPEVAWVGKSEEQLKEEGIEYKVGKFPFAANSRAKTNADTDGMVKILGQKSTDRVLGAHILGPGAGEMVNEAALALEYGASCEDIARVCHAHPTLSEAFREANLAASFGKSINF

SEQ ID NO: 202 - protein, 1503 aa, Homo sapiens
MAAPAEPCAGQGVWNQTEPEPAATSLLSLCFLRTAGVWVPPMYLWVLGPIYLLFIHHHGRGYLRMSPLFKAKMVLGFALIVLCTSSVAVALWKIQQGTPEAPEFLIHPTVWLTTMSFAVFLIHTERKKGVQSSGVLFGYWLLCFVLPATNAAQQASGAGFQSDPVRHLSTYLCLSLVVAQFVLSCLADQPPFFPEDPQQSNPCPETGAAFPSKATFWWVSGLVWRGYRRPLRPKDLWSLGRENSSEELVSRLEKEWMRNRSAARRHNKAIAFKRKGGSGMKAPETEPFLRQEGSQWRPLLKAIWQVFHSTFLLGTLSLIISDVFRFTVPKLLSLFLEFIGDPKPPAWKGYLLAVLMFLSACLQTLFEQQNMYRLKVLQMRLRSAITGLVYRKVLALSSGSRKASAVGDVVNLVSVDVQRLTESVLYLNGLWLPLVWIVVCFVYLWQLLGPSALTAIAVFLSLLPLNFFISKKRNHHQEEQMRQKDSRARLTSSILRNSKTIKFHGWEGAFLDRVLGIRGQELGALRTSGLLFSVSLVSFQVSTFLVALVVFAVHTLVAENAMNAEKAFVTLTVLNILNKAQAFLPFSIHSLVQARVSFDRLVTFLCLEEVDPGVVDSSSSGSAAGKDCITIHSATFAWSQESPPCLHRINLTVPQGCLLAVVGPVGAGKSSLLSALLGELSKVEGFVSIEGAVAYVPQEAWVQNTSVVENVCFGQELDPPWLERVLEACALQPDVDSFPEGIHTSIGEQGMNLSGGQKQRLSLARAVYRKAAVYLLDDPLAALDAHVGQHVFNQVIGPGGLLQGTTRILVTHALHILPQADWIIVLANGAIAEMGSYQELLQRKGALMCLLDQARQPGDRGEGETEPGTSTKDPRGTSAGRRPELRRERSIKSVPEKDRTTSEAQTEVPLDDPDRAGWPAGKDSIQYGRVKATVHLAYLRAVGTPLCLYALFLFLCQQVASFCRGYWLSLWADDPAVGGQQTQAALRGGIFGLLGCLQAIGLFASMAAVLLGGARASRLLFQRLLWDVVRSPISFFERTPIGHLLNRFSKETDTVDVDIPDKLRSLLMYAFGLLEVSLVVAVATPLATVAILPLFLLYAGFQSLYVVSSCQLRRLESASYSSVCSHMAETFQGSTVVRAFRTQAPFVAQNNARVDESQRISFPRLVADRWLAANVELLGNGLVFAAATCAVLSKAHLSAGLVGFSVSAALQVTQTLQWVVRNWTDLENSIVSVERMQDYAWTPKEAPWRLPTCAAQPPWPQGGQIEFRDFGLRYRPELPLAVQGVSFKIHAGEKVGIVGRTGAGKSSLASGLLRLQEAAEGGIWIDGVPIAHVGLHTLRSRISIIPQDPILFPGSLRMNLDLLQEHSDEAIWAALETVQLKALVASLPGQLQYKCADRGEDLSVGQKQLLCLARALLRKTQILILDEATAAVDPGTELQMQAMLGSWFAQCTVLLIAHRLRSVMDCARVLVMDKGQVAESGSPAQLLAQKGLFYRLAQESGLV

SEQ ID NO: 203 - protein, 345 aa, Homo sapiens
MISPVLILFSSFLCHVAIAGRTCPKPDDLPFSTVVPLKTFYEPGEEITYSCKPGYVSRGGMRKFICPLTGLWPINTLKCTPRVCPFAGILENGAVRYTTFEYPNTISFSCNTGFYLNGADSAKCTEEGKWSPELPVCAPIICPPPSIPTFATLRVYKPSAGNNSLYRDTAVFECLPQHAMFGNDTITCTTHGNWTKLPECREVKCPFPSRPDNGFVNYPAKPTLYYKDKATFGCHDGYSLDGPEEIECTKLGNWSAMPSCKASCKVPVKKATVVYQGERVKIQEKFKNGMLHGDKVSFFCKNKEKKCSYTEDAQCIDGTIEVPKCFKEHSSLAFWKTDASDVKPC

SEQ ID NO: 204 - protein, 210 aa, Homo sapiens
MRKRQQSQNEGTPAVSQAPGNQRPNNTCCFCWCCCCSCSCLTVRNEERGENAGRPTHTTKMESIQVLEECQNPTAEEVLSWSQNFDKMMKAPAGRNLFREFLRTEYSEENLLFWLACEDLKKEQNKKVIEEKARMIYEDYISILSPKEVSLDSRVREVINRNLLDPNPHMYEDAQLQIYTLMHRDSFPRFLNSQIYKSFVESTAGSSSES

SEQ ID NO: 205 - protein, 950 aa, Homo sapiens
MTWRMGPRFTMLLAMWLVCGSEPHPHATIRGSHGGRKVPLVSPDSSRPARFLRHTGRSRGIERSTLEEPNLQPLQRRRSVPVLRLARPTEPPARSDINGAAVRPEQRPAARGSPREMIRDEGSSARSRMLRFPSGSSSPNILASFAGKNRVWVISAPHASEGYYRLMMSLLKDDVYCELAERHIQQIVLFHQAGEEGGKVRRITSEGQILEQPLDPSLIPKLMSFLKLEKGKFGMVLLKKTLQVEERYPYPVRLEAMYEVIDQGPIRRIEKIRQKGFVQKCKASGVEGQVVAEGNDGGGGAGRPSLGSEKKKEDPRRAQVPPTRESRVKVLRKLAATAPALPQPPSTPRATTLPPAPATTVTRSTSRAVTVAARPMTTTAFPTTQRPWTPSPSHRPPTTTEVITARRPSVSENLYPPSRKDQHRERPQTTRRPSKATSLESFTNAPPTTISEPSTRAAGPGRFRDNRMDRREHGHRDPNVVPGPPKPAKEKPPKKKAQDKILSNEYEEKYDLSRPTASQLEDELQVGNVPLKKAKESKKHEKLEKPEKEKKKKMKNENADKLLKSEKQMKKSEKKSKQEKEKSKKKKGGKTEQDGYQKPTNKHFTQSPKKSVADLLGSFEGKRRLLLITAPKAENNMYVQQRDEYLESFCKMATRKISVITIFGPVNNSTMKIDHFQLDNEKPMRVVDDEDLVDQRLISELRKEYGMTYNDFFMVLTDVDLRVKQYYEVPITMKSVFDLIDTFQSRIKDMEKQKKEGIVCKEDKKQSLENFLSRFRWRRRLLVISAPNDEDWAYSQQLSALSGQACNFGLRHITILKLLGVGEEVGGVLELFPINGSSVVEREDVPAHLVKDIRNYFQVSPEYFSMLLVGKDGNVKSWYPSPMWSMVIVYDLIDSMQLRRQEMAIQQSLGMRCPEDEYAGYGYHSYHQGYQDGYQDDYRHHESYHHGYPY

SEQ ID NO: 206 - protein, 706 aa, Homo sapiens
MNESKPGDSQNLACVFCRKHDDCPNKYGEKKTKEKWNLTVHYYCLLMSSGIWQRGKEEEGVYGFLIEDIRKEVNRASKLKCCVCKKNGASIGCVAPRCKRSYHFPCGLQRECIFQFTGNFASFCWDHRPVQIITSNNYRESLPCTICLEFIEPIPSYNILRSPCCKNAWFHRDCLQVQAINAGVFFFRCTICNNSDIFQKEMLRMGIHIPEKDASWELEENAYQELLQHYERCDVRRCRCKEGRDYNAPDSKWEIKRCQCCGSSGTHLACSSLRSWEQNWECLECRGIIYNSGEFQKAKKHVLPNSNNVGITDCLLEESSPKLPRQSPGSQSKDLLRQGSKFRRNVSTLLIELGFQIKKKTKRLYINKANIWNSALDAFRNRNFNPSYAIEVAYVIENDNFGSEHPGSKQEFLSLLMQHLENSSLFEGSLSKNLSLNSQALKENLYYEAGKMLAISLVHGGPSPGFFSKTLFNCLVYGPENTQPILDDVSDFDVAQIIIRINTATTVADLKSIINECYNYLELIGCLRLITTLSDKYMLVKDILGYHVIQRVHTPFESFKQGLKTLGVLEKIQAYPEAFCSILCHKPESLSAKILSELFTVHTLPDVKALGFWNSYLQAVEDGKSTTTMEDILIFATGCSSIPPAGFKPTPSIECLHVDFPVGNKCNNCLAIPITNTYKEFQENMDFTIRNTLRLEKEESSHYIGH

SEQ ID NO: 207 - protein, 817 aa, Homo sapiens
MMDGPRSDVGRWGGNPLQPPTTPSPEPEPEPDGRSRRGGGRSFWARCCGCCSCRNAADDDWGPEPSDSRGRGSSSGTRRPGSRGSDSRRPVSRGSGVNAAGDGTIREGMLVVNGVDLLSSRSDQNRREHHTDEYEYDELIVRRGQPFHMLLLLSRTYESSDRITLELLIGNNPEVGKGTHVIIPVGKGGSGGWKAQVVKASGQNLNLRVHTSPNAIIGKFQFTVRTQSDAGEFQLPFDPRNEIYILFNPWCPEDIVYVDHEDWRQEYVLNESGRIYYGTEAQIGERTWNYGQFDHGVLDACLYILDRRGMPYGGRGDPVNVSRVISAMVNSLDDNGVLIGNWSGDYSRGTNPSAWVGSVEILLSYLRTGYSVPYGQCWVFAGVTTTVLRCLGLATRTVTNFNSAHDTDTSLTMDIYFDENMKPLEHLNHDSVWNFHVWNDCWMKRPDLPSGFDGWQVVDATPQETSSGIFCCGPCSVESIKNGLVYMKYDTPFIFAEVNSDKVYWQRQDDGSFKIVYVEEKAIGTLIVTKAISSNMREDITYLYKHPEGSDAERKAVETAAAHGSKPNVYANRGSAEDVAMQVEAQDAVMGQDLMVSVMLINHSSSRRTVKLHLYLSVTFYTGVSGTIFKETKKEVELAPGASDRVTMPVAYKEYRPHLVDQGAMLLNVSGHVKESGQVLAKQHTFRLRTPDLSLTLLGAAVVGQECEVQIVFKNPLPVTLTNVVFRLEGSGLQRPKILNVGDIGGNETVTLRQSFVPVRPGPRQLIASLDSPQLSQVHGVIQVDVAPAPGDGGFFSDAGGDSHLGETIPMASRGGA

SEQ ID NO: 208 - protein, 496 aa, Homo sapiens
MSSMEEIQVELQCADLWKRFHDIGTEMIITKAGRRMFPAMRVKITGLDPHQQYYIAMDIVPVDNKRYRYVYHSSKWMVAGNADSPVPPRVYIHPDSLASGDTWMRQVVSFDKLKLTNNELDDQGHIILHSMHKYQPRVHVIRKDFSSDLSPTKPVPVGDGVKTFNFPETVFTTVTAYQNQQITRLKIDRNPFAKGFRDSGRNRTGLEAIMETYAFWRPPVRTLTFEDFTTMQKQQGGSTGTSPTTSSTGTPSPSASSHLLSPSCSPPTFHLAPNTFNVGCRESQLCNLNLSDYPPCARSNMAALQSYPGLSDSGYNRLQSGTTSATQPSETFMPQRTPSLISGIPTPPSLPGNSKMEAYGGQLGSFPTSQFQYVMQAGNAASSSSSPHMFGGSHMQQSSYNAFSLHNPYNLYGYNFPTSPRLAASPEKLSASQSTLLCSSPSNGAFGERQYLPSGMEHSMHMISPSPNNQQATNTCDGRQYGAVPGSSSQMSVHMV

SEQ ID NO: 209 - protein, 1090 aa, Homo sapiens
MATLLSHPQQRPPFLRQAIKIRRRRVRDLQDPPPQMAPEIQPPSHHFSPEQRALLYEDALYTVLHRLGHPEPNHVTEASELLRYLQEAFHVEPEEHQQTLQRVRELEKPIFCLKATVKQAKGILGKDVSGFSDPYCLLGIEQGVGVPGGSPGSRHRQKAVVRHTIPEEETHRTQVITQTLNPVWDETFILEFEDITNASFHLDMWDLDTVESVRQKLGELTDLHGLRRIFKEARKDKGQDDFLGNVVLRLQDLRCREDQWYPLEPRTETYPDRGQCHLQFQLIHKRRATSASRSQPSYTVHLHLLQQLVSHEVTQHEAGSTSWDGSLSPQAATVLFLHATQKDLSDFHQSMAQWLAYSRLYQSLEFPSSCLLHPITSIEYQWIQGRLKAEQQEELAASFSSLLTYGLSLIRRFRSVFPLSVSDSPARLQSLLRVLVQMCKMKAFGELCPNTAPLPQLVTEALQTGTTEWFHLKQQHHQPMVQGIPEAGKALLGLVQDVIGDLHQCQRTWDKIFHNTLKIHLFSMAFRELQWLVAKRVQDHTTVVGDVVSPEMGESLFQLYISLKELCQLRMSSSERDGVLALDNFHRWFQPAIPSWLQKTYNEALARVQRAVQMDELVPLGELTKHSTSAVDLSTCFAQISHTARQLDWPDPEEAFMITVKFVEDTCRLALVYCSLIKARARELSSGQKDQGQAANMLCVVVNDMEQLRLVIGKLPAQLAWEALEQRVGAVLEQGQLQNTLHAQLQSALAGLGHEIRTGVRTLAEQLEVGIAKHIQKLVGVRESVLPEDAILPLMKFLEVELCYMNTNLVQENFSSLLTLLWTHTLTVLVEAAASQRSSSLASNRLKIALQNLEICFHAEGCGLPPKALHTATFQALQRDLELQAASSRELIRKYFCSRIQQQAETTSEELGAVTVKASYRASEQKLRVELLSASSLLPLDSNGSSDPFVQLTLEPRHEFPELAARETQKHKKDLHPLFDETFEFLVPAEPCRKAGACLLLTVLDYDTLGADDLEGEAFLPLREVPGLSGSEEPGEVPQTRLPLTYPAPNGDPILQLLEGRKGDREAQVFVRLRRHRAKQASQHALRPAP

SEQ ID NO: 210 - protein, 355 aa, Homo sapiens
MEPEKQTEISEFFLQGLSEKPEHQTLLFTMFLSTYLVTIIGNALIILAIITDSHLHTPMYFFLFNLSLVDTLLSSTTVPKMLANIQAQSRAIPFVGCLTQMYAFHLFGTMDSFLLAVMAIDRFVAIVHPQRYLVLMCSPVCGLLLGASWMITNLQSLIHTCLMAQLTFCAGSEISHFFCDLMPLLKLSGSDTHTNELVIFAFGIVVGTSPFSCILLSYIRIFWTVFKIPSTRGKWKAFSTCGLHLTVVSLSYGTIFAVYLQPTSPSSSQKDKAAALMCGVFIPMLNPFIYSIRNKDMKAALGKLIGKVAVPCPRPEQLLDVYHVPGSLLAARDTEMHPIPYPGGVQSLAGNRDME

SEQ ID NO: 211 - protein, 375 aa, Homo sapiens
MSTAGKVIKCKAAVLWELKKPFSIEEVEVAPPKAHEVRIKMVAVGICGTDDHVVSGTMVTPLPVILGHEAAGIVESVGEGVTTVKPGDKVIPLAIPQCGKCRICKNPESNYCLKNDVSNPQGTLQDGTSRFTCRRKPIHHFLGISTFSQYTVVDENAVAKIDAASPLEKVCLIGCGFSTGYGSAVNVAKVTPGSTCAVFGLGGVGLSAIMGCKAAGAARIIAVDINKDKFAKAKELGATECINPQDYKKPIQEVLKEMTDGGVDFSFEVIGRLDTMMASLLCCHEACGTSVIVGVPPDSQNLSMNPMLLLTGRTWKGAILGGFKSKECVPKLVADFMAKKFSLDALITHVLPFEKINEGFDLLHSGKSIRTILMF

SEQ ID NO: 212 - protein, 560 aa, Homo sapiens
MPQTRSQAQATISFPKRKLSRALNKAKNSSDAKLEPTNVQTVTCSPRVKALPLSPRKRLGDDNLCNTPHLPPCSPPKQGKKENGPPHSHTLKGRRLVFDNQLTIKSPSKRELAKVHQNKILSSVRKSQEITTNSEQRCPLKKESACVRLFKQEGTCYQQAKLVLNTAVPDRLPAREREMDVIRNFLREHICGKKAGSLYLSGAPGTGKTACLSRILQDLKKELKGFKTIMLNCMSLRTAQAVFPAIAQEICQEEVSRPAGKDMMRKLEKHMTAEKGPMIVLVLDEMDQLDSKGQDVLYTLFEWPWLSNSHLVLIGIANTLDLTDRILPRLQAREKCKPQLLNFPPYTRNQIVTILQDRLNQVSRDQVLDNAAVQFCARKVSAVSGDVRKALDVCRRAIEIVESDVKSQTILKPLSECKSPSEPLIPKRVGLIHISQVISEVDGNRMTLSQEGAQDSFPLQQKILVCSLMLLIRQLKIKEVTLGKLYEAYSKVCRKQQVAAVDQSECLSLSGLLEARGILGLKRNKETRLTKVFFKIEEKEIEHALKDKALIGNILATGLP

SEQ ID NO: 213 - protein, 535 aa, Homo sapiens [sequence omitted]

SEQ ID NO: 214 - protein, 843 aa, Homo sapiens
MWGRLWPLLLSILTATAVPGPSLRRPSRELDATPRMTIPYEELSGTRHFKGQAQNYSTLLLEEASARLLVGARGALFSLSANDIGDGAHKEIHWEASPEMQSKCHQKGKNNQTECFNHVRFLQRLNSTHLYACGTHAFQPLCAAIDAEAFTLPTSFEEGKEKCPYDPARGFTGLIIDGGLYTATRYEFRSIPDIRRSRHPHSLRTEETPMHWLNDAEFVFSVLVRESKASAVGDDDKVYYFFTERATEEGSGSFTQSRSSHRVARVARVCKGDLGGKKILQKKWTSFLKARLICHIPLYETLRGVCSLDAETSSRTHFYAAFTLSTQWKTLEASAICRYDLAEIQAVFAGPYMEYQDGSRRWGRYEGGVPEPRPGSCITDSLRSQGYNSSQDLPSLVLDFVKLHPLMARPVVPTRGRPLLLKRNIRYTHLTGTPVTTPAGPTYDLLFLGTADGWIHKAVVLGSGMHIIEETQVFRESQSVENLVISLLQHSLYVGAPSGVIQLPLSSCSRYRSCYDCILARDPYCGWDPGTHACAAATTIANRSQGSRTALIQDIERGNRGCESSRDTGPPPPLKTRSVLRGDDVLLPCDQPSNLARALWLLNGSMGLSDGQGGYRVGVDGLLVTDAQPEHSGNYGCYAEENGLRTLLASYSLTVRPATPAPAPKAPATPGAQLAPDVRLLYVLAIAALGGLCLILASSLLYVACLREGRRGRRRKYSLGRASRAGGSAVQLQTVSGQCPGEEDEGDDEGAGGLEGSCLQIIPGEGAPAPPPPPPPPPPAELTNGLVALPSRLRRMNGNSYVLLRQSNNGVPAGPCSFAEELSRILEKRKHTQLVEQLDESSV

SEQ ID NO: 215 - protein, 1126 aa, Homo sapiens
MEPNDSTSTAVEEPDSLEVLVKTLDSQTRTFIVGAQMNVKEFKEHIAASVSIPSEKQRLIYQGRVLQDDKKLQEYNVGGKVIHLVERAPPQTHLPSGASSGTGSASATHGGGSPPGTRGPGASVHDRNANSYVMVGTFNLPSDGSAVDVHINMEQAPIQSEPRVRLVMAQHMIRDIQTLLSRMECRGGPQPQHSQPPPQPPAVTPEPVALSSQTSEPVESEAPPREPMEAEEVEERAPAQNPELTPGPAPAGPTPAPETNAPNHPSPAEYVEVLQELQRLESRLQPFLQRYYEVLGAAATTDYNNNHEGREEDQRLINLVGESLRLLGNTFVALSDLRCNLACTPPRHLHVVRPMSHYTTPMVLQQAAIPIQINVGTTVTMTGNGTRPPPTPNAEAPPPGPGQASSVAPSSTNVESSAEGAPPPGPAPPPATSHPRVIRISHQSVEPVVMMHMNIQDSGTQPGGVPSAPTGPLGPPGHGQTLGQQVPGFPTAPTRVVIARPTPPQARPSHPGGPPVSGTLQGAGLGTNASLAQMVSGLVGQLLMQPVLVAQGTPGMAPPPAPATASASAGTTNTATTAGPAPGGPAQPPPTPQPSMADLQFSQLLGNLLGPAGPGAGGSGVASPTITVAMPGVPAFLQGMTDFLQATQTAPPPPPPPPPPPPAPEQQTMPPPGSPSGGAGSPGGLGLESLSPEFFTSVVQGVLSSLLGSLGARAGSSESIAAFIQRLSGSSNIFEPGADGALGFFGALLSLLCQNFSMVDVVMLLHGHFQPLQRLQPQLRSFFHQHYLGGQEPTPSNIRMATHTLITGLEEYVRESFSLVQVQPGVDIIRTNLEFLQEQFNSIAAHVLHCTDSGFGARLLELCNQGLFECLALNLHCLGGQQMELAAVINGRIRRMSRGVNPSLVSWLTTMMGLRLQVVLEHMPVGPDAILRYVRRVGDPPQPLPEEPMEVQGAERASPEPQRENASPAPGTTAEEAMSRGPPPAPEGGSRDEQDGASAETEPWAAAVPPEWVPIIQQDIQSQRKVKPQPPLSDAYLSGMPAKRRKTMQGEGPQLLLSEAVSRAAKAAGARPLTSPESLSRDLEAPEVQESYRQQLRSDIQKRLQEDPNYSPQRFPNAQRAFADDP

SEQ ID NO: 216 - protein, 306 aa, Homo sapiens
MSSEKSGLPDSVPHTSPPPYNAPQPPAEPPAPPPQAAPSSHHHHHHHYHQSGTATLPRLGAGGLASSAATAQRGPSSSATLPRPPHHAPPGPAAGAPPPGCATLPRMPPDPYLQETRFEGPLPPPPPAAAAPPPPAPAQTAQAPGFVVPTHAGTVGTLPLGGYVAPGYPLQLQPCTAYVPVYPVGTPYAGGTPGGTGVTSTLPPPPQGPGLALLEPRRPPHDYMPIAVLTTICCFWPTGIIAIFKAVQVRTALARGDMVSAEIASREARNFSFISLAVGIAAMVLCTILTVVIIIAAQHHENYWDP

SEQ ID NO: 217 - protein, 751 aa, Homo sapiens
MEDLSSPDSTLLQGGHNLLSSASFQEAVTFKDVIVDFTQEEWKQLDPGQRDLFRDVTLENYTHLVSIGLQVSKPDVISQLEQGTEPWIMEPSIPVGTCADWETRLENSVSAPEPDISEEELSPEVIVEKHKRDDSWSSNLLESWEYEGSLERQQANQQTLPKEIKVTEKTIPSWEKGPVNNEFGKSVNVSSNLVTQEPSPEETSTKRSIKQNSNPVKKEKSCKCNECGKAFSYCSALIRHQRTHTGEKPYKCNECEKAFSRSENLINHQRIHTGDKPYKCDQCGKGFIEGPSLTQHQRIHTGEKPYKCDECGKAFSQRTHLVQHQRIHTGEKPYTCNECGKAFSQRGHFMEHQKIHTGEKPFKCDECDKTFTRSTHLTQHQKIHTGEKTYKCNECGKAFNGPSTFIRHHMIHTGEKPYECNECGKAFSQHSNLTQHQKTHTGEKPYDCAECGKSFSYWSSLAQHLKIHTGEKPYKCNECGKAFSYCSSLTQHRRIHTREKPFECSECGKAFSYLSNLNQHQKTHTQEKAYECKECGKAFIRSSSLAKHERIHTGEKPYQCHECGKTFSYGSSLIQHRKIHTGERPYKCNECGRAFNQNIHLTQHKRIHTGAKPYECAECGKAFRHCSSLAQHQKTHTEEKPYQCNKCEKTFSQSSHLTQHQRIHTGEKPYKCNECDKAFSRSTHLTEHQNTHTGEKPYNCNECRKTFSQSTYLIQHQRIHSGEKPFGCNDCGKSFRYRSALNKHQRLHPGI

SEQ ID NO: 218 - protein, 1134 aa, Homo sapiens
MPVFHTRTIESILEPVAQQISHLVIMHEEGEVDGKAIPDLTAPVAAVQAAVSNLVRVGKETVQTTEDQILKRDMPPAFIKVENACTKLVQAAQMLQSDPYSVPARDYLIDGSRGILSGTSDLLLTFDEAEVRKIIRVCKGILEYLTVAEVVETMEDLVTYTKNLGPGMTKMAKMIDERQQELTHQEHRVMLVNSMNTVKELLPVLISAMKIFVTTKNSKNQGIEEALKNRNFTVEKMSAEINEIIRVLQLTSWDEDAWASKDTEAMKRALASIDSKLNQAKGWLRDPSASPGDAGEQAIRQILDEAGKVGELCAGKERREILGTCKMLGQMTDQVADLRARGQGSSPVAMQKAQQVSQGLDVLTAKVENAARKLEAMTNSKQSIAKKIDAAQNWLADPNGGPEGEEQIRGALAEARKIAELCDDPKERDDILRSLGEISALTSKLADLRRQGKGDSPEARALAKQVATALQNLQTKTNRAVANSRPAKAAVHLEGKIEQAQRWIDNPTVDDRGVGQAAIRGLVAEGHRLANVMMGPYRQDLLAKCDRVDQLTAQLADLAARGEGESPQARALASQLQDSLKDLKARMQEAMTQEVSDVFSDTTTPIKLLAVAATAPPDAPNREEVFDERAANFENHSGKLGATAEKAAAVGTANKSTVEGIQASVKTARELTPQVVSAARILLRNPGNQAAYEHFETMKNQWIDNVEKMTGLVDEAIDTKSLLDASEEAIKKDLDKCKVAMANIQPQMLVAGATSIARRANRILLVAKREVENSEDPKFREAVKAASDELSKTISPMVMDAKAVAGNISDPGLQKSFLDSGYRILGAVAKVREAFQPQEPDFPPPPPDLEQLRLTDELAPPKPPLPEGEVPPPRPPPPEEKDEEFPEQKAGEVINQPMMMAARQLHDEARKWSSKPGIPAAEVGIGVVAEADAADAAGFPVPPDMEDDYEPELLLMPSNQPVNQPILAAAQSLHREATKWSSKGNDIIAAAKRMALLMAEMSRLVRGGSGTKRALIQCAKDIAKASDEVTRLAKEVAKQCTDKRIRTNLLQVCERIPTISTQLKILSTVKATMLGRTNISDEESEQATEMLVHNAQNLMQSVKETVREAEAASIKIRTDAGFTLRWVRKTPWYQ

SEQ ID NO: 219 - protein, 747 aa, Homo sapiens
MADEAALALQPGGSPSAAGADREAASSPAGEPLRKRPRRDGPGLERSPGEPGGAAPEREVPAAARGCPGAAAAALWREAEAEAAAAGGEQEAQATAAAGEGDNGPGLQGPSREPPLADNLYDEDDDDEGEEEEEAAAAAIGYRDNLLFGDEIITNGFHSCESDEEDRASHASSSDWTPRPRIGPYTFVQQHLMIGTDPRTILKDLLPETIPPPELDDMTLWQIVINILSEPPKRKKRKDINTIEDAVKLLQECKKIIVLTGAGVSVSCGIPDFRSRDGIYARLAVDFPDLPDPQAMFDIEYFRKDPRPFFKFAKEIYPGQFQPSLCHKFIALSDKEGKLLRNYTQNIDTLEQVAGIQRIIQCHGSFATASCLICKYKVDCEAVRGDIFNQVVPRCPRCPADEPLAIMKPEIVFFGENLPEQFHRAMKYDKDEVDLLIVIGSSLKVRPVALIPSSIPHEVPQILINREPLPHLHFDVELLGDCDVIINELCHRLGGEYAKLCCNPVKLSEITEKPPRTQKELAYLSELPPTPLHVSEDSSSPERTSPPDSSVIVTLLDQAAKSNDDLDVSESKGCMEEKPQEVQTSRNVESIAEQMENPDLKNVGSSTGEKNERTSVAGTVRKCWPNRVAKEQISRRLDGNQYLFLPPNRYIFHGAEVYSDSEDDVLSSSSCGSNSDSGTCQSPSLEEPMEDESEIEEFYNGLEDEPDVPERAGGAGFGTDGDDQEAINEAISVKQEVTDMNYPSNKS

SEQ ID NO: 220 - protein, 851 aa, Homo sapiens
MTSHYVIAIFALMSSCLATAGPEPGALCELSPVSASHPVQALMESFTVLSGCASRGTTGLPQEVHVLNLRTAGQGPGQLQREVTLHLNPISSVHIHHKSVVFLLNSPHPLVWHLKTERLATGVSRLFLVSEGSVVQFSSANFSLTAETEERNFPHGNEHLLNWARKEYGAVTSFTELKIARNIYIKVGEDQVFPPKCNIGKNFLSLNYLAEYLQPKAAEGCVMSSQPQNEEVHIIELITPNSNPYSAFQVDITIDIRPSQEDLEVVKNLILILKCKKSVNWVIKSFDVKGSLKIIAPNSIGFGKESERSMTMTKSIRDDIPSTQGNLVKWALDNGYSPITSYTMAPVANRFHLRLENNAEEMGDEEVHTIPPELRILLDPGALPALQNPPIRGGEGQNGGLPFPFPDISRRVWNEEGEDGLPRPKDPVIPSIQLFPGLREPEEVQGSVDIALSVKCDNEKMIVAVEKDSFQASGYSGMDVTLLDPTCKAKMNGTHFVLESPLNGCGTRPRWSALDGVVYYNSIVIQVPALGDSSGWPDGYEDLESGDNGFPGDMDEGDASLFTRPEIVVFNCSLQQVRNPSSFQEQPHGNITFNMELYNTDLFLVPSQGVFSVPENGHVYVEVSVTKAEQELGFAIQTCFISPYSNPDRMSHYTIIENICPKDESVKFYSPKRVHFPIPQADMDKKRFSFVFKPVFNTSLLFLQCELTLCTKMEKHPQKLPKCVPPDEACTSLDASIIWAMMQNKKTFTKPLAVIHHEAESKEKGPSMKEPNPISPPIFHGLDTLTVMGIAFAAFVIGALLTGALWYIYSHTGETAGRQQVPTSPPASENSSAAHSIGSTQSTPCSSSSTA

SEQ ID NO: 221 - protein, 734 aa, Homo sapiens
MRPAVLGSPDRAPPEDEGPVMVKLEDSEEEGEAALWDPGPEAARLRFRCFRYEEATGPQEALAQLRELCRQWLRPEVRSKEQMLELLVLEQFLGALPPEIQARVQGQRPGSPEEAAALVDGLRREPGGPRRWVTVQVQGQEVLSEKMEPSSFQPLPETEPPTPEPGPKTPPRTMQESPLGLQVKEESEVTEDSDFLESGPLAATQESVPTLLPEEAQRCGTVLDQIFPHSKTGPEGPSWREHPRALWHEEAGGIFSPGFALQLGSISAGPGSVSPHLHVPWDLGMAGLSGQIQSPSREGGFAHALLLPSDLRSEQDPTDEDPCRGVGPALITTRWRSPRGRSRGRPSTGGGVVRGGRCDVCGKVFSQRSNLLRHQKIHTGERPFVCSECGRSFSRSSHLLRHQLTHTEERPFVCGDCGQGFVRSARLEEHRRVHTGEQPFRCAECGQSFRQRSNLLQHQRIHGDPPGPGAKPPAPPGAPEPPGPFPCSECRESFARRAVLLEHQAVHTGDKSFGCVECGERFGRRSVLLQHRRVHSGERPFACAECGQSFRQRSNLTQHRRIHTGERPFACAECGKAFRQRPTLTQHLRVHTGEKPFACPECGQRFSQRLKLTRHQRTHTGEKPYHCGECGLGFTQVSRLTEHQRIHTGERPFACPECGQSFRQHANLTQHRRIHTGERPYACPECGKAFRQRPTLTQHLRTHRREKPFACQDCGRRFHQSTKLIQHQRVHSAE

SEQ ID NO: 222 - protein, 264 aa, Homo sapiens
MHNPDGSASPTADPGSELQTLGQAARRPPPPRAGHDAPRRTRPSARKPLSCFSRRPMPTREPPKTRGSRGHLHTHPPGPGPPLQGLAPRGLKTSAPRPPCQPQPGPHKAKTKKIVFEDELLSQALLGAKKPIGAIPKGHKPRPHPVPDYELKYPPVSSERERSRYVAVFQDQYGEFLELQHEVGCAQAKLRQLEALLSSLPPPQSQKEAQVAARVWREFEMKRMDPGFLDKQARCHYLKGKLRHLKTQIQKFDDQGDSEGSVYF

SEQ ID NO: 223 - protein, 217 aa, Homo sapiens
MAGRTVRAETRSRAKDDIKKVMATIEKVRRWEKRWVTVGDTSLRIFKWVPVVDPQEEERRRAGGGAERSRGRERRGRGASPRGGGPLILLDLNDENSNQSFHSEGSLQKGTEPSPGGTPQPSRPVSPAGPPEGVPEEAQPPRLGQERDPGGITAGSTDEPPMLTKEEPVPELLEAEAPEAYPVFEPVPPVPEAAQGDTEDSEGAPPLKRICPNAPDP

SEQ ID NO: 224 - protein, 170 aa, Homo sapiens
MRRRLWLGLAWLLLARAPDAAGTPSASRGPRSYPHLEGDVRWRRLFSSTHFFLRVDPGGRVQGTRWRHGQDSILEIRSVHVGVVVIKAVSSGFYVAMNRRGRLYGSRLYTVDCRFRERIEENGHNTYASQRWRRRGQPMFLALDRRGGPRPGGRTRRYHLSAHFLPVLVS

SEQ ID NO: 225 - protein, 605 aa, Homo sapiens
MALRKGGLALALLLLSWVALGPRSLEGADPGTPGEAEGPACPAACVCSYDDDADELSVFCSSRNLTRLPDGVPGGTQALWLDGNNLSSVPPAAFQNLSSLGFLNLQGGQLGSLEPQALLGLENLCHLHLERNQLRSLALGTFAHTPALASLGLSNNRLSRLEDGLFEGLGSLWDLNLGWNSLAVLPDAAFRGLGSLRELVLAGNRLAYLQPALFSGLAELRELDLSRNALRAIKANVFVQLPRLQKLYLDRNLIAAVAPGAFLGLKALRWLDLSHNRVAGLLEDTFPGLLGLRVLRLSHNAIASLRPRTFKDLHFLEELQLGHNRIRQLAERSFEGLGQLEVLTLDHNQLQEVKAGAFLGLTNVAVMNLSGNCLRNLPEQVFRGLGKLHSLHLEGSCLGRIRPHTFTGLSGLRRLFLKDNGLVGIEEQSLWGLAELLELDLTSNQLTHLPHRLFQGLGKLEYLLLSRNRLAELPADALGPLQRAFWLDVSHNRLEALPNSLLAPLGRLRYLSLRNNSLRTFTPQPPGLERLWLEGNPWDCGCPLKALRDFALQNPSAVPRFVQAICEGDDCQPPAYTYNNITCASPPEVVGLDLRDLSEAHFAPC

SEQ ID NO: 226 - protein, 679 aa, Homo sapiens
MDRVTRYPILGIPQAHRGTGLVLDGDTSYTYHLVCMGPEASGWGQDEPQTWPTDHRAQQGVQRQGVSYSVHAYTGQPSPRGLHSENREDEGWQVYRLGARDAHQGRPTWALRPEDGEDKEMKTYRLDAGDADPRRLCDLERERWAVIQGQAVRKSSTVATLQGTPDHGDPRTPGPPRSTPLEENVVDREQIDFLAARQQFLSLEQANKGAPHSSPARGTPAGTTPGASQAPKAFNKPHLANGHVVPIKPQVKGVVREENKVRAVPTWASVQVVDDPGSLASVESPGTPKETPIEREIRLAQEREADLREQRGLRQATDHQELVEIPTRPLLTKLSLITAPRRERGRPSLYVQRDIVQETQREEDHRREGLHVGRASTPDWVSEGPQPGLRRALSSDSILSPAPDARAADPAPEVRKVNRIPPDAYQPYLSPGTPQLEFSAFGAFGKPSSLSTAEAKAATSPKATMSPRHLSESSGKPLSTKQEASKPPRGCPQANRGVVRWEYFRLRPLRFRAPDEPQQAQVPHVWGWEVAGAPALRLQKSQSSDLLERERESVLRREQEVAEERRNALFPEVFSPTPDENSDQNSRSSSQASGITGSYSVSESPFFSPIHLHSNVAWTVEDPVDSAPPGQRKKEQWYAGINPSDGINSEVLEAIRVTRHKNAMAERWESRIYASEEDD

SEQ ID NO: 227 - protein, 508 aa, Homo sapiens
MAKSNGENGPRAPAAGESLSGTRESLAQGPDAATTDELSSLGSDSEANGFAERRIDKFGFIVGSQGAEGALEEVPLEVLRQRESKWLDMLNNWDKWMAKKHKKIRLRCQKGIPPSLRGRAWQYLSGGKVKLQQNPGKFDELDMSPGDPKWLDVIERDLHRQFPFHEMFVSRGGHGQQDLFRVLKAYTLYRPEEGYCQAQAPIAAVLLMHMPAEQAFWCLVQICEKYLPGYYSEKLEAIQLDGEILFSLLQKVSPVAHKHLSRQKIDPLLYMTEWFMCAFSRTLPWSSVLRVWDMFFCEGVKIIFRVGLVLLKHALGSPEKVKACQGQYETIERLRSLSPKIMQEAFLVQEVVELPVTERQIEREHLIQLRRWQETRGELQCRSPPRLHGAKAILDAEPGPRPALQPSPSIRLPLDAPLPGSKAKPKPPKQAQKEQRKQMKGRGQLEKPPAPNQAMVVAAAGDACPPQHVPPKDSAPKDSAPQDLAPQVSAHHRSQESLTSQESEDTYL

SEQ ID NO: 228 - protein, 427 aa, Homo sapiens
MRHLGAFLFLLGVLGALTEMCEIPEMDSHLVEKLGQHLLPWMDRLSLEHLNPSIYVGLRLSSLQAGTKEDLYLHSLKLGYQQCLLGSAFSEDDGDCQGKPSMGQLALYLLALRANCEFVRGHKGDRLVSQLKWFLEDEKRAIGHDHKGHPHTSYYQYGLGILALCLHQKRVHDSVVDKLLYAVEPFHQGHHSVDTAAMAGLAFTCLKRSNFNPGRRQRITMAIRTVREEILKAQTPEGHFGNVYSTPLALQFLMTSPMRGAELGTACLKARVALLASLQDGAFQNALMISQLLPVLNHKTYIDLIFPDCLAPRVMLEPAAETIPQTQEIISVTLQVLSLLPPYRQSISVLAGSTVEDVLKKAHELGGFTYETQASLSGPYLTSVMGKAAGEREFWQLLRDPNTPLLQGIADYRPKDGETIELRLVSW

SEQ ID NO: 229 - protein, 970 aa, Homo sapiens
MLCFLDDGAGMDPSDAASVIQFGKSAKRTPESTQIGQYGNGLKSGSMRIGKDFILFTKKEDTMTCLFLSRTFHEEEGIDEVIVPLPTWNARTREPVTDNVEKFAIETELIYKYSPFRTEEEVMTQFMKIPGDSGTLVIIFNLKLMDNGEPELDIISNPRDIQMAETSPEGTKPERRSFRAYAAVLYIDPRMRIFIHGHKVQTKRLSCCLYKPRMYKYTSSRFKTRAEQEVKKAEHVARIAEEKAREAESKARTLEVRLGGDLTRDSRVMLRQVQNRAITLRREADVKKRIKEAKQRALKEPKELNFVFGVNIEHRDLDGMFIYNCSRLIKMYEKVGPQLEGGMACGGVVGVVDVPYLVLEPTHNKQDFADAKEYRHLLRAMGEHLAQYWKDIAIAQRGIIKFWDEFGYLSANWNQPPSSELRYKRRRAMEIPTTIQCDLCLKWRTLPFQLSSVEKDYPDTWVCSMNPDPEQDRCEASEQKQKVPLGTFRKDMKTQEEKQKQLTEKIRQQQEKLEALQKTTPIRSQADLKKLPLEVTTRPSTEEPVRRPQRPRSPPLPAVIRNAPSRPPSLPTPRPASQPRKAPVISSTPKLPALAAREEASTSRLLQPPEAPRKPANTLVKTASRPAPLVQQLSPSLLPNSKSPREVPSPKVIKTPVVKKTESPIKLSPATPSRKRSVAVSDEEEVEEEAERRKERCKRGRFVVKEEKKDSNELSDSAGEEDSADLKRAQKDKGLHVEVRVNREWYTGRVTAVEVGKHVVRWKVKFDYVPTDTTPRDRWVEKGSEDVRLMKPPSPEHQSLDTQQEGGEEEVGPVAQQAIAVAEPSTSECLRIEPDTTALSTNHETIDLLVQILRNCLRYFLPPSFPISKKQLSAMNSDELISFPLKEYFKQYEVGLQNLCNSYQSRADSRAKASEESLRTSERKLRETEEKLQKLRTNIVALLQKVQEDIDINTDDELDAYIEDLITKGD

SEQ ID NO: 230 - protein, 214 aa, Homo sapiens
MNVFRILGDLSHLLAMILLLGKIWRSKCCKGISGKSQILFALVFTTRYLDLFTNFISIYNTVMKVVFLLCAYVTVYMIYGKFRKTFDSENDTFRLEFLLVPVIGLSFLENYSFTLLEILWTFSIYLESVAILPQLFMISKTGEAETITTHYLFFLGLYRALYLANWIRRYQTENFYDQIAVVSGVVQTIFYCDFFYLYVTKVLKGKKLSLPMPI

SEQ ID NO: 231 - protein, 966 aa, Homo sapiens
MFWKFDLNTTSHVDKLLDKEHVTLQELMDEDDILQECKAQNQKLLDFLCRQQCMEELVSLITQDPPLDMEEKVRFKYPNTACELLTCDVPQISDRLGGDESLLSLLYDFLDHEPPLNPLLASFFSKTIGNLIARKTEQVITFLKKKDKFISLVLKHIGTSALMDLLLRLVSCVEPAGLRQDVLHWLNEEKVIQRLVELIHPSQDEDRQSNASQTLCDIVRLGRDQGSQLQEALEPDPLLTALESQDCVEQLLKNMFDGDRTESCLVSGTQVLLTLLETRRVGTEGLVDSFSQGLERSYAVSSSVLHGIEPRLKDFHQLLLNPPKKKAILTTIGVLEEPLGNARLHGARLMAALLHTNTPSINQELCRLNTMDLLLDLFFKYTWNNFLHFQVELCIAAILSHAAREERTEASGSESRVEPPHENGNRSLETPQPAASLPDNTMVTHLFQKCCLVQRILEAWEANDHTQAAGGMRRGNMGHLTRIANAVVQNLERGPVQTHISEVIRGLPADCRGRWESFVEETLTETNRRNTVDLVSTHHLHSSSEDEDIEGAFPNELSLQQAFSDYQIQQMTANFVDQFGFNDEEFADQDDNINAPFDRIAEINFNIDADEDSPSAALFEACCSDRIQPFDDDEDEDIWEDSDTRCAARVMARPRFGAPHASESCSKNGPERGGQDGKASLEAHRDAPGAGAPPAPGKKEAPPVEGDSEGAMWTAVFDEPANSTPTAPGVVRDVGSSVWAAGTSAPEEKGWAKFTDFQPFCCSESGPRCSSPVDTECSHAEGSRSQGPEKASQASYFAVSPASPCAWNVCVTRKAPLLASDSSSSGGSHSEDGDQKAASAMDAVSRGPGREAPPLPTVARTEEAVGRVGCADSRLLSPACPAPKEVTAAPAVAVPPEATVAITTALSKAGPAIPTPAVSSALAVAVPLGPIMAVTAAPAMVATLGTVTKDGKTDAPPEGAALNGPV

SEQ ID NO: 232 - protein, 509 aa, Homo sapiens
MSMGAPRSLLLALAAGLAVARPPNIVLIFADDLGYGDLGCYGHPSSTTPNLDQLAAGGLRFTDFYVPVSLCTPSRAALLTGRLPVRMGMYPGVLVPSSRGGLPLEEVTVAEVLAARGYLTGMAGKWHLGVGPEGAFLPPHQGFHRFLGIPYSHDQGPCQNLTCFPPATPCDGGCDQGLVPIPLLANLSVEAQPPWLPGLEARYMAFAHDLMADAQRQDRPFFLYYASHHTHYPQFSGQSFAERSGRGPFGDSLMELDAAVGTLMTAIGDLGLLEETLVIFTADNGPETMRMSRGGCSGLLRCGKGTTYEGGVREPALAFWPGHIAPGVTHELASSLDLLPTLAALAGAPLPNVTLDGFDLSPLLLGTGKSPRQSLFFYPSYPDEVRGVFAVRTGKYKAHFFTQGSAHSDTTADPACHASSSLTAHEPPLLYDLSKDPGENYNLLGGVAGATPEVLQALKQLQLLKAQLDAAVTFGPSQVARGEDPALQICCHPGCTPRPACCHCPDPHA

SEQ ID NO: 233 - protein, 644 aa, Homo sapiens
MEAERGPERRPAERSSPGQTPEEGAQALAEFAALHGPALRASGVPERYWGRLLHKLEHEVFDAGEVFGIMQVEEVEEEEDEAAREVRKQQPNPGNELCYKVIVTRESGLQAAHPNSIFLIDHAWTCRVEHARQQLQQVPGLLHRMANLMGIEFHGELPSTEAVALVLEEMWKFNQTYQLAHGTAEEKMPVWYIMDEFGSRIQHADVPSFATAPFFYMPQQVAYTLLWPLRDLDTGEEVTRDFAYGETDPLIRKCMLLPWAPTDMLDLSSCTPEPPAEHYQAILEENKEKLPLDINPVVHPHGHIFKVYTDVQQVASSLTHPRFTLTQSEADADILFNFSHFKDYRKLSQERPGVLLNQFPCENLLTVKDCLASIARRAGGPEGPPWLPRTFNLRTELPQFVSYFQQRERWGEDNHWICKPWNLARSLDTHVTKSLHSIIRHRESTPKVVSKYIESPVLFLREDVGKVKFDIRYIVLLRSVRPLRLFVYDVFWLRFSNRAFALNDLDDYEKHFTVMNYDPDVVLKQVHCEEFIPEFEKQYPEFPWTDVQAEIFRAFTELFQVACAKPPPLGLCDYPSSRAMYAVDLMLKWDNGPDGRRVMQPQILEVNFNPDCERACRYHPTFFNDVFSTLFLDQPGGCHVTCLV

SEQ ID NO: 234 - protein, 251 aa, Homo sapiens
MELSAIGEQVFAVESIRKKRVRKGKVEYLVKWKGWPPKYSTWEPEEHILDPRLVMAYEEKEERDRASGYRKRGPKPKRLLLQRLYSMDLRSSHKAKGKEKLCFSLTCPLGSGSPEGVVKAGAPELVDKGPLVPTLPFPLRKPRKAHKYLRLSRKKFPPRGPNLESHSHRRELFLQEPPAPDVLQAAGEWEPAAQPPEEEADADLAEGPPPWTPALPSSEVTVTDITANSITVTFREAQAAEGFFRDRSGKF

SEQ ID NO: 235 - protein, 481 aa, Homo sapiens
MYDAERGWSLSFAGCGFLGFYHVGATRCLSEHAPHLLRDARMLFGASAGALHCVGVLSGIPLEQTLQVLSDLVRKARSRNIGIFHPSFNLSKFLRQGLCKCLPANVHQLISGKIGISLTRVSDGENVLVSDFRSKDEVVDALVCSCFIPFYSGLIPPSFRGVRYVDGGVSDNVPFIDAKTTITVSPFYGEYDICPKVKSTNFLHVDITKLSLRLCTGNLYLLSRAFVPPDLKVLGEICLRGYLDAFRFLEEKGICNRPQPGLKSSSEGMDPEVAMPSWANMSLDSSPESAALAVRLEGDELLDHLRLSILPWDESILDTLSPRLATALSEEMKDKGGYMSKICNLLPIRIMSYVMLPCTLPVESAIAIVQRLVTWLPDMPDDVLWLQWVTSQVFTRVLMCLLPASRSQMPVSSQQASPCTPEQDWPCWTPCSPKGCPAETKAEATPRSILRSSLNFFLGNKVPAGAEGLSTFPSFSLEKSL

SEQ ID NO: 236 - protein, 1960 aa, Homo sapiens
MAQQAADKYLYVDKNFINNPLAQADWAAKKLVWVPSDKSGFEPASLKEEVGEEAIVELVENGKKVKVNKDDIQKMNPPKFSKVEDMAELTCLNEASVLHNLKERYYSGLIYTYSGLFCVVINPYKNLPIYSEEIVEMYKGKKRHEMPPHIYAITDTAYRSMMQDREDQSILCTGESGAGKTENTKKVIQYLAYVASSHKSKKDQGELERQLLQANPILEAFGNAKTVKNDNSSRFGKFIRINFDVNGYIVGANIETYLLEKSRAIRQAKEERTFHIFYYLLSGAGEHLKTDLLLEPYNKYRFLSNGHVTIPGQQDKDMFQETMEAMRIMGIPEEEQMGLLRVISGVLQLGNIVFKKERNTDQASMPDNTAAQKVSHLLGINVTDFTRGILTPRIKVGRDYVQKAQTKEQADFAIEALAKATYERMFRWLVLRINKALDKTKRQGASFIGILDIAGFEIFDLNSFEQLCINYTNEKLQQLFNHTMFILEQEEYQREGIEWNFIDFGLDLQPCIDLIEKPAGPPGILALLDEECWFPKATDKSFVEKVMQEQGTHPKFQKPKQLKDKADFCIIHYAGKVDYKADEWLMKNMDPLNDNIATLLHQSSDKFVSELWKDVDRIIGLDQVAGMSETALPGAFKTRKGMFRTVGQLYKEQLAKLMATLRNTNPNFVRCIIPNHEKKAGKLDPHLVLDQLRCNGVLEGIRICRQGFPNRVVFQEFRQRYEILTPNSIPKGFMDGKQACVLMIKALELDSNLYRIGQSKVFFRAGVLAHLEEERDLKITDVIIGFQACCRGYLARKAFAKRQQQLTAMKVLQRNCAAYLKLRNWQWWRLFTKVKPLLQVSRQEEEMMAKEEELVKVREKQLAAENRLTEMETLQSQLMAEKLQLQEQLQAETELCAEAEELRARLTAKKQELEEICHDLEARVEEEEERCQHLQAEKKKMQQNIQELEEQLEEEESARQKLQLEKVTTEAKLKKLEEEQIILEDQNCKLAKEKKLLEDRIAEFTTNLTEEEEKSKSLAKLKNKHEAMITDLEERLRREEKQRQELEKTRRKLEGDSTDLSDQIAELQAQIAELKMQLAKKEEELQAALARVEEEAAQKNMALKKIRELESQISELQEDLESERASRNKAEKQKRDLGEELEALKTELEDTLDSTAAQQELRSKREQEVNILKKTLEEEAKTHEAQIQEMRQKHSQAVEELAEQLEQTKRVKANLEKAKQTLENERGELANEVKVLLQGKGDSEHKRKKVEAQLQELQVKFNEGERVRTELADKVTKLQVELDNVTGLLSQSDSKSSKLTKDFSALESQLQDTQELLQEENRQKLSLSTKLKQVEDEKNSFREQLEEEEEAKHNLEKQIATLHAQVADMKKKMEDSVGCLETAEEVKRKLQKDLEGLSQRHEEKVAAYDKLEKTKTRLQQELDDLLVDLDHQRQSACNLEKKQKKFDQLLAEEKTISAKYAEERDRAEAEAREKETKALSLARALEEAMEQKAELERLNKQFRTEMEDLMSSKDDVGKSVHELEKSKRALEQQVEEMKTQLEELEDELQATEDAKLRLEVNLQAMKAQFERDLQGRDEQSEEKKKQLVRQVREMEAELEDERKQRSMAVAARKKLEMDLKDLEAHIDSANKNRDEAIKQLRKLQAQMKDCMRELDDTRASREEILAQAKENEKKLKSMEAEMIQLQEELAAAERAKRQAQQERDELADEIANSSGKGALALEEKRRLEARIAQLEEELEEEQGNTELINDRLKKANLQIDQINTDLNLERSHAQKNENARQQLERQNKELKVKLQEMEGTVKSKYKASITALEAKIAQLEEQLDNETKERQAACKQVRRTEKKLKDVLLQVDDERRNAEQYKDQADKASTRLKQLKRQLEEAEEEAQRANASRRKLQRELEDATETADAMNREVSSLKNKLRRGDLPFVVPRRMARKGAGDGSDEEVDGKADGAEAKPAE

SEQ ID NO: 237 - protein, 684 aa, Homo sapiens
MGLSAAAPLWGPPGLLLAIALHPALSVPPRRDYCVLGAGPAGLQMAYFLQRAGRDYAVFERAPRPGSFFTRYPRHRKLISINKRYTGKANAEFNLRHDWNSLLSHDPRLLFRHYSRAYFPDARDMVRYLGDFADTLGLRVQYNTTIAHVTLDKDRQAWNGHYFILTDQKGQVHQCSVLFVATGLSVPNQVDFPGSEYAEGYESVSVDPEDFVGQNVLILGRGNSAFETAENILGVTNFIHMLSRSRVRLSWATHYVGDLRAINNGLLDTYQLKSLDGLLESDLTDLAILKDSKGKFHVTPKFFLEEANTNQSADSITLPQDDNDNFAMRVPYDRVIRCLGWNFDFSIFNKSLRLNSGNAFGKKYPLIRASYESKGSRGLFILGTASHSVDYRKSAGGFIHGFRYTVRAVHRLLEHRHHSVTWPATELPITQLTSSIVRRVNEASGLYQMFGVLADVILLKENSTAFEYLEEFPIQMLAQLETLTGRKAKHGLFVINMEYGRNFSGPDKDVFFDDRSVGHTEDAWQSNFLHPVIYYYRYLPTEQEVRFRPAHWPLPRPTAIHHIVEDFLTDWTAPIGHILPLRRFLENCLDTDLRSFYAESCFLFALTRQKLPPFCQQGYLRMQGLVSTESLWQHRVESRLLRDYAPTGRRLEDSSQQLGDQEPLGSPLAPGPLAQSVDSNKEEL

SEQ ID NO: 238 - protein, 498 aa, Homo sapiens
MAAGGDHGSPDSYRSPLASRYASPEMCFVFSDRYKFRTWRQLWLWLAEAEQTLGLPITDEQIQEMKSNLENIDFKMAAEEEKRLRHDVMAHVHTFGHCCPKAAGIIHLGATSCYVGDNTSLILSRGVIKAYCNLRLPGSDSSPVSVSQLARVISRLADFAKERASLPTLGFTHFQPAQLTTVGKRCCLWIQDLCMDLQNLKRVRDDLRFRGVKGTTGTQASFLQLFEGDDHKVEQLDKMVTEKAGFKRAFIITGQTYTRKVDIEVLSVLASLGASVHKICTDIRLLANLKEMEEPFEKQQIGSSAMPYKRNPMRSERCCSLARHLMTLVMDPLQTASVQWFERTLDDSANRRICLAEAFLTADTILNTLQNISEGLVVYPKVIERRIRQELPFMATENIIMAMVKAGGSRQDCHEKIRVLSQQAASVVKQEGGDNDLIERIQVDAYFSPIHSQLDHLLDPSSFTGRASQQVQRFLEEEVYPLLKPYESVMKVKAELCL

SEQ ID NO: 239 - protein, 357 aa, Homo sapiens
MDSVEKTTNRSEQKSRKFLKSLIRKQPQELLLVIGTGVSAAVAPGIPALCSWRSCIEAVIEAAEQLEVLHPGDVAEFRRKVTKDRDLLVVAHDLIRKMSPRTGDAKPSFFQDCLMEVFDDLEQHIRSPVVLQSILSLMDRGAMVLTTNYDNLLEAFGRRQNKPMESLDLKDKTKVLEWARGHMKYGVLHIHGLYTDPCGVVLDPSGYKDVTQDAEVMEVLQNLYRTKSFLFVGCGETLRDQIFQALFLYSVPNKVDLEHYMLVLKENEDHFFKHQADMLLHGIKVVSYGDCFDHFPGYVQDLATQICKQQSPDADRVDSTTLLGNACQDCAKRKLEENGIEVSKKRTQSDTDDAGGS

SEQ ID NO: 240 - protein, 551 aa, Homo sapiens
MAAPALSWRLPLLILLLPLATSWASAAVNGTSQFTCFYNSRANISCVWSQDGALQDTSCQVHAWPDRRRWNQTCELLPVSQASWACNLILGAPDSQKLTTVDIVTLRVLCREGVRWRVMAIQDFKPFENLRLMAPISLQVVHVETHRCNISWEISQASHYFERHLEFEARTLSPGHTWEEAPLLTLKQKQEWICLETLTPDTQYEFQVRVKPLQGEFTTWSPWSQPLAFRTKPAALGKDTIPWLGHLLVGLSGAFGFIILVYLLINCRNTGPWLKKVLKCNTPDPSKFFSQLSSEHGGDVQKWLSSPFPSSSFSPGGLAPEISPLEVLERDKVTQLLLQQDKVPEPASLSSNHSLTSCFTNQGYFFFHLPDALEIEACQVYFTYDPYSEEDPDEGVAGAPTGSSPQPLQPLSGEDDAYCTFPSRDDLLLFSPSLLGGPSPPSTAPGGSGAGEERMPPSLQERVPRDWDPQPLGPPTPGVPDLVDFQPPPELVLREAGEEVPDAGPREGVSFPWSRPPGQGEFRALNARLPLNTDAYLSLQELQGQDPTHLV

SEQ ID NO: 241 - protein, 705 aa, Homo sapiens
MEKPRSIEETPSSEPMEEEEDDDLELFGGYDSFRSYNSSVGSESSSYLEESSEAENEDREAGELPTSPLHLLSPGTPRSLDGSGSEPAVCEMCGIVGTREAFFSKTKRFCSVSCSRSYSSNSKKASILARLQGKPPTKKAKVLHKAAWSAKIGAFLHSQGTGQLADGTPTGQDALVLGFDWGKFLKDHSYKAAPVSCFKHVPLYDQWEDVMKGMKVEVLNSDAVLPSRVYWIASVIQTAGYRVLLRYEGFENDASHDFWCNLGTVDVHPIGWCAINSKILVPPRTIHAKFTDWKGYLMKRLVGSRTLPVDFHIKMVESMKYPFRQGMRLEVVDKSQVSRTRMAVVDTVIGGRLRLLYEDGDSDDDFWCHMWSPLIHPVGWSRRVGHGIKMSERRSDMAHHPTFRKIYCDAVPYLFKKVRAVYTEGGWFEEGMKLEAIDPLNLGNICVATVCKVLLDGYLMICVDGGPSTDGLDWFCYHASSHAIFPATFCQKNDIELTPPKGYEAQTFNWENYLEKTKSKAAPSRLFNMDCPNHGFKVGMKLEAVDLMEPRLICVATVKRVVHRLLSIHFDGWDSEYDQWVDCESPDIYPVGWCELTGYQLQPPVAAEPATPLKAKEATKKKKKQFGKKRKRIPPTKTRPLRQGSKKPLLEDDPQGARKISSEPVPGEIIAVRVKEEHLDVASPDKASSPELPVSVENIKQETDD

SEQ ID NO: 242 - protein, 762 aa, Homo sapiens
MEGPRSSTHVPLVLPLLVLLLLAPARQAAAQRCPQACICDNSRRHVACRYQNLTEVPDAIPELTQRLDLQGNLLKVIPAAAFQGVPHLTHLDLRHCEVELVAEGAFRGLGRLLLLNLASNHLRELPQEALDGLGSLRRLELEGNALEELRPGTFGALGALATLNLAHNALVYLPAMAFQGLLRVRWLRLSHNALSVLAPEALAGLPALRRLSLHHNELQALPGPVLSQARGLARLELGHNPLTYAGEEDGLALPGLRELLLDGGALQALGPRAFAHCPRLHTLDLRGNQLDTLPPLQGPGQLRRLRLQGNPLWCGCQARPLLEWLARARVRSDGACQGPRRLRGEALDALRPWDLRCPGDAAQEEEELEERAVAGPRAPPRGPPRGPGEERAVAPCPRACVCVPESRHSSCEGCGLQAVPRGFPSDTQLLDLRRNHFPSVPRAAFPGLGHLVSLHLQHCGIAELEAGALAGLGRLIYLYLSDNQLAGLSAAALEGAPRLGYLYLERNRFLQVPGAALRALPSLFSLHLQDNAVDRLAPGDLGRTRALRWVYLSGNRITEVSLGALGPARELEKLHLDRNQLREVPTGALEGLPALLELQLSGNPLRALRDGAFQPVGRSLQHLFLNSSGLEQICPGAFSGLGPGLQSLHLQKNQLRALPALPSLSQLELIDLSSNPFHCDCQLLPLHRWLTGLNLRVGATCATPPNARGQRVKAAAAVFEDCPGWAARKAKRTPASRPSARRTPIKGRQCGADKVGKEKGRL

SEQ ID NO: 243 - protein, 537 aa, Homo sapiens
MGATGAAEPLQSVLWVKQQRCAVSLEPARALLRWWRSPGPGAGAPGADACSVPVSEIIAVEETDVHGKHQGSGKWQKMEKPYAFTVHCVKRARRHRWKWAQVTFWCPEEQLCHLWLQTLREMLEKLTSRPKHLLVFINPFGGKGQGKRIYERKVAPLFTLASITTDIIVTEHANQAKETLYEINIDKYDGIVCVGGDGMFSEVLHGLIGRTQRSAGVDQNHPRAVLVPSSLRIGIIPAGSTDCVCYSTVGTSDAETSALHIVVGDSLAMDVSSVHHNSTLLRYSVSLLGYGFYGDIIKDSEKKRWLGLARYDFSGLKTFLSHHCYEGTVSFLPAQHTVGSPRDRKPCRAGCFVCRQSKQQLEEEQKKALYGLEAAEDVEEWQVVCGKFLAINATNMSCACRRSPRGLSPAAHLGDGSSDLILIRKCSRFNFLRFLIRHTNQQDQFDFTFVEVYRVKKFQFTSKHMEDEDSDLKEGGKKRFGHICSSHPSCCCTVSNSSWNCDGEVLHSPAIEVRVHCQLVRLFARGIEENPKPDSHS

SEQ ID NO: 244 - protein, 1058 aa, Homo sapiens
MRRKGRCHRGSAARHPSSPCSVKHSPTRETLTYAQAQRMVEIEIEGRLHRISIFDPLEIILEDDLTAQEMSECNSNKENSERPPVCLRTKRHKNNRVKKKNEALPSAHGTPASASALPEPKVRIVEYSPPSAPRRPPVYYKFIEKSAEELDNEVEYDMDEEDYAWLEIVNEKRKGDCVPAVSQSMFEFLMDRFEKESHCENQKQGEQQSLIDEDAVCCICMDGECQNSNVILFCDMCNLAVHQECYGVPYIPEGQWLCRHCLQSRARPADCVLCPNKGGAFKKTDDDRWGHVVCALWIPEVGFANTVFIEPIDGVRNIPPARWKLTCYLCKQKGVGACIQCHKANCYTAFHVTCAQKAGLYMKMEPVKELTGGGTTFSVRKTAYCDVHTPPGCTRRPLNIYGDVEMKNGVCRKESSVKTVRSTSKVRKKAKKAKKALAEPCAVLPTVCAPYIPPQRLNRIANQVAIQRKKQFVERAHSYWLLKRLSRNGAPLLRRLQSSLQSQRSSQQRENDEEMKAAKEKLKYWQRLRHDLERARLLIELLRKREKLKREQVKVEQVAMELRLTPLTVLLRSVLDQLQDKDPARIFAQPVSLKEVPDYLDHIKHPMDFATMRKRLEAQGYKNLHEFEEDFDLIIDNCMKYNARDTVFYRAAVRLRDQGGVVLRQARREVDSIGLEEASGMHLPERPAAAPRRPFSWEDVDRLLDPANRAHLGLEEQLRELLDMLDLTCAMKSSGSRSKRAKLLKKEIALLRNKLSQQHSQPLPTGPGLEGFEEDGAALGPEAGEEVLPRLETLLQPRKRSRSTCGDSEVEEESPGKRLDAGLTNGFGGARSEQEPGGGLGRKATPRRRCASESSISSSNSPLCDSSFNAPKCGRGKPALVRRHTLEDRSELISCIENGNYAKAARIAAEVGQSSMWISTDAAASVLEPLKVVWAKCSGYPSYPALIIDPKMPRVPGHHNGVTIPAPPLDVLKIGEHMQTKSDEKLFLVLFFDNKRSWQWLPKSKMVPLGIDETIDKLKMMEGRNSSIRKAVRIAFDRAMNHLSRVHGEPTSDLSDID

SEQ ID NO: 245 - protein, 1171 aa, Homo sapiens
MENNLKTCPKEDGDFVSDKIKFKIEEEDDDGIPPDSLERMDFKSEQEDMKQTDSGGERAGLGGTGCSCKPPGKYLSAESEDDYGALFSQYSSTLYDVAMEAVTQSLLSSRNMSSRKKSPAWKHFFISPRDSTKAICMYCVKEFSRGKNEKDLSTSCLMRHVRRAHPTVLIQENGSVSAVSSFPSPSLLLPPQPADAGDLSTILSPIKLVQKVASKIPSPDRITEESVSVVSSEEISSDMSVSEKCGREEALVGSSPHLPALHYDEPAENLAEKSLPLPKSTSGSRRRSAVWKHFYLSPLDNSKAVCIHCMNEFSRGKNGKDLGTSCLIRHMWRAHRAIVLQENGGTGIPPLYSTPPTLLPSLLPPEGELSSVSSSPVKPVRESPSASSSPDRLTEDLQSHLNPGDGLMEDVAAFSSSDDIGEASASSPEKQQADGLSPRLFESGAIFQQNKKVMKRLKSEVWHHFSLAPMDSLKAECRYCGCAISRGKKGDVGTSCLMRHLYRRHPEVVGSQKGFLGASLANSPYATLASAESSSSKLTDLPTVVTKNNQVMFPVNSKKTSKLWNHFSICSADSTKVVCLHCGRTISRGKKPTNLGTSCLLRHLQRFHSNVLKTEVSETARPSSPDTRVPRGTELSGASSFDDTNEKFYDSHPVAKKITSLIAEMIALDLQPYSFVDNVGFNRLLEYLKPQYSLPAPSYFSRTAIPGMYDNVKQIIMSHLKEAESGVIHFTSGIWMSNQTREYLTLTAHWVSFESPARPRCDDHHCSALLDVSQVDCDYSGNSIQKQLECWWEAWVTSTGLQVGITVTDNASIGKTLNEGEHSSVQCFSHTVNLIVSEAIKSQRMVQNLLSLARKICERVHRSPKAKEKLAELQREYALPQHHLIQDVPSKWSTSFHMLERLIEQKRAINEMSVECNFRELISCDQWEVMQSVCRALKPFEAASREMSTQMSTLSQVIPMVHILNRKVEMLFEETMGIDTMLRSLKEAMVSRLSATLHDPRYVFATLLDPRYKASLFTEEEAEQYKQDLIRELELMNSTSEDVAASHRCDAGSPSKDSAAEENLWSLVAKVKKKDPREKLPEAMVLAYLEEEVLEHSCDPLTYWNLKKASWPGLSALAVRFLGCPPSIVPSEKLFNTPTENGSLGQSRLMMEHFEKLIFLKVNLPLIYFQY

SEQ ID NO: 246 - protein, 669 aa, Homo sapiens
MGTALVYHEDMTATRLLWDDPECEIERPERLTAALDRLRQRGLEQRCLRLSAREASEEELGLVHSPEYVSLVRETQVLGKEELQALSGQFDAIYFHPSTFHCARLAAGAGLQLVDAVLTGAVQNGLALVRPPGHHGQRAAANGFCVFNNVAIAAAHAKQKHGLHRILVVDWDVHHGQGIQYLFEDDPSVLYFSWHRYEHGRFWPFLRESDADAVGRGQGLGFTVNLPWNQVGMGNADYVAAFLHLLLPLAFEFDPELVLVSAGFDSAIGDPEGQMQATPECFAHLTQLLQVLAGGRVCAVLEGGYHLESLAESVCMTVQTLLGDPAPPLSGPMAPCQSALESIQSARAAQAPHWKSLQQQDVTAVPMSPSSHSPEGRPPPLLPGGPVCKAAASAPSSLLDQPCLCPAPSVRTAVALTTPDITLVLPPDVIQQEASALREETEAWARPHESLAREEALTALGKLLYLLDGMLDGQVNSGIAATPASAAAATLDVAVRRGLSHGAQRLLCVALGQLDRPPDLAHDGRSLWLNIRGKEAAALSMFHVSTPLPVMTGGFLSCILGLVLPLAYGFQPDLVLVALGPGHGLQGPHAALLAAMLRGLAGGRVLALLEENSTPQLAGILARVLNGEAPPSLGPSSVASPEDVQALMYLRGQLEPQWKMLQCHPHLVA

SEQ ID NO: 247 - protein, 745 aa, Homo sapiens
MPFPVTTQGSQQTQPPQKHYGITSPISLAAPKETDCVLTQKLIETLKPFGVFEEEEELQRRILILGKLNNLVKEWIREISESKNLPQSVIENVGGKIFTFGSYRLGVHTKGADIDALCVAPRHVDRSDFFTSFYDKLKLQEEVKDLRAVEEAFVPVIKLCFDGIEIDILFARLALQTIPEDLDLRDDSLLKNLDIRCIRSLNGCRVTDEILHLVPNIDNFRLTLRAIKLWAKRHNIYSNILGFLGGVSWAMLVARTCQLYPNAIASTLVHKFFLVFSKWEWPNPVLLKQPEECNLNLPVWDPRVNPSDRYHLMPIITPAYPQQNSTYNVSVSTRMVMVEEFKQGLAITDEILLSKAEWSKLFEAPNFFQKYKHYIVLLASAPTEKQRLEWVGLVESKIRILVGSLEKNEFITLAHVNPQSFPAPKENPDKEEFRTMWVIGLVFKKTENSENLSVDLTYDIQSFTDTVYRQAINSKMFEVDMKIAAMHVKRKQLHQLLPNHVLQKKKKHSTEGVKLTALNDSSLDLSMDSDNSMSVPSPTSATKTSPLNSSGSSQGRNSPAPAVTAASVTNIQATEVSVPQVNSSESSGGTSSESIPQTATQPAISPPPKPTVSRVVSSTRLVNPPPRSSGNAATSGNAATKIPTPIVGVKRTSSPHKEESPKKTKTEEDETSEDANCLALSGHDKTEAKEQLDTETSTTQSETIQTAASLLASQKTSSTDLSDIPALPANPIPVIKNSIKLRLNR

SEQ ID NO: 248 - protein, 732 aa, Homo sapiens
MPEETQTQDQPMEEEEVETFAFQAEIAQLMSLIINTFYSNKEIFLRELISNSSDALDKIRYESLTDPSKLDSGKELHINLIPNKQDRTLTIVDTGIGMTKADLINNLGTIAKSGTKAFMEALQAGADISMIGQFGVGFYSAYLVAEKVTVITKHNDDEQYAWESSAGGSFTVRTDTGEPMGRGTKVILHLKEDQTEYLEERRIKEIVKKHSQFIGYPITLFVEKERDKEVSDDEAEEKEDKEEEKEKEEKESEDKPEIEDVGSDEEEEKKDGDKKKKKKIKEKYIDQEELNKTKPIWTRNPDDITNEEYGEFYKSLTNDWEDHLAVKHFSVEGQLEFRALLFVPRRAPFDLFENRKKKNNIKLYVRRVFIMDNCEELIPEYLNFIRGVVDSEDLPLNISREMLQQSKILKVIRKNLVKKCLELFTELAEDKENYKKFYEQFSKNIKLGIHEDSQNRKKLSELLRYYTSASGDEMVSLKDYCTRMKENQKHIYYITGETKDQVANSAFVERLRKHGLEVIYMIEPIDEYCVQQLKEFEGKTLVSVTKEGLELPEDEEEKKKQEEKKTKFENLCKIMKDILEKKVEKVVVSNRLVTSPCCIVTSTYGWTANMERIMKAQALRDNSTMGYMAAKKHLEINPDHSIIETLRQKAEADKNDKSVKDLVILLYETALLSSGFSLEDPQTHANRIYRMIKLGLGIDEDDPTADDTSAAVTEEMPPLEGDDDTSRMEEVD

SEQ ID NO: 249 - protein, 1375 aa, Homo sapiens
MEGDRVAGRPVLSSLPVLLLLPLLMLRAAALHPDELFPHGESWGDQLLQEGDDESSAVVKLANPLHFYEARFSNLYVGTNGIISTQDFPRETQYVDYDFPTDFPAIAPFLADIDTSHGRGRVLYREDTSPAVLGLAARYVRAGFPRSARFTPTHAFLATWEQVGAYEEVKRGALPSGELNTFQAVLASDGSDSYALFLYPANGLQFLGTRPKESYNVQLQLPARVGFCRGEADDLKSEGPYFSLTSTEQSVKNLYQLSNLGIPGVWAFHIGSTSPLDNVRPAAVGDLSAAHSSVPLGRSFSHATALESDYNEDNLDYYDVNEEEAEYLPGEPEEALNGHSSIDVSFQSKVDTKPLEESSTLDPHTKEGTSLGEVGGPDLKGQVEPWDERETRSPAPPEVDRDSLAPSWETPPPYPENGSIQPYPDGGPVPSEMDVPPAHPEEEIVLRSYPASGHTTPLSRGTYEVGLEDNIGSNTEVFTYNAANKETCEHNHRQCSRHAFCTDYATGFCCHCQSKFYGNGKHCLPEGAPHRVNGKVSGHLHVGHTPVHFTDVDLHAYIVGNDGRAYTAISHIPQPAAQALLPLTPIGGLFGWLFALEKPGSENGFSLAGAAFTHDMEVTFYPGEETVRITQTAEGLDPENYLSIKTNIQGQVPYVSANFTAHISPYKELYHYSDSTVTSTSSRDYSLTFGAINQTWSYRIHQNITYQVCRHAPRHPSFPTTQQLNVDRVFALYNDEERVLRFAVTNQIGPVKEDSDPTPGNPCYDGSHMCDTTARCHPGTGVDYTCECASGYQGDGRNCVDENECATGFHRCGPNSVCINLPGSYRCECRSGYEFADDRHTCILITPPANPCEDGSHTCAPAGQARCVHHGGSTFSCACLPGYAGDGHQCTDVDECSENRCHPAATCYNTPGSFSCRCQPGYYGDGFQCIPDSTSSLTPCEQQQRHAQAQYAYPGARFHIPQCDEQGNFLPLQCHGSTGFCWCVDPDGHEVPGTQTPPGSTPPHCGPSPEPTQRPPTICERWRENLLEHYGGTPRDDQYVPQCDDLGHFIPLQCHGKSDFCWCVDKDGREVQGTRSQPGTTPACIPTVAPPMVRPTPRPDVTPPSVGTFLLYTQGQQIGYLPLNGTRLQKDAAKTLLSLHGSIIVGIDYDCRERMVYWTDVAGRTISRAGLELGAEPETIVNSGLISPEGLAIDHIRRTMYWTDSVLDKIESALLDGSERKVLFYTDLVNPRAIAVDPIRGNLYWTDWNREAPKIETSSLDGENRRILINTDIGLPNGLTFDPFSKLLCWADAGTKKLECTLPDGTGRRVIQNNLKYPFSIVSYADHFYHTDWRRDGVVSVNKHSGQFTDEYLPEQRSHLYGITAVYPYCPTGRK

SEQ ID NO: 250 - protein, 713 aa, Homo sapiens
MSTRTPLPTVNERDTENHTSHGDGRQEVTSRTSRSGARCRNSIASCADEQPHIGNYRLLKTIGKGNFAKVKLARHILTGREVAIKIIDKTQLNPTSLQKLFREVRIMKILNHPNIVKLFEVIETEKTLYLIMEYASGGEVFDYLVAHGRMKEKEARSKFRQIVSAVQYCHQKRIVHRDLKAENLLLDADMNIKIADFGFSNEFTVGGKLDTFCGSPPYAAPELFQGKKYDGPEVDVWSLGVILYTLVSGSLPFDGQNLKELRERVLRGKYRIPFYMSTDCENLLKRFLVLNPIKRGTLEQIMKDRWINAGHEEDELKPFVEPELDISDQKRIDIMVGMGYSQEEIQESLSKMKYDEITATYLLLGRKSSEVRPSSDLNNSTGQSPHHKVQRSVSSSQKQRRYSDHAGPAIPSVVAYPKRSQTSTADSDLKEDGISSRKSSGSAVGGKGIAPASPMLGNASNPNKADIPERKKSSTVPSSNTASGGMTRRNTYVCSERTTADRHSVIQNGKENSTIPDQRTPVASTHSISSAATPDRIRFPRGTASRSTFHGQPRERRTATYNGPPASPSLSHEATPLSQTRSRGSTNLFSKLTSKLTRSRNVSAEQKDENKEAKPRSLRFTWSMKTTSSMDPGDMMREIRKVLDANNCDYEQRERFLLFCVHGDGHAENLVQWEMEVCKLPRLSLNGVRFKRISGTSIAFKNIASKIANELKL

SEQ ID NO: 251 - protein, 1047 aa, Homo sapiens
MAVTLDKDAYYRRVKRLYSNWRKGEDEYANVDAIVVSVGVDEEIVYAKSTALQTWLFGYELTDTIMVFCDDKIIFMASKKKVEFLKQIANTKGNENANGAPAITLLIREKNESNKSSFDKMIEAIKESKNGKKIGVFSKDKFPGEFMKSWNDCLNKEGFDKIDISAVVAYTIAVKEDGELNLMKKAASITSEVFNKFFKERVMEIVDADEKVRHSKLAESVEKAIEEKKYLAGADPSTVEMCYPPIIQSGGNYNLKFSVVSDKNHMHFGAITCAMGIRFKSYCSNLVRTLMVDPSQEVQENYNFLLQLQEELLKELRHGVKICDVYNAVMDVVKKQKPELLNKITKNLGFGMGIEFREGSLVINSKNQYKLKKGMVFSINLGFSDLTNKEGKKPEEKTYALFIGDTVLVDEDGPATVLTSVKKKVKNVGIFLKNEDEEEEEEEKDEAEDLLGRGSRAALLTERTRNEMTAEEKRRAHQKELAAQLNEEAKRRLTEQKGEQQIQKARKSNVSYKNPSLMPKEPHIREMKIYIDKKYETVIMPVFGIATPFHIATIKNISMSVEGDYTYLRINFYCPGSALGRNEGNIFPNPEATFVKEITYRASNIKAPGEQTVPALNLQNAFRIIKEVQKRYKTREAEEKEKEGIVKQDSLVINLNRSNPKLKDLYIRPNIAQKRMQGSLEAHVNGFRFTSVRGDKVDILYNNIKHALFQPCDGEMIIVLHFHLKNAIMFGKKRHTDVQFYTEVGEITTDLGKHQHMHDRDDLYAEQMEREMRHKLKTAFKNFIEKVEALTKEELEFEVPFRDLGFNGAPYRSTCLLQPTSSALVNATEWPPFVVTLDEVELIHFERVQFHLKNFDMVIVYKDYSKKVTMINAIPVASLDPIKEWLNSCDLKYTEGVQSLNWTKIMKTIVDDPEGFFEQGGWSFLEPEGEGSDAEEGDSESEIEDETFNPSEDDYEEEEEDSDEDYSSEAEESDYSKESLGSEEESGKDWDELEEEARKADRESRYEEEEEQSRSMSRKRKASVHSSGRGSNRGSRHSSAPPKKKRK

SEQ ID NO: 252 - protein, 255 aa, Homo sapiens
MQPLLLLLAFLLPTGAEAGEIIGGRESRPHSRPYMAYLQIQSPAGQSRCGGFLVREDFVLTAAHCWGSNINVTLGAHNIQRRENTQQHITARRAIRHPQYNQRTIQNDIMLLQLSRRVRRNRNVNPVALPRAQEGLRPGTLCTVAGWGRVSMRRGTDTLREVQLRVQRDRQCLRIFGSYDPRRQICVGDRRERKAAFKGDSGGPLLCNNVAHGIVSYGKSSGVPPEVFTRVSSFLPWIRTTMRSFKLLDQMETPL

SEQ ID NO: 253 - protein, 247 aa, Homo sapiens
MQPILLLLAFLLLPRADAGEIIGGHEAKPHSRPYMAYLMIWDQKSLKRCGGFLIRDDFVLTAAHCWGSSINVTLGAHNIKEQEPTQQFIPVKRPIPHPAYNPKNFSNDIMLLQLERKAKRTRAVQPLRLPSNKAQVKPGQTCSVAGWGQTAPLGKHSHTLQEVKMTVQEDRKCESDLRHYYDSTIELCVGDPEIKKTSFKGDSGGPLVCNKVAQGIVSYGRNNGMPPRACTKVSSFVHWIKKTMKRY

SEQ ID NO: 254 - protein, 1332 aa, Homo sapiens [sequence omitted]

SEQ ID NO: 255 - protein, 847 aa, Homo sapiens
MAKPLTDQEKRRQISIRGIVGVENVAELKKSFNRHLHFTLVKDRNVATTRDYYFALAHTVRDHLVGRWIRTQQHYYDKCPKRVYYLSLEFYMGRTLQNTMINLGLQNACDEAIYQLGLDIEELEEIEEDAGLGNGGLGRLAACFLDSMATLGLAAYGYGIRYEYGIFNQKIRDGWQVEEADDWLRYGNPWEKSRPEFMLPVHFYGKVEHTNTGTKWIDTQVVLALPYDTPVPGYMNNTVNTMRLWSARAPNDFNLRDFNVGDYIQAVLDRNLAENISRVLYPNDNFFEGKELRLKQEYFVVAATLQDIIRRFKASKFGSTRGAGTVFDAFPDQVAIQLNDTHPALAIPELMRIFVDIEKLPWSKAWELTQKTFAYTNHTVLPEALERWPVDLVEKLLPRHLEIIYEINQKHLDRIVALFPKDVDRLRRMSLIEEEGSKRINMAHLCIVGSHAVNGVAKIHSDIVKTKVFKDFSELEPDKFQNKTNGITPRRWLLLCNPGLAELIAEKIGEDYVKDLSQLTKLHSFLGDDVFLRELAKVKQENKLKFSQFLETEYKVKINPSSMFDVQVKRIHEYKRQLLNCLHVITMYNRIKKDPKKLFVPRTVIIGGKAAPGYHMAKMIIKLITSVADVVNNDPMVGSKLKVIFLENYRVSLAEKVIPATDLSEQISTAGTEASGTGNMKFMLNGALTIGTMDGANVEMAEEAGEENLFIFGMRIDDVAALDKKGYEAKEYYEALPELKLVIDQIDNGFFSPKQPDLFKDIINMLFYHDRFKVFADYEAYVKCQDKVSQLYMNPKAWNTMVLKNIAASGKFSSDRTIKEYAQNIWNVEPSDLKISLSNESNKVNGN

SEQ ID NO: 256 - protein, 985 aa, Homo sapiens
MIRHAGAPARGDPTGPVPVVGKGEEEEEEDGMRLCLPANPKNCLPHRRGISILEKLIKTCPVWLQLSLGQAEVARILHRVVAGMFLVRRDSSSKQLVLCVHFPSLNESSAEVLEYTIKEEKSILYLEGSALVFEDIFRLIAFYCVSRDLLPFTLRLPQAILEASSFTDLETIANLGLGFWDSSLNPPQERGKPAEPPRDRAPGFPLVSSLRPTAHDANCACEIELSVGNDRLWFVNPIFIEDCSSALPTDQPPLGNCPARPLPPTSDATSPTSRWAPRRPPPPPPVLPLQPCSPAQPPVLPALAPAPACPLPTSPPVPAPHVTPHAPGPPDHPNQPPMMTCERLPCPTAGLGPLREEAMKPGAASSPLQQVPAPPLPAKKNLPTAPPRRRVSERVSLEDQSPGMAAEGDQLSLPPQGTSDGPEDTPRESTEQGQDTEVKASDPHSMPELPRTAKQPPVPPPRKKRISRQLASTLPAPLENAELCTQAMALETPTPGPPREGQSPASQAGTQHPPAQATAHSQSSPEFKGSLASLSDSLGVSVMATDQDSYSTSSTEEELEQFSSPSVKKKPSMILGKARHRLSFASFSSMFHAFLSNNRKLYKKVVELAQDKGSYFGSLVQDYKVYSLEMMARQTSSTEMLQEIRTMMTQLKSYLLQSTELKALVDPALHSEEELEAIVESALYKCVLKPLKEAINSCLHQIHSKDGSLQQLKENQLVILATTTTDLGVTTSVPEVPMMEKILQKFTSMHKAYSPEKKISILLKTCKLIYDSMALGNPGKPYGADDFLPVLMYVLARSNLTEMLLNVEYMMELMDPALQLGEGSYYLTTTYGALEHIKSYDKITVTRQLSVEVQDSIHRWERRRTLNKARASRSSVQDFICVSYLEPEQQARTLASRADTQAQALCAQCAEKFAVERPQAHRLFVLVDGRCFQLADDALPHCIKGYLLRSEPKRDFHFVYRPLDGGGGGGGGSPPCLVVREPNFL

SEQ ID NO: 257 - protein, 339 aa, Homo sapiens
MNWELLLWLLVLCALLLLLVQLLRFLRADGDLTLLWAEWQGRRPEWELTDMVVWVTGASSGIGEELAYQLSKLGVSLVLSARRVHELERVKRRCLENGNLKEKDILVLPLDLTDTGSHEAATKAVLQEFGRIDILVNNGGMSQRSLCMDTSLDVYRKLIELNYLGTVSLTKCVLPHMIERKQGKIVTVNSILGIISVPLSIGYCASKHALRGFFNGLRTELATYPGIIVSNICPGPVQSNIVENSLAGEVTKTIGNNGDQSHKMTTSRCVRLMLISMANDLKEVWISEQPFLLVTYLWQYMPTWAWWITNKMGKKRIENFKSGVDADSSYFKIFKTKHD

SEQ ID NO: 258 - protein, 781 aa, Homo sapiens
MSSSSPTGQIASAADIKQENGMESASEGQEAHREVAGGAAVGLSPPAPAPFPLEPGDAATAAARVSGEEGAVAAAAAGAAADQVQLHSELLGRHHHAAAAAAQTPLAFSPDHVACVCEALQQGGNLDRLARFLWSLPQSDLLRGNESLLKARALVAFHQGIYPELYSILESHSFESANHPLLQQLWYKARYTEAERARGRPLGAVDKYRLRRKFPLPRTIWDGEETVYCFKEKSRNALKELYKQNRYPSPAEKRHLAKITGLSLTQVSNWFKNRRQRDRNPSETQSKSESDGNPSTEDESSKGHEDLSPHPLSSSSDGITNLSLSSHMEPVYMQQIGNAKISLSSSGVLLNGSLVPASTSPVFLNGNSFIQGPSGVILNGLNVGNTQAVALNPPKMSSNIVSNGISMTDILGSTSQDVKEFKVLQSSANSATTTSYSPSVPVSFPGLIPSTEVKREGIQTVASQDGGSVVTFTTPVQINQYGIVQIPNSGANSQFLNGSIGFSPLQLPPVSVAASQGNISVSSSTSDGSTFTSESTTVQQGKVFLSSLAPSAVVYTVPNTGQTIGSVKQEGLERSLVFSQLMPVNQNAQVNANLSSENISGSGLHPLASSLVNVSPTHNFSLSPSTLLNPTELNRDIADSQPMSAPVASKSTVTSVSNTNYATLQNCSLITGQDLLSVPMTQAALGEIVPTAEDQVGHPSPAVHQDFVQEHRLVLQSVANMKENFLSNSESKATSSLMMLDSKSKYVLDGMVDTVCEDLETDKKELAKLQTVQLDEDMQDL

SEQ ID NO: 259 - protein, 353 aa, Homo sapiens
MASSWPPLELQSSNQSQLFPQNATACDNAPEAWDLLHRVLPTFIISICFFGLLGNLFVLLVFLLPRRQLNVAEIYLANLAASDLVFVLGLPFWAENIWNQFNWPFGALLCRVINGVIKANLFISIFLVVAISQDRYRVLVHPMASRRQQRRRQARVTCVLIWVVGGLLSIPTFLLRSIQAVPDLNITACILLLPHEAWHFARIVELNILGFLLPLAAIVFFNYHILASLRTREEVSRTRCGGRKDSKTTALILTLVVAFLVCWAPYHFFAFLEFLFQVQAVRGCFWEDFIDLGLQLANFFAFTNSSLNPVIYVFVGRLFRTKVWELYKQCTPKSLAPISSSHRKEIFQLFWRN

SEQ ID NO: 260 - protein, 808 aa, Homo sapiens
MRLLLLVPLLLAPAPGSSAPKVRRQSDTWGPWSQWSPCSRTCGGGVSFRERPCYSQRRDGGSSCVGPARSHRSCRTESCPDGARDFRAEQCAEFDGAEFQGRRYRWLPYYSAPNKCELNCIPKGENFYYKHREAVVDGTPCEPGKRDVCVDGSCRVVGCDHELDSSKQEDKCLRCGGDGTTCYPVAGTFDANDLSRGYNQILIVPMGATSILIDEAAASRNFLAVKNVRGEYYLNGHWTIEAARALPAASTILHYERGAEGDLAPERLHARGPTSEPLVIELISQEPNPGVHYEYHLPLRRPSPGFSWSHGSWSDCSAECGGGHQSRLVFCTIDHEAYPDHMCQRQPRPADRRSCNLHPCPETKRWKAGPWAPCSASCGGGSQSRSVYCISSDGAGIQEAVEEAECAGLPGKPPAIQACNLQRCAAWSPEPWGECSVSCGVGVRKRSVTCRGERGSLLHTAACSLEDRPPLTEPCVHEDCPLLSDQAWHVGTWGLCSKSCSSGTRRRQVICAIGPPSHCGSLQHSKPVDVEPCNTQPCHLPQEVPSMQDVHTPASNPWMPLGPQESPASDSRGQWWAAQEHPSARGDHRGERGDPRGDQGTHLSALGPAPSLQQPPYQQPLRSGSGPHDCRHSPHGCCPDGHTASLGPQWQGCPGAPCQQSRYGCCPDRVSVAEGPHHAGCTKSYGGDSTGGMPRSRAVASTVHNTHQPQAQQNEPSECRGSQFGCCYDNVATAAGPLGEGCVGQPSHGLAWQVWSPRWCRQPWGSWCGSPAQTTLPRNPRLPGRKMASPSPLTGVCDGPPTSSDRCV

SEQ ID NO: 261 - protein, 640 aa, Homo sapiens
MAALYRPGLRLNWHGLSPLGWPSCRSIQTLRVLSGDLGQLPTGIRDFVEHSARLCQPEGIHICDGTEAENTATLTLLEQQGLIRKLPKYNNCWLARTDPKDVARVESKTVIVTPSQRDTVPLPPGGARGQLGNWMSPADFQRAVDERFPGCMQGRTMYVLPFSMGPVGSPLSRIGVQLTDSAYVVASMRIMTRLGTPVLQALGDGDFVKCLHSVGQPLTGQGEPVSQWPCNPEKTLIGHVPDQREIISFGSGYGGNSLLGKKCFALRIASRLARDEGWLAEHMLILGITSPAGKKRYVAAAFPSACGKTNLAMMRPALPGWKVECVGDDIAWMRFDSEGRLRAINPENGFFGVAPGTSATTNPNAMATIQSNTIFTNVAETSDGGVYWEGIDQPLPPGVTVTSWLGKPWKPGDKEPCAHPNSRFCAPARQCPIMDPAWEAPEGVPIDAIIFGGRRPKGVPLVYEAFNWRHGVFVGSAMRSESTAAAEHKGKIIMHDPFAMRPFFGYNFGHYLEHWLSMEGRKGAQLPRIFHVNWFRRDEAGHFLWPGFGENARVLDWICRRLEGEDSARETPIGLVPKEGALDLSGLRAIDTTQLFSLPKDFWEQEVRDIRSYLTEQVNQDLPKEVLAELEALERRVHKM

SEQ ID NO: 262 - protein, 239 aa, Homo sapiens
MAKPCGVRLSGEARKQVEVFRQNLFQEAEEFLYRFLPQKIIYLNQLLQEDSLNVADLTSLRAPLDIPIPDPPPKDDEMETDKQEKKEVHKCGFLPGNEKVLSLLALVKPEVWTLKEKCILVITWIQHLIPKIEDGNDFGVAIQEKVLERVNAVKTKVEAFQTTISKYFSERGDAVAKASKETHVMDYRALVHERDEAAYGELRAMVLDLRAFYAELYHIISSNLEKIVNPKGEEKPSMY

SEQ ID NO: 263 - protein, 793 aa, Homo sapiens
MDSWFILVLLGSGLICVSANNATTVAPSVGITRLINSSTAEPVKEEAKTSNPTSSLTSLSVAPTFSPNITLGPTYLTTVNSSDSDNGTTRTASTNSIGITISPNGTWLPDNQFTDARTEPWEGNSSTAATTPETFPPSDETPIIAVMVALSSLLVIVFIIIVLYMLRFKKYKQAGSHSNSFRLSNGRTEDVEPQSVPLLARSPSTNRKYPPLPVDKLEEEINRRMADDNKLFREEFNALPACPIQATCEAASKEENKEKNRYVNILPYDHSRVHLTPVEGVPDSDYINASFINGYQEKNKFIAAQGPKEETVNDFWRMIWEQNTATIVMVTNLKERKECKCAQYWPDQGCWTYGNIRVSVEDVTVLVDYTVRKFCIQQVGDMTNRKPQRLITQFHFTSWPDFGVPFTPIGMLKFLKKVKACNPQYAGAIVVHCSAGVGRTGTFVVIDAMLDMMHTERKVDVYGFVSRIRAQRCQMVQTDMQYVFIYQALLEHYLYGDTELEVTSLETHLQKIYNKIPGTSNNGLEEEFKKLTSIKIQNDKMRTGNLPANMKKNRVLQIIPYEFNRVIIPVKRGEENTDYVNASFIDGYRQKDSYIASQGPLLHTIEDFWRMIWEWKSCSIVMLTELEERGQEKCAQYWPSDGLVSYGDITVELKKEEECESYTVRDLLVTNTRENKSRQIRQFHFHGWPEVGIPSDGKGMISIIAAVQKQQQQSGNHPITVHCSAGAGRTGTFCALSTVLERVKAEGILDVFQTVKSLRLQRPHMVQTLEQYEFCYKVVQEYIDAFSDYANFK

SEQ ID NO: 264 - protein, 370 aa, Homo sapiens
MAAERQEALREFVAVTGAEEDRARFFLESAGWDLQIALASFYEDGGDEDIVTISQATPSSVSRGTAPSDNRVTSFRDLIHDQDEDEEEEEGQRFYAGGSERSGQQIVGPPRKKSPNELVDDLFKGAKEHGAVAVERVTKSPGETSKPRPFAGGGYRLGAAPEEESAYVAGEKRQHSSQDVHVVLKLWKSGFSLDNGELRSYQDPSNAQFLESIRRGEVPAELRRLAHGGQVNLDMEDHRDEDFVKPKGAFKAFTGEGQKLGSTAPQVLSTSSPAQQAENEAKASSSILIDESEPTTNIQIRLADGGRLVQKFNHSHRISDIRLFIVDARPAMAATSFILMTTFPNKELADESQTLKEANLLNAVIVQRLT

SEQ ID NO: 265 - protein, 681 aa, Homo sapiens
MNASSEGESFAGSVQIPGGTTVLVELTPDIHICGICKQQFNNLDAFVAHKQSGCQLTGTSAAAPSTVQFVSEETVPATQTQTTTRTITSETQTITVSAPEFVFEHGYQTYLPTESNENQTATVISLPAKSRTKKPTTPPAQKRLNCCYPGCQFKTAYGMKDMERHLKIHTGDKPHKCEVCGKCFSRKDKLKTHMRCHTGVKPYKCKTCDYAAADSSSLNKHLRIHSDERPFKCQICPYASRNSSQLTVHLRSHTGDAPFQCWLCSAKFKISSDLKRHMRVHSGEKPFKCEFCNVRCTMKGNLKSHIRIKHSGNNFKCPHCDFLGDSKATLRKHSRVHQSEHPEKCSECSYSCSSKAALRIHERIHCTDRPFKCNYCSFDTKQPSNLSKHMKKFHGDMVKTEALERKDTGRQSSRQVAKLDAKKSFHCDICDASFMREDSLRSHKRQHSEYSESKNSDVTVLQFQIDPSKQPATPLTVGHLQVPLQPSQVPQFSEGRVKIIVGHQVPQANTIVQAAAAAVNIVPPALVAQNPEELPGNSRLQILRQVSLIAPPQSSRCPSEAGAMTQPAVLLTTHEQTDGATLHQTLIPTASGGPQEGSGNQTFITSSGITCTDFEGLNALIQEGTAEVTVVSDGGQNIAVATTAPPVFSSSSQQELPKQTYSIIQGAAHPALLCPADSIPD

SEQ ID NO: 266 - protein, 276 aa, Homo sapiens
MPVPASWPHPPGPFLLLTLLLGLTEVAGEEELQMIQPEKLLLVTVGKTATLHCTVTSLLPVGPVLWFRGVGPGRELIYNQKEGHFPRVTTVSDLTKRNNMDFSIRISSITPADVGTYYCVKFRKGSPENVEFKSGPGTEMALGAKPSAPVVLGPAARTTPEHTVSFTCESHGFSPRDITLKWFKNGNELSDFQTNVDPTGQSVAYSIRSTARVVLDPWDVRSQVICEVAHVTLQGDPLRGTANLSEAIRGPASSLTALLLIAVLLGPIYVPWKQKT

SEQ ID NO: 267 - protein, 238 aa, Homo sapiens
MLTTLLPILLLSGWAFCSQDASDGLQRLHMLQISYFRDPYHVWYQGNASLGGHLTHVLEGPDTNTTIIQLQPLQEPESWARTQSGLQSYLLQFHGLVRLVHQERTLAFPLTIRCFLGCELPPEGSRAHVFFEVAVNGSSFVSFRPERALWQADTQVTSGVVTFTLQQLNAYNRTRYELREFLEDTCVQYVQKHISAENTKGSQTSRSYTSLVLGVLVGSFIIAGVAVGIFLCTGGRRC

SEQ ID NO: 268 - protein, 700 aa, Homo sapiens
MSRRTRCEDLDELHYQDTDSDVPEQRDSKCKVKWTHEEDEQLRALVRQFGQQDWKFLASHFPNRTDQQCQYRWLRVLNPDLVKGPWTKEEDQKVIELVKKYGTKQWTLIAKHLKGRLGKQCRERWHNHLNPEVKKSCWTEEEDRIICEAHKVLGNRWAEIAKMLPGRTDNAVKNHWNSTIKRKVDTGGFLSESKDCKPPVYLLLELEDKDGLQSAQPTEGQGSLLTNWPSVPPTIKEEENSEEELAAATTSKEQEPIGTDLDAVRTPEPLEEFPKREDQEGSPPETSLPYKWVVEAANLLIPAVGSSLSEALDLIESDPDAWCDLSKFDLPEEPSAEDSINNSLVQLQASHQQQVLPPRQPSALVPSVTEYRLDGHTISDLSRSSRGELIPISPSTEVGGSGIGTPPSVLKRQRKRRVALSPVTENSTSLSFLDSCNSLTPKSTPVKTLPFSPSQFLNFWNKQDTLELESPSLTSTPVCSQKVVVTTPLHRDKTPLHQKHAAFVTPDQKYSMDNTPHTPTPFKNALEKYGPLKPLPQTPHLEEDLKEVLRSEAGIELIIEDDIRPEKQKRKPGLRRSPIKKVRKSLALDIVDEDVKLMMSTLPKSLSLPTTAPSNSSSLTLSGIKEDNSLLNQGFLQAKPEKAAVAQKPRSHFTTPAPMSSAWKTVACGGTRDQLFMQEKARQLLGRLKPSHTSRTLILS

SEQ ID NO: 269 - protein, 1053 aa, Homo sapiens
MSRRKQAKPQHINSEEDQGEQQPQQQTPEFADAAPAAPAAGELGAPVNHPGNDEVASEDEATVKRLRREETHVCEKCCAEFFSISEFLEHKKNCTKNPPVLIMNDSEGPVPSEDFSGAVLSHQPTSPGSKDCHRENGGSSEDMKEKPDAESVVYLKTETALPPTPQDISYLAKGKVANTNVTLQALRGTKVAVNQRSADALPAPVPGANSIPWVLEQILCLQQQQLQQIQLTEQIRIQVNMWASHALHSSGAGADTLKTLGSHMSQQVSAAVALLSQKAGSQGLSLDALKQAKLPHANIPSATSSLSPGLAPFTLKPDGTRVLPNVMSRLPSALLPQAPGSVLFQSPFSTVALDTSKKGKGKPPNISAVDVKPKDEAALYKHKCKYCSKVFGTDSSLQIHLRSHTGERPFVCSVCGHRFTTKGNLKVHFHRHPQVKANPQLFAEFQDKVAAGNGIPYALSVPDPIDEPSLSLDSKPVLVTTSVGLPQNLSSGTNPKDLTGGSLPGDLQPGPSPESEGGPTLPGVGPNYNSPRAGGFQGSGTPEPGSETLKLQQLVENIDKATTDPNECLICHRVLSCQSSLKMHYRTHTGERPFQCKICGRAFSTKGNLKTHLGVHRTNTSIKTQHSCPICQKKFTNAVMLQQHIRMHMGGQIPNTPLPENPCDFTGSEPMTVGENGSTGAICHDDVIESIDVEEVSSQEAPSSSSKVPTPLPSIHSASPTLGFAMMASLDAPGKVGPAPFNLQRQGSRENGSVESDGLTNDSSSLMGDQEYQSRSPDILETTSFQALSPANSQAESIKSKSPDAGSKAESSENSRTEMEGRSSLPSTFIRAPPTYVKVEVPGTFVGPSTLSPGMTPLLAAQPRRQAKQHGCTRCGKNFSSASALQIHERTHTGEKPFVCNICGRAFTTKGNLKVHYMTHGANNNSARRGRKLAIENTMALLGTDGKRVSEIFPKEILAPSVNVDPVVWNQYTSMLNGGLAVKTNEISVIQSGGVPTLPVSLGATSVVNNATVSKMDGSQSGISADVEKPSATDGVPKHQFPHFLEENKIAVS

SEQ ID NO: 270 - protein, 463 aa, Homo sapiens
MGKEKTHINIVVIGHVDSGKSTTTGHLIYKCGGIDKRTIEKFEKEAAEMGKGSFKYAWVLDKLKAERERGITIDISLWKFETTKYYITIIDAPGHRDFIKNMITGTSQADCAVLIVAAGVGEFEAGISKNGQTREHALLAYTLGVKQLIVGVNKMDSTEPAYSEKRYDEIVKEVSAYIKKIGYNPATVPFVPISGWHGDNMLEPSPNMPWFKGWKVERKEGNASGVSLLEALDTILPPTRPTDKPLRLPLQDVYKIGGIGTVPVGRVETGILRPGMVVTFAPVNITTEVKSVEMHHEALSEALPGDNVGFNVKNVSVKDIRRGNVCGDSKSDPPQEAAQFTSQVIILNHPGQISAGYSPVIDCHTAHIACKFAELKEKIDRRSGKKLEDNPKSLKSGDAAIVEMVPGKPMCVESFSQYPPLGRFAVRDMRQTVAVGVIKNVEKKSGGAGKVTKSAQKAQKAGK

SEQ ID NO: 271 - protein, 384 aa, Homo sapiens
MAAQNGNTSFTPNFNPPQDHASSLSFNFSYGDYDLPMDEDEDMTKTRTFFAAKIVIGIALAGIMLVCGIGNFVFIAALTRYKKLRNLTNLLIANLAISDFLVAIICCPFEMDYYVVRQLSWEHGHVLCASVNYLRTVSLYVSTNALLAIAIDRYLAIVHPLKPRMNYQTASFLIALVWMVSILIAIPSAYFATETVLFIVKSQEKIFCGQIWPVDQQLYYKSYFLFIFGVEFVGPVVTMTLCYARISRELWFKAVPGFQTEQIRKRLRCRRKTVLVLMCILTAYVLCWAPFYGFTIVRDFFPTVFVKEKHYLTAFYVVECIAMSNSMINTVCFVTVKNNTMKYFKKMMLLHWRPSQRGSKSSADLDLRTNGVPTTEEVDCIRLK

SEQ ID NO: 272 - protein, 677 aa, Homo sapiens
MLSSTDFTFASWELVVRVDHPNEEQQKDVTLRVSGDLHVGGVMLKLVEQINISQDWSDFALWWEQKHCWLLKTHWTLDKYGVQADAKLLFTPQHKMLRLRLPNLKMVRLRVSFSAVVFKAVSDICKILNIRRSEELSLLKPSGDYFKKKKKKDKNNKEPIIEDILNLESSPTASGSSVSPGLYSKTMTPIYDPINGTPASSTMTWFSDSPLTEQNCSILAFSQPPQSPEALADMYQPRSLVDKAKLNAGWLDSSRSLMEQGIQEDEQLLLRFKYYSFFDLNPKYDAVRINQLYEQARWAILLEEIDCTEEEMLIFAALQYHISKLSLSAETQDFAGESEVDEIEAALSNLEVTLEGGKADSLLEDITDIPKLADNLKLFRPKKLLPKAFKQYWFIFKDTSIAYFKNKELEQGEPLEKLNLRGCEVVPDVNVAGRKFGIKLLIPVADGMNEMYLRCDHENQYAQWMAACMLASKGKTMADSSYQPEVLNILSFLRMKNRNSASQVASSLENMDMNPECFVSPRCAKRHKSKQLAARILEAHQNVAQMPLVEAKLRFIQAWQSLPEFGLTYYLVRFKGSKKDDILGVSYNRLIKIDAATGIPVTTWRFTNIKQWNVNWETRQVVIEFDQNVFTAFTCLSADCKIVHEYIGGYIFLSTRSKDQNETLDEDLFHKLTGGQD

SEQ ID NO: 273 - protein, 254 aa, Homo sapiens [sequence omitted]

SEQ ID NO: 274 - protein, 481 aa, Homo sapiens
MGALARALPSILLALLLTSTPEALGANPGLVARITDKGLQYAAQEGLLALQSELLRITLPDFTGDLRIPHVGRGRYEFHSLNIHSCELLHSALRPVPGQGLSLSISDSSIRVQGRWKVRKSFFKLQGSFDVSVKGISISVNLLLGSESSGRPTVTASSCSSDIADVEVDMSGDLGWLLNLFHNQIESKFQKVLESRICEMIQKSVSSDLQPYLQTLPVTTEIDSFADIDYSLVEAPRATAQMLEVMFKGEIFHRNHRSPVTLLAAVMSLPEEHNKMVYFAISDYVFNTASLVYHEEGYLNFSITDDMIPPDSNIRLTTKSFRPFVPRLARLYPNMNLELQGSVPSAPLLNFSPGNLSVDPYMEIDAFVLLPSSSKEPVFRLSVATNVSATLTFNTSKITGFLKPGKVKVELKESKVGLFNAELLEALLNYYILNTFYPKFNDKLAEGFPLPLLKRVQLYDLGLQIHKDFLFLGANVQYMRV

SEQ ID NO: 275 - protein, 525 aa, Homo sapiens
MATLLRSKLSNVATSVSNKSQAKMSGMFARMGFQAATDEEAVGFAHCDDLDFEHRQGLQMDILKAEGEPCGDEGAEAPVEGDIHYQRGSGAPLPPSGSKDQVGGGGEFGGHDKPKITAWEAGWNVTNAIQGMFVLGLPYAILHGGYLGLFLIIFAAVVCCYTGKILIACLYEENEDGEVVRVRDSYVAIANACCAPRFPTLGGRVVNVAQIIELVMTCILYVVVSGNLMYNSFPGLPVSQKSWSIIATAVLLPCAFLKNLKAVSKFSLLCTLAHFVINILVIAYCLSRARDWAWEKVKFYIDVKKFPISIGIIVFSYTSQIFLPSLEGNMQQPSEFHCMMNWTHIAACVLKGLFALVAYLTWADETKEVITDNLPGSIRAVVNIFLVAKALLSYPLPFFAAVEVLEKSLFQEGSRAFFPACYSGDGRLKSWGLTLRCALVVFTLLMAIYVPHFALLMGLTGSLTGAGLCFLLPSLFHLRLLWRKLLWHQVFFDVAIFVIGGICSVSGFVHSLEGLIEAYRTNAED

SEQ ID NO: 276 - protein, 432 aa, Homo sapiens
MSDKLPYKVADIGLAAWGRKALDIAENEMPGLMRMRERYSASKPLKGARIAGCLHMTVETAVLIETLVTLGAEVQWSSCNIFSTQDHAAAAIAKAGIPVYAWKGETDEEYLWCIEQTLYFKDGPLNMILDDGGDLTNLIHTKYPQLLPGIRGISEETTTGVHNLYKMMANGILKVPAINVNDSVTKSKFDNLYGCRESLIDGIKRATDVMIAGKVAVVAGYGDVGKGCAQALRGFGARVIITEIDPINALQAAMEGYEVTTMDEACQEGNIFVTTTGCIDIILGRHFEQMKDDAIVCNIGHFDVEIDVKWLNENAVEKVNIKPQVDRYRLKNGRRIILLAEGRLVNLGCAMGHPSFVMSNSFTNQVMAQIELWTHPDKYPVGVHFLPKKLDEAVAEAHLGKLNVKLTKLTEKQAQYLGMSCDGPFKPDHYRY

SEQ ID NO: 277 - protein, 678 aa, Homo sapiens
VHDQVLPTPNASSRVIVHVDLDCFYAQVEMISNPELKDKPLGVQQKYLVVTCNYEARKLGVKKLMNVRDAKEKCPQLVLVNGEDLTRYREMSYKVTEMVEKRLQQLQSDELSAVTVSGHVYNNQSINLLDVLHIRLLVGSQIAAEMREAMYNQLGLTGCAGVASNKLLAKLVSGVFKPNQQTVLLPESCQHLIHSLNHIKEIPGIGYKTAKCLEALGINSVRDLQTFSPKILEKELGISVAQRIQKLSFGEDNSPVILSGPPQSFSEEDSFKKCSSEVEAKNKIEELLASLLNRVCQDGRKPHTVRLIIRRYSSEKHYGRESRQCPIPSHVIQKLGTGNYDVMTPMVDILMKLFRNMVNVKMPFHLTLLSVCFCNLKALNTAKKGLIDYYLMPSLSTTSRSGKHSFKMKDTHMEDFPKDKETNRDFLPSGRIESTRTRESPLDTTNFSKEKDINEFPLCSLPEGVDQEVFKQLPVDIQEEILSGKSREKFQGKGSVSCPLHASRGVLSFFSKKQMQDIPINPRDHLSSSKQVSSVSPCEPGTSGFNSSSSSYMSSQKDYSYYLDNRLKDERISQGPKEPQGFHFTNSNPAVSAFHSFPNLQSEQLFSRNHTTDSHKQTVATDSHEGLTENREPDSVDEKITFPSDIDPQVFYELPEAVQKELLAEWKRAGSDFHIGHK

SEQ ID NO: 278 - protein, 2828 aa, Homo sapiens
MPKRAHWGALSVVLILLWGHPRVALACPHPCACYVPSEVHCTFRSLASVPAGIAKHVERINLGFNSIQALSETSFAGLTKLELLMIHGNEIPSIPDGALRDLSSLQVFKFSYNKLRVITGQTLQGLSNLMRLHIDHNKIEFIHPQAFNGLTSLRLLHLEGNLLHQLHPSTFSTFTFLDYFRLSTIRHLYLAENMVRTLPASMLRNMPLLENLYLQGNPWTCDCEMRWFLEWDAKSRGILKCKKDKAYEGGQLCAMCFSPKKLYKHEIHKLKDMTCLKPSIESPLRQNRSRSIEEEQEQEEDGGSQLILEKFQLPQWSISLNMTDEHGNMVNLVCDIKKPMDVYKIHLNQTDPPDIDINATVALDFECPMTRENYEKLWKLIAYYSEVPVKLHRELMLSKDPRVSYQYRQDADEEALYYTGVRAQILAEPEWVMQPSIDIQLNRRQSTAKKVLLSYYTQYSQTISTKDTRQARGRSWVMIEPSGAVQRDQTVLEGGPCQLSCNVKASESPSIFWVLPDGSILKAPMDDPDSKFSILSSGWLRIKSMEPSDSGLYQCIAQVRDEMDRMVYRVLVQSPSTQPAEKDTVTIGKNPGESVTLPCNALAIPEAHLSWILPNRRIINDLANTSHVYMLPNGTLSIPKVQVSDSGYYRCVAVNQQGADHFTVGITVTKKGSGLPSKRGRRPGAKALSRVREDIVEDEGGSGMGDEENTSRRLLHPKDQEVFLKTKDDAINGDKKAKKGRRKLKLWKHSEKEPETNVAEGRRVFESRRRINMANKQINPERWADILAKVRGKNLPKGTEVPPLIKTTSPPSLSLEVTPPFPAISPPSASPVQTVTSAEESSADVPLLGEEEHVLGTISSASMGLEHNHNGVILVEPEVTSTPLEEVVDDLSEKTEEITSTEGDLKGTAAPTLISEPYEPSPTLHTLDTVYEKPTHEETATEGWSAADVGSSPEPTSSEYEPPLDAVSLAESEPMQYFDPDLETKSQPDEDKMKEDTFAHLTPTPTIWVNDSSTSQLFEDSTIGEPGVPGQSHLQGLTDNIHLVKSSLSTQDTLLIKKGMKEMSQTLQGGNMLEGDPTHSRSSESEGQESKSITLPDSTLGIMSSMSPVKKPAETTVGTLLDKDTTTATTTPRQKVAPSSTMSTHPSRRRPNGRRRLRPNKFRHRHKQTPPTTFAPSETFSTQPTQAPDIKISSQVESSLVPTAWVDNTVNTPKQLEMEKNAEPTSKGTPRRKHGKRPNKHRYTPSTVSSRASGSKPSPSPENKHRNIVTPSSETILLPRTVSLKTEGPYDSLDYMTTTRKIYSSYPKVQETLPVTYKPTSDGKEIKDDVATNVDKHKSDILVTGESITNAIPTSRSLVSTMGEFKEESSPVGFPGTPTWNPSRTAQPGRLQTGIPVTTSGENLTDPPLLKELEDVDFTSEFLSSLTVSTPFHQEEAGSSTTLSSIKVEVASSQAETTTLDQDHLETTVAILLSETRPQNHTPTAARMKEPASSSPSTILMSLGQTTTTKPALPSPRISQASRDSKENVFLNYVGNPETEATPVNNEGTQHMSGPNELSTPSSDQDAFNLSTKLELEKQVFGSRSLPRGPDSQRQDGRVHASHQLTRVPAKPILPTATVRLPEMSTQSASRYFVTSQSPRHWTNKPEITTYPSGALPENKQFTTPRLSSTTIPLPLHMSKPSIPSKFTDRRTDQFNGYSKVFGNNNIPEARNPVGKPPSPRIPHYSNGRLPFFTNKTLSFPQLGVTRRPQIPTSPAPVMRERKVIPGSYNRIHSHSTFHLDFGPPAPPLLHTPQTTGSPSTNLQNIPMVSSTQSSISFITSSVQSSGSFHQSSSKFFAGGPPASKFWSLGEKPQILTKSPQTVSVTAETDTVFPCEATGKPKPFVTWTKVSTGALMTPNTRIQRFEVLKNGTLVIRKVQVQDRGQYMCTASNLHGLDRMVVLLSVTVQQPQILASHYQDVTVYLGDTIAMECLAKGTPAPQISWIFPDRRVWQTVSPVEGRITLHENRTLSIKEASFSDRGVYKCVASNAAGADSLAIRLHVAALPPVIHQEKLENISLPPGLSIHIHCTAKAAPLPSVRWVLGDGTQIRPSQFLHGNLFVFPNGTLYIRNLAPKDSGRYECVAANLVGSARRTVQLNVQRAAANARITGTSPRRTDVRYGGTLKLDCSASGDPWPRILWRLPSKRMIDALFSFDSRIKVFANGTLVVKSVTDKDAGDYLCVARNKVGDDYVVLKVDVVMKPAKIEHKEENDHKVFYGGDLKVDCVATGLPNPEISWSLPDGSLVNSFMQSDDSGGRTKRYVVFNNGTLYFNEVGMREEGDYTCFAENQVGKDEMRVRVKVVTAPATIRNKTYLAVQVPYGDVVTVACEAKGEPMPKVTWLSPTNKVIPTSSEKYQIYQDGTLLIQKAQRSDSGNYTCLVRNSAGEDRKTVWIHVNVQPPKINGNPNPITTVREIAAGGSRKLIDCKAEGIPTPRVLWAFPEGVVLPAPYYGNRITVHGNGSLDIRSLRKSDSVQLVCMARNEGGEARLILQLTVLEPMEKPIFHDPISEKITAMAGHTISLNCSAAGTPTPSLVWVLPNGTDLQSGQQLQRFYHKADGMLHISGLSSVDAGAYRCVARNAAGHTERLVSLKVGLKPEANKQYHNLVSIINGETLKLPCTPPGAGQGRFSWTLPNGMHLEGPQTLGRVSLLDNGTLTVREASVFDRGTYVCRMETEYGPSVTSIPVIVIAYPPRITSEPTPVIYTRPGNTVKLNCMAMGIPKADITWELPDKSHLKAGVQARLYGNRFLHPQGSLTIQHATQRDAGFYKCMAKNILGSDSKTTYIHVF

SEQ ID NO: 279 - protein, 387 aa, Homo sapiens
MVFAFWKVFLILSCLAGQVSVVQVTIPDGFVNVTVGSNVTLICIYTTTVASREQLSIQWSFFHKKEMEPISIYFSQGGQAVAIGQFKDRITGSNDPGNASITISHMQPADSGIYICDVNNPPDFLGQNQGILNVSVLVKPSKPLCSVQGRPETGHTISLSCLSALGTPSPVYYWHKLEGRDIVPVKENFNPTTGILVIGNLTNFEQGYYQCTAINRLGNSSCEIDLTSSHPEVGIIVGALIGSLVGAAIIISVVCFARNKAKAKAKERNSKTIAELEPMTKINPRGESEAMPREDATQLEVTLPSSIHETGPDTIQEPDYEPKPTQEPAPEPAPGSEPMAVPDLDIELELEPETQSELEPEPEPEPESEPGVVVEPLSEDEKGVVKA

SEQ ID NO: 280 - protein, 578 aa, Homo sapiens
MKIPFLLLFFLWEAESHAASRPNIILVMADDLGIGDPGCYGNKTIRTPNIDRLASGGVKLTQHLAASPLCTPSRAAFMTGRYPVRSGMASWSRTGVFLFTASSGGLPTDEITFAKLLKDQGYSTALIGKWHLGMSCHSKTDFCHHPLHHGFNYFYGISLTNLRDCKPGEGSVFTTGFKRLVFLPLQIVGVTLLTLAALNCLGLLHVPLGVFFSLLFLAALILTLFLGFLHYFRPLNCFMMRNYEIIQQPMSYDNLTQRLTVEAAQFIQRNTETPFLLVLSYLHVHTALFSSKDFAGKSQHGVYGDAVEEMDWSVGQILNLLDELRLANDTLIYFTSDQGAHVEEVSSKGEIHGGSNGIYKGGKANNWEGGIRVPGILRWPRVIQAGQKIDEPTSNMDIFPTVAKLAGAPLPEDRIIDGRDLMPLLEGKSQRSDHEFLFHYCNAYLNAVRWHPQNSTSIWKAFFFTPNFNPVGSNGCFATHVCFCFGSYVTHHDPPLLFDISKDPRERNPLTPASEPRFYEILKVMQEAADRHTQTLPEVPDQFSWNNFLWKPWLQLCCPSTGLSCQCDREKQDKRLSR

SEQ ID NO: 281 - protein, 195 aa, Homo sapiens
MAAEDVVATGADPSDLESGGLLHEIFTSPLNLLLLGLCIFLLYKIVRGDQPAASGDSDDDEPPPLPRLKRRDFTPAELRRFDGVQDPRILMAINGKVFDVTKGRKFYGPEGPYGVFAGRDASRGLATFCLDKEALKDEYDDLSDLTAAQQETLSDWESQFTFKYHHVGKLLKEGEEPTVYSDEEEPKDESARKND

SEQ ID NO: 282 - protein, 1108 aa, Homo sapiens
MFLGLGRFSRLVLWFAAFRKLLGHHGLASAKFLWCLCLLSVMSLPQQVWTLPYKIGVVGPWACDSLFSKALPEVAARLAIERINRDPSFDLSYSFEYVILNEDCQTSRALSSFISHHQMASGFIGPTNPGYCEAASLLGNSWDKGIFSWACVNYELDNKISYPTFSRTLPSPIRVLVTVMKYFQWAHAGVISSDEDIWVHTANRVASALRSHGLPVGVVLTTGQDSQSMRKALQRIHQADRIRIIIMCMHSALIGGETQMHLLECAHDLKMTDGTYVFVPYDALLYSLPYKHTPYRVLRNNPKLREAYDAVLTITVESQEKTFYQAFTEAAARGEIPEKLEFDQVSPLFGTIYNSIYFIAQAMNNAMKENGQAGAASLVQHSRNMQFHGFNQLMRTDSNGNGISEYVILDTNLKEWELHSTYTVDMEMELLRFGGTPIHFPGGRPPRADAKCWFAEGKICHGGIDPAFAMMVCLTLLIALLSINGFAYFIRRRINKIQLIKGPNRILLTLEDVTFINPHFGSKRGSRASVSFQITSEVQSGRSPRLSFSSGSLTPATYENSNIAIYEGDWVWLKKFSLGDFGDLKSIKSRASDVFEMMKDLRHENINPLLGFFYDSGMFAIVTEFCSRGSLEDILTNQDVKLDWMFKSSLLLDLIKGMKYLHHREFVHGRLKSRNCVVDGRFVLKVTDYGFNDILEMLRLSEEESSMEELLWTAPELLRAPRGSRLGSFAGDVYSFAIIMQEVMVRGTPFCMMDLPAQEIINRLKKPPPVYRPVVPPEHAPPECLQLMKQCWAEAAEQRPTFDEIFNQFKTFNKGKKTNIIDSMLRMLEQYSSNLEDLIRERTEELEIEKQKTEKLLTQMLPPSVAESLKKGCTVEPEGFDLVTLYFSDIVGFTTISAMSEPIEVVDLLNDLYTLFDAIIGSHDVYKVETIGDAYMVASGLPKRNGSRHAAEIANMSLDILSSVGTFKMRHMPEVPVRIRIGLHSGPVVAGVVGLTMPRYCLFGDTVNTASRMESTGLPYRIHVSLSTVTILQNLSEGYEVELRGRTELKGKGTEETFWLIGKKGFMKPLPVPPPVDKDGQVGHGLQPVEIAAFQRRKAERQLVRNKP

SEQ ID NO: 283 - protein, 357 aa, Homo sapiens
MRRQLRSRRAPSFPYSYRYRLDDPDEANQNYLADEEEEAEEEARVTVVPKSEEEEEEEEKEEEEEEEKEEEEGQGQPTGNAWWQKLQIMSEYLWDPERRMFLARTGQSWSLILLIYFFFYASLAAVITLCMYTLFLTISPYIPTFTERVKPPGVMIRPFAHSLNFNFNVSEPDTWQHYVISLNGFLQGYNDSLQEEMNVDCPPGQYFIQDGNEDEDKKACQFKRSFLKNCSGLEDPTFGYSTGQPCILLKMNRIVGFRPELGDPVKVSCKVQRGDENDIRSISYYPESASFDLRYYPYYGKLTHVNYTSPLVAMHFTDVVKNQAVPVQCQLKGKGVINDVINDRFVGRVIFTLNIET

SEQ ID NO: 284 - protein, 485 aa, Homo sapiens
MAAVWQQVLAVDARYNAYRTPTFPQFRTQYIRRRSQLLRENAKAGHPPALRRQYLRLRGQLLGQRYGPLSEPGSARAYSNSIVRSSRTTLDRMEDFEDDPRALGARGHRRSVSRGSYQLQAQMNRAVYEDRPPGSVVPTSAAEASRAMAGDTSLSENYAFAGMYHVFDQHVDEAVPRVRFANDDRHRLACCSLDGSISLCQLVPAPPTVLRVLRGHTRGVSDFAWSLSNDILVSTSLDATMRIWASEDGRCIREIPDPDSAELLCCTFQPVNNNLTVVGNAKHNVHVMNISTGKKVKGGSSKLTGRVLALSFDAPGRLLWAGDDRGSVFSFLFDMATGKLTKAKRLVVHEGSPVTSISARSWVSREARDPSLLINACLNKLLLYRVVDNEGTLQLKRSFPIEQSSHPVRSIFCPLMSFRQGACVVTGSEDMCVHFFDVERAAKAAVNKLQGHSAPVLDVSFNCDESLLASSDASGMVIVWRREQK

SEQ ID NO: 285 - protein, 1268 aa, Homo sapiens
MIAAPEIPTDFNLLQESETHFSSDTDFEDIEGKNQKQGKGKTCKKGKKGPAEKGKGGNGGGKPPSGPNRMNGHHQQNGVENMMLFEVVKMGKSAMQSVVDDWIESYKHDRDIALLDLINFFIQCSGCKGVVTAEMFRHMQNSEIIRKMTEEFDEDSGDYPLTMAGPQWKKFKSSFCEFIGVLVRQCQYSIIYDEYMMDTVISLLTGLSDSQVRAFRHTSTLAAMKLMTALVNVALNLSINMDNTQRQYEAERNKMIGKRANERLELLLQKRKELQENQDEIENMMNAIFKGVFVHRYRDAIAEIRAICIEEIGIWMKMYSDAFLNDSYLKYVGWTMHDKQGEVRLKCLTALQGLYYNKELNSKLELFTSRFKDRIVSMTLDKEYDVAVQAIKLLTLVLQSSEEVLTAEDCENVYHLVYSAHRPVAVAAGEFLYKKLFSRRDPEEDGMMKRRGRQGPNANLVKTLVFFFLESELHEHAAYLVDSMWDCATELLKDWECMNSLLLEEPLSGEEALTDRQESALIEIMLCTIRQAAECHPPVGRGTGKRVLTAKEKKTQLDDRTKITELFAVALPQLLAKYSVDAEKVTNLLQLPQYFDLEIYTTGRLEKHLDALLRQIRNIVEKHTDTDVLEACSKTYHALCNEEFTIFNRVDISRSQLIDELADKFNRLLEDFLQEGEEPDEDDAYQVLSTLKRITAFHNAHDLSKWDLFACNYKLLKTGIENGDMPEQIVIHALQCTHYVILWQLAKITESSSTKEDLLRLKKQMRVFCQICQHYLTNVNTTVKEQAFTILCDILMIFSHQIMSGGRDMLEPLVYTPDSSLQSELLSFILDHVFIEQDDDNNSADGQQEDEASKIEALHKRRNLLAAFCKLIVYTVVEMNTAADIFKQYMKYYNDYGDIIKETMSKTRQIDKIQCAKTLILSLQQLFNEMIQENGYNFDRSSSTFSGIKELARRFALTFGLDQLKTREAIAMLHKDGIEFAFKEPNPQGESHPPLNLAFLDILSEFSSKLLRQDKRTVYVYLEKFMTFQMSLRREDVWLPLMSYRNSLLAGGDDDTMSVISGISSRGSTVRSKKSKPSTGKRKVVEGMQLSLTEESSSSDSMWLSREQTLHTPVMMQTPQLTSTIMREPKRLRPEDSFMSVYPMQTEHHQTPLDYNTQVTWMLAQRQQEEARQQQERAAMSYVKLRTNLQHAIRRGTSLMEDDEEPIVEDVMMSSEGRIEDLNEGMDFDTMDIDLPPSKNRRERTELKPDFFDPASIMDESVLGVSMF

SEQ ID NO: 286 - protein, 461 aa, Homo sapiens
MQRVNMIMAESPGLITICLLGYLLSAECTVFLDHENANKILNRPKRYNSGKLEEFVQGNLERECMEEKCSFEEAREVFENTERTTEFWKQYVDGDQCESNPCLNGGSCKDDINSYECWCPFGFEGKNCELDVTCNIKNGRCEQFCKNSADNKVVCSCTEGYRLAENQKSCEPAVPFPCGRVSVSQTSKLTRAETVFPDVDYVNSTEAETILDNITQSTQSFNDFTRVVGGEDAKPGQFPWQVVLNGKVDAFCGGSIVNEKWIVTAAHCVETGVKITVVAGEHNIEETEHTEQKRNVIRIIPHHNYNAAINKYNHDIALLELDEPLVLNSYVTPICIADKEYTNIFLKFGSGYVSGWGRVFHKGRSALVLQYLRVPLVDRATCLRSTKFTIYNNMFCAGFHEGGRDSCQGDSGGPHVTEVEGTSFLTGIISWGEECAMKGKYGIYTKVSRYVNWIKEKTKLT

SEQ ID NO: 287 - protein, 745 aa, Homo sapiens [sequence omitted]

SEQ ID NO: 288 - protein, 1711 aa, Homo sapiens
MISTAPLYSGVHNWTSSDRIRMCGINEERRAPLSDEESTTGDCQHFGSQEFCVSSSFSKVELTAVGSGSNARGADPDGSATEKLGHKSEDKPDDPQPKMDYAGNVAEAEGLLVPLSSPGDGLKLPASDSAEASNSRADCSWTPLNTQMSKQVDCSPAGVKALDSRQGVGEKNTFILATLGTGVPVEGTLPLVTTNFSPLPAPICPPAPGSASVPHSVPDAFQVPLSVPAPVPHSGLVPVQVATSVPAPSPPLAPVPALAPAPPSVPTLISDSNPLSVSASVLVPVPASAPPSGPVPLSAPAPAPLSVPVSAPPLALIQAPVPPSAPTLVLAPVPTPVLAPMPASTPPAAPAPPSVPMPTPTPSSGPPSTPTLIPAFAPTPVPAPTPAPIFTPAPTPMPAATPAAIPTSAPIPASFSLSRVCFPAAQAPAMQKVPLSFQPGTVLTPSQPLVYIPPPSCGQPLSVATLPTTLGVSSTLTLPVLPSYLQDRCLPGVLASPELRSYPYAFSVARPLTSDSKLVSLEVNRLPCTSPSGSTTTQPAPDGVPGPLADTSLVTASAKVLPTPQPLLPAPSGSSAPPHPAKMPSGTEQQTEGTSVTFSPLKSPPQLEREMASPPECSEMPLDLSSKSNRQKLPLPNQRKTPPMPVLTPVHTSSKALLSTVLSRSQRTTQAAGGNVTSCLGSTSSPFVIFPEIVRNGDPSTWVKNSTALISTIPGTYVGVANPVPASLLLNKDPNLGLNRDPRHLPKQEPISIIDQGEPKGTGATCGKKGSQAGAEGQPSTVKRYTPARIAPGLPGCQTKELSLWKPTGPANIYPRCSVNGKPTSTQVLPVGWSPYHQASLLSIGISSAGQLTPSQGAPIRPTSVVSEFSGVPSLSSSEAVHGLPEGQPRPGGSFVPEQDPVTKNKTCRIAAKPYEEQVNPVLLTLSPQTGTLALSVQPSGGDIRMNQGPEESESHLCSDSTPKMEGPQGACGLKLAGDTKPKNQVLATYMSHELVLATPQNLPKMPELPLLPHDSHPKELILDVVPSSRRGSSTERPQLGSQVDLGRVKMEKVDGDVVFNLATCFRADGLPVAPQRGQAEVRAKAGQARVKQESVGVFACKNKWQPDDVTESLPPKKMKCGKEKDSEEQQLQPQAKAVVRSSHRPKCRKLPSDPQESTKKSPRGASDSGKEHNGVRGKHKHRKPTKPESQSPGKRADSHEEGSLEKKAKSSFRDFIPVVLSTRTRSQSGSICSSFAGMADSDMGSQEVFPTEEEEEVTPTPAKRRKVRKTQRDTQYRSHHAQDKSLLSQGRRHLWRAREMPWRTEAARQMWDTNEEEEEEEEEGLLKRKKRRRQKSRKYQTGEYLTEQEDEQRRKGRADLKARKQKTSSSQSLEHRLRNRNLLLPNKVQGISDSPNGFLPNNLEEPACLENSEKPSGKRKCKTKHMATVSEEAKDVVLYCLQKDSEDVNHRDNAGYTALHEACSRGWTDILNILLEHGANVNCSAQDGTRPVHDAVVNDNLETIWLLLSYGADPTLATYSGQTAMKLASSDTMKRFLSDHLSDLQGRAEGDPGVSWDFYSSSVLEEKDGFACDLLHNPPGSSDQEGDDPMEEDDFMFELSDKPLLPCYNLQVSVSRGPCNWFLFSDVLKRLKLSSRIFQARFPHFEITTMPKAEFYRQVASSQLLTPAERPGGLDDRSPPGSSETVELVRYEPDLLRLLGSEVEFQSCNS

SEQ ID NO: 289 - protein, 647 aa, Homo sapiens
MAAGLATWLPFARAAAVGWLPLAQQPLPPAPGVKASRGDEVLVVNVSGRRFETWKNTLDRYPDTLLGSSEKEFFYDADSGEYFFDRDPDMFRHVLNFYRTGRLHCPRQECIQAFDEELAFYGLVPELVGDCCLEEYRDRKKENAERLAEDEEAEQAGDGPALPAGSSLRQRLWRAFENPHTSTAALVFYYVTGFFIAVSVIANVVETIPCRGSARRSSREQPCGERFPQAFFCMDTACVLIFTGEYLLRLFAAPSRCRFLRSVMSLIDVVAILPYYIGLLVPKNDDVSGAFVTLRVFRVFRIFKFSRHSQGLRILGYTLKSCASELGFLLFSLTMAIIIFATVMFYAEKGTNKTNFTSIPAAFWYTIVTMTTLGYGDMVPSTIAGKIFGSICSLSGVLVIALPVPVIVSNFSRIYHQNQRADKRRAQQKVRLARIRLAKSGTTNAFLQYKQNGGLEDSGSGEEQALCVRNRSAFEQQHHHLLHCLEKTTCHEFTDELTFSEALGAVSPGGRTSRSTSVSSQPVGPGSLLSSCCPRRAKRRAIRLANSTASVSRGSMQELDMLAGLRRSHAPQSRSSLNAKPHDSLDLNCDSRDFVAAIISIPTPPANTPDESQPSSPGGGGRAGSTLRNSSLGTPCLFPETVKISSL

SEQ ID NO: 290 - protein, 611 aa, Homo sapiens
MEELVVEVRGSNGAFYKAFVKDVHEDSITVAFENNWQPDRQIPFHDVRFPPPVGYNKDINESDEVEVYSRANEKEPCCWWLAKVRMIKGEFYVIEYAACDATYNEIVTIERLRSVNPNKPATKDTFHKIKLDVPEDLRQMCAKEAAHKDFKKAVGAFSVTYDPENYQLVILSINEVTSKRAHMLIDMHFRSLRTKLSLIMRNEEASKQLESSRQLASRFHEQFIVREDLMGLAIGTHGANIQQARKVPGVTAIDLDEDTCTFHIYGEDQDAVKKARSFLEFAEDVIQVPRNLVGKVIGKNGKLIQEIVDKSGVVRVRIEAENEKNVPQEEEIMPPNSLPSNNSRVGPNAPEEKKHLDIKENSTHFSQPNSTKVQRGMVPFVFVGTKDSIANATVLLDYHLNYLKEVDQLRLERLQIDEQLRQIGASSRPPPNRTDKEKSYVTDDGQGMGRGSRPYRNRGHGRRGPGYTSGTNSEASNASETESDHRDELSDWSLAPTEEERESFLRRGDGRRRGGGGRGQGGRGRGGGFKGNDDHSRTDNRPRNPREAKGRTTDGSLQIRVDCNNERSVHTKTLQNTSSEGSRLRTGKDRNQKKEKPDSVDGQQPLVNGVP

SEQ ID NO: 291 - protein, 617 aa, Homo sapiens
MGPTLAVPTPYGCIGCKLPQPEYPPALIIFMFCAMVITIVVDLIGNSMVILAVTKNKKLRNSGNIFVVSLSVADMLVAIYPYPLMLHAMSIGGWDLSQLQCQMVGFITGLSVVGSIFNIVAIAINRYCYICHSLQYERIFSVRNTCIYLVITWIMTVLAVLPNMYIGTIEYDPRTYTCIFNYLNNPVFTVTIVCIHFVLPLLIVGFCYVRIWTKVLAARDPAGQNPDNQLAEVRNFLTMFVIFLLFAVCWCPINVLTVLVAVSPKEMAGKIPNWLYLAAYFIAYFNSCLNAVIYGLLNENFRREYWTIFHAMRHPIIFFSGLISDIREMQEARTLARARAHARDQAREQDRAHACPAVEETPMNVRNVPLPGDAAAGHPDRASGHPKPHSRSSSAYRKSASTHHKSVFSHSKAASGHLKPVSGHSKPASGHPKSATVYPKPASVHFKADSVHFKGDSVHFKPDSVHFKPASSNPKPITGHHVSAGSHSKSAFSAATSHPKPTTGHIKPATSHAEPTTADYPKPATTSHPKPTAADNPELSASHCPEIPAIAHPVSDDSDLPESASSPAAGPTKPAASQLESDTIADLPDPTVVTTSTNDYHDVVVIDVEDDPDEMAV

SEQ ID NO: 292 - protein, 350 aa, Homo sapiens
MGCFFSKRRKADKESRPENEEERPKQYSWDQREKVDPKDYMFSGLKDETVGRLPGTVAGQQFLIQDCENCNIYIFDHSATVTIDDCTNCIIFLGPVKGSVFFRNCRDCKCTLACQQFRVRDCRKLEVFLCCATQPIIESSSNIKFGCFQWYYPELAFQFKDAGLSIFNNTWSNIHDFTPVSGELNWSLLPEDAVVQDYVPIPTTEELKAVRVSTEANRSIVPISRGQRQKSSDESCLVVLFAGDYTIANARKLIDEMVGKGFFLVQTKEVSMKAEDAQRVFREKAPDFLPLLNKGPVIALEFNGDGAVEVCQLIVNEIFNGTKMFVSESKETASGDVDSFYNFADIQMGI

SEQ ID NO: 293 - protein, 963 aa, Homo sapiens
MAVAPRLFGGLCFRFRDQNPEVAVEGRLPISHSCVGCRRERTAMATVAANPAAAAAAVAAAAAVTEDREPQHEELPGLDSQWRQIENGESGRERPLRAGESWFLVEKHWYKQWEAYVQGGDQDSSTFPGCINNATLFQDEINWRLKEGLVEGEDYVLLPAAAWHYLVSWYGLEHGQPPIERKVIELPNIQKVEVYPVELLLVRHNDLGKSHTVQFSHTDSIGLVLRTARERFLVEPQEDTRLWAKNSEGSLDRLYDTHITVLDAALETGQLIIMETRKKDGTWPSAQLHVMNNNMSEEDEDFKGQPGICGLTNLGNTCFMNSALQCLSNVPQLTEYFLNNCYLEELNFRNPLGMKGEIAEAYADLVKQAWSGHHRSIVPHVFKNKVGHFASQFLGYQQHDSQELLSFLLDGLHEDLNRVKKKEYVELCDAAGRPDQEVAQEAWQNHKRRNDSVIVDTFHGLFKSTLVCPDCGNVSVTFDPFCYLSVPLPISHKRVLEVFFIPMDPRRKPEQHRLVVPKKGKISDLCVALSKHTGISPERMMVADVFSHRFYKLYQLEEPLSSILDRDDIFVYEVSGRIEAIEGSREDIVVPVYLRERTPARDYNNSYYGLMLFGHPLLVSVPRDRFTWEGLYNVLMYRLSRYVTKPNSDDEDDGDEKEDDEEDKDDVPGPSTGGSLRDPEPEQAGPSSGVTNRCPFLLDNCLGTSQWPPRRRRKQLFTLQTVNSNGTSDRTTSPEEVHAQPYIAIDWEPEMKKRYYDEVEAEGYVKHDCVGYVMKKAPVRLQECIELFTTVETLEKENPWYCPSCKQHQLATKKLDLWMLPEILIIHLKRFSYTKFSREKLDTLVEFPIRDLDFSEFVIQPQNESNPELYKYDLIAVSNHYGGMRDGHYTTFACNKDSGQWHYFDDNSVSPVNENQIESKAAYVLFYQRQDVARRLLSPAGSSGAPASPACSSPPSSEFMDVN

SEQ ID NO: 294 - protein, 1313 aa, Homo sapiens
MSGWRYLICVSFLLTILLELTYQGPPVPASSSTKLLMTSYSMRSTVVSRYAHTLVTSVLFNPHAEAHEAIFDLDLPHLAFISNFTMTINNKVYIAEVKEKHQAKKIYEEAHQQGKTAAHVGIRDRESEKFRISTSLAAGTEVTFSLAYEELLQRHQGQYQLVVSLRPGQLVKRLSIEVTVSERTGISYVHIPPLRTGRLRTNAHASEVDSPPSTRIERGETCVRITYCPTLQDQSSISGSGIMADFLVQYDVVMEDIIGDVQIYDDYFIHYFAPRGLPPMEKNVVFVIDVSSSMFGTKMEQTKTAMNVILSDLQANDYFNIISFSDTVNVWKAGGSIQATIQNVHSAKDYLHCMEADGWTDVNSALLAAASVLNHSNQEPGRGPSVGRIPLIIFLTDGEPTAGVTTPSVILSNVRQALGHRVSLFSLAFGDDADFTLLRRLSLENRGIARRIYEDTDAALQLKGLYEEISMPLLADVRLNYLGGLVGASPWAVFPNYFGGSELVVAGQVQPGKQELGIHLAARGPKDQLLVAHHSEGATNNSQKAFGCPGEPAPNVAHFIRRLWAYVTIGELLDAHFQARDTTTRHLLAAKVLNLSLEYNFVTPLTSLVMVQPKQASEETRRQTSTSAGPDTIMPSSSSRHGLGVSTAQPALVPKVISPKSRPVKPKFYLSSTTTASTKKMLSSKELEPLGESPHTLSMPTYPKAKIPAQQDSGTLAQPTLRTKPTILVPSNSGTLLPLKPGSLSHQNPDILPTNSRTQVPPVKPGIPASPKADTVKCVTPLHSKPGAPSHPQLGALTSQAPKGLPQSRPGVSTLQVPKYPLHTRPRVPAPKTRNNMPHLGPGILLSKTPKILLSLKPSAPPHQISTSISLSKPETPNPHMPQTPLPPRPDRPRPPLPESLSTFPNTISSSTGPSSTTTTSVLGEPLPMPFTPTLPPGRFWHQYDLLPGPQRTRQVLGPSRPGVPTMSLLNSSRPTPEGSPPNLPILLPSSILPEAISLLLLPEELELLSESMVESKFVESLNPPAFYTFLTPDEDGSPNWDGNSEEILGGAGGSMESQGSSVGLAKGTLPSIFTFSSSVDGDPHFVIQIPHSEEKICFTLNGHPGDLLQLIEDPKAGLHVSGKLLGAPPRPGHKDQTRTYFQIITVTTDKPRAYTITISRSSISLRGEGTLRLSWDQPALLKRPQLELYVAAAARLTLRLGPYLEFLVLRHRYRHPSTLQLPHLGFYVANGSGLSPSARGLIGQFQHADIRLVTGPMGPCLRRHHGPDVPVILGKRLLKDSPRLLPRWASCWLVKRSHVELLLGHPYLSYVL

SEQ ID NO: 295 - protein, 606 aa, Homo sapiens
MSDTSESGAGLTRFQAEASEKDSSSMMQTLLTVTQNVEVPETPKASKALEVSEDVKVSKASGVSKATEVSKTPEAREAPATQASSTTQLTDTQVLAAENKSLAADTKKQNADPQAVTMPATETKKVSHVADTKVNTKAQETEAAPSQAPADEPEPESAAAQSQENQDTRPKVKAKKARKVKHLDGEEDGSSDQSQASGTTGGRRVSKALMASMARRASRGPIAFWARRASRTRLAAWARRALLSLRSPKARRGKARRRAAKLQSSQEPEAPPPRDVALLQGRANDLVKYLLAKDQTKIPIKRSDMLKDIIKEYTDVYPEIIERAGYSLEKVFGIQLKEIDKNDHLYILLSTLEPTDAGILGTTKDSPKLGLLMVLLSIIFMNGNRSSEAVIWEVLRKLGLRPGIHHSLFGDVKKLITDEFVKQKYLDYARVPNSNPPEYEFFWGLRSYYETSKMKVLKFACKVQKKDPKEWAAQYREAMEADLKAAAEAAAEAKARAEIRARMGIGLGSENAAGPCNWDEADIGPWAKARIQAGAEAKAKAQESGSASTGASTSTNNSASASASTSGGFSAGASLTATLTFGLFAGLGGAGASTSGSSGACGFSYK

SEQ ID NO: 296 - protein, 429 aa, Homo sapiens
MQLRNPELHLGCALALRFLALVSWDIPGARALDNGLARTPTMGWLHWERFMCNLDCQEEPDSCISEKLFMEMAELMVSEGWKDAGYEYLCIDDCWMAPQRDSEGRLQADPQRFPHGIRQLANYVHSKGLKLGIYADVGNKTCAGFPGSFGYYDIDAQTFADWGVDLLKFDGCYCDSLENLADGYKHMSLALNRTGRSIVYSCEWPLYMWPFQKPNYTEIRQYCNHWRNFADIDDSWKSIKSILDWTSFNQERIVDVAGPGGWNDPDMLVIGNFGLSWNQQVTQMALWAIMAAPLFMSNDLRHISPQAKALLQDKDVIAINQDPLGKQGYQLRQGDNFEVWERPLSGLAWAVAMINRQEIGGPRSYTIAVASLGKGVACNPACFITQLLPVKRKLGFYEWTSRLRSHINPTGTVLLQLENTMQMSLKDLL

SEQ ID NO: 297 - protein, 1045 aa, Homo sapiens
MHQKTPEIYSVELSGTKDIVKTDKGDGKEKYRGLKNNCLELKKKNHKEEFQKELHLDDHKLSNRELEEKYGTDIIMGLSSTRAAELLARDGPNSLTPPKQTPEIVKFLKQMVGGFSILLWVGAFLCWIAYGIQYSSDKSASLNNVYLGCVLGLVVILTGIFAYYQEAKSTNIMSSFNKMIPQQALVIRDSEKKTIPSEQLVVGDIVEVKGGDQIPADIRVLSSQGCRVDNSSLTGESEPQPRSSEFTHENPLETKNICFYSTTCLEASTSPVGTVTGMVINTGDRTIIGHIASLASGVGNEKTPIAIEIEHFVHIVAGVAVSIGILFFIIAVSLKYQVLDSIIFLIGIIVANVPEGLLATVTVTLSLTAKRMAKKNCLVKNLEAVETLGSTSIICSDKTGTLTQNRMTVAHLWFDNQIFVADTSEDHSNQVFDQSSRTWASLSKIITLCNRAEFKPGQENVPIMKKAVIGDASETALLKFSEVILGDVMEIRKRNRKVAEIPFNSTNKFQLSIHEMDDPHGKRFLMVMKGAPERILEKCSTIMINGEEHPLDKSTAKTFHTAYMELGGLGERVLGFCHLYLPADEFPETYSFDIDAMNFPTSNLCFVGLLSMIDPPRSTVPDAVTKCRSAGIKVIMVTGDHPITAKAIAKSVGIISANSETVEDIAHRLNIAVEQVNKRDAKAAVVTGMELKDMSSEQLDEILANYQEIVFARTSPQQKLIIVEGCQRQDAVVAVTGDGVNDSPALKKADIGIAMGIAGSDAAKNAADMVLLDDNFASIVTGVEEGRLIFDNLKKTIAYSLTKNIAELCPFLIYIIVGLPLPIGTITILFIDLGTDIIPSIALAYEKAESDIMNRKPRHKNKDRLVNQPLAVYSYLHIGLMQALGAFLVYFTVYAQEGFLPRTLINLRVEWEKDYVNDLKDSYGQEWTRYQREYLEWTGYTAFFVGILVQQIADLIIRKTRRNSIFQQGLFRNKVIWVGITSQIIIGLILSYGLGSVTALSFTMLRAQYWFVAVPHAILIWVYDEVRKLFIRLYPGSWWDKNMYY

SEQ ID NO: 298 - protein, 705 aa, Homo sapiens
MTDNSNNQLVVRAKFNFQQTNEDELSFSKGDVIHVTRVEEGGWWEGTLNGRTGWFPSNYVREVKASEKPVSPKSGTLKSPPKGFDTTAINKSYYNVVLQNILETENEYSKELQTVLSTYLRPLQTSEKLSSANISYLMGNLEEICSFQQMLVQSLEECTKLPEAQQRVGGCFLNLMPQMKTLYLTYCANHPSAVNVLTEHSEELGEFMETKGASSPGILVLTTGLSKPFMRLDKYPTLLKELERHMEDYHTDRQDIQKSMAAFKNLSAQCQEVRKRKELELQILTEAIRNWEGDDIKTLGNVTYMSQVLIQCAGSEEKNERYLLLFPNVLLMLSASPRMSGFIYQGKLPTTGMTITKLEDSENHRNAFEISGSMIERILVSCNNQQDLQEWVEHLQKQTKVTSVGNPTIKPHSVPSHTLPSHPVTPSSKHADSKPAPLTPAYHTLPHPSHHGTPHTTINWGPLEPPKTPKPWSLSCLRPAPPLRPSAALCYKEDLSKSPKTMKKLLPKRKPERKPSDEEFASRKSTAALEEDAQILKVIEAYCTSAKTRQTLNSTWQGTDLMHNHVLADDDQPSLDSLGRRSSLSRLEPSDLSEDSDYDSIWTAHSYRMGSTSRSRKESAPQVLLPEEEKIIVEETKSNGQTVIEEKSLVDTVYALKDEVQELRQDNKKMKKSLEEEQRARKDLEKLVRKVLKNMNDPAWDETNL

SEQ ID NO: 299 - protein, 291 aa, Homo sapiens
MVREQYTTATEGICIERPENQYVYKIGIYGWRKRCLYLFVLLLLIILVVNLALTIWILKVMWFSPAGMGHLCVTKDGLRLEGESEFLFPLYAKEIHSRVDSSLLLQSTQNVTVNARNSEGEVTGRLKVGPKMVEVQNQQFQINSNDGKPLFTVDEKEVVVGTDKLRVTGPEGALFEHSVETPLVRADPFQDLRLESPTRSLSMDAPRGVHIQAHAGKIEALSQMDILFHSSDGMLVLDAETVCLPKLVQGTWGPSGSSQSLYEICVCPDGKLYLSVAGVSTTCQEHNHICL

SEQ ID NO: 300 - protein, 779 aa, Homo sapiens
MQQALELALDRAEYVIESARQRPPKRKYLSSGRKSVFQKLYDLYIEECEKEPEVKKLRRNVNLLEKLVMQETLSCLVVNLYPGNEGYSLMLRGKNGSDSETIRLPYEEGELLEYLDAEELPPILVDLLEKSQVNIFHCGCVIAEIRDYRQSSNMKSPGYQSRHILLRPTMQTLICDVHSITSDNHKWTQEDKLLLESQLILATAEPLCLDPSIAVTCTANRLLYNKQKMNTRPMKRCFKRYSRSSLNRQQDLSHCPPPPQLRLLDFLQKRKERKAGQHYDLKISKAGNCVDMWKRSPCNLAIPSEVDVEKYAKVEKSIKSDDSQPTVWPAHDVKDDYVFECEAGTQYQKTKLTILQSLGDPLYYGKIQPCKADEESDSQMSPSHSSTDDHSNWFIIGSKTDAERVVNQYQELVQNEAKCPVKMSHSSSGSASLSQVSPGKETDQTETVSVQSSVLGKGVKHRPPPIKLPSSSGNSSSGNYFTPQQTSSFLKSPTPPPSSKPSSIPRKSSVDLNQVSMLSPAALSPASSSQRTTATQVMANSAGLNFINVVGSVCGAQALMSGSNPMLGCNTGAITPAGINLSGLLPSGGLLPNALPSAMQAASQAGVPFGLKNTSSLRPLNLLQLPGGSLIFNTLQQQQQQLSQFTPQQPQQPTTCSPQQPGEQGSEQGSTSQEQALSAQQAAVINLTGVGSFMQSQAAVLSQLGSAENRPEQSLPQQRFQLSSAFQQQQQQIQQLRFLQHQMAMAAAAAQTAQLHHHRHTGSQSKSKMKRGTPTTPKF

SEQ ID NO: 301 - protein, 510 aa, Homo sapiens
MRPGLSFLLALLFFLGQAAGDLGDVGPPIPSPGFSSFPGVDSSSSFSSSSRSGSSSSRSLGSGGSVSQLFSNFTGSVDDRGTCQCSVSLPDTTFPVDRVERLEFTAHVLSQKFEKELSKVREYVQLISVYEKKLLNLTVRIDIMEKDTISYTELDFELIKVEVKEMEKLVIQLKESFGGSSEIVDQLEVEIRNMTLLVEKLETLDKNNVLAIRREIVALKTKLKECEASKDQNTPVVHPPPTPGSCGHGGVVNISKPSVVQLNWRGFSYLYGAWGRDYSPQHPNKGLYWVAPLNTDGRLLEYYRLYNTLDDLLLYINARELRITYGQGSGTAVYNNNMYVNMYNTGNIARVNLTTNTIAVTQTLPNAAYNNRFSYANVAWQDIDFAVDENGLWVIYSTEASTGNMVISKLNDTTLQVLNTWYTKQYKPSASNAFMVCGVLYATRTMNTRTEEIFYYYDTNTGKEGKLDIVMHKMQEKVQSINYNPFDQKLYVYNDGYLLNYDLSVLQKPQ

SEQ ID NO: 302 - protein, 577 aa, Homo sapiens
MHWLRKVQGLCTLWGTQMSSRTLYINSRQLVSLQWGHQEVPAKFNFASDVLDHWADMEKAGKRLPSPALWWVNGKGKELMWNFRELSENSQQAANVLSGACGLQRGDRVAVVLPRVPEWWLVILGCIRAGLIFMPGTIQMKSTDILYRLQMSKAKAIVAGDEVIQEVDTVASECPSLRIKLLVSEKSCDGWLNFKKLLNEASTTHHCVETGSQEASAIYFTSGTSGLPKMAEHSYSSLGLKAKMDAGWTGLQASDIMWTISDTGWILNILCSLMEPWALGACTFVHLLPKFDPLVILKTLSSYPIKSMMGAPIVYRMLLQQDLSSYKFPHLQNCVTVGESLLPETLENWRAQTGLDIRESYGQTETGLTCMVSKTMKIKPGYMGTAASCYDVQIIDDKGNVLPPGTEGDIGIRVKPIRPIGIFSGYVDNPDKTAANIRGDFWLLGDRGIKDEDGYFQFMGRANDIINSSGYRIGPSEVENALMEHPAVVETAVISSPDPVRGEVVKAFVVLASQFLSHDPEQLTKELQQHVKSVTAPYKYPRKIEFVLNLPKTVTGKIQRAKLRDKEWKMSGKARAQ

SEQ ID NO: 303 - protein, 683 aa, Homo sapiens
MASGPGSQEREGLLIVKLEEDCAWSQELPPPDPGPSPEASHLRFRRFRFQEAAGPREALSRLQELCHGWLRPEMRTKEQILELLVLEQFLTILPQEIQSRVQELHPESGEEAVTLVEDMQRELGRLRQQVTNHGRGTEVLLEEPLPLETARESPSFKLEPMETERSPGPRLQELLGPSPQRDPQAVKERALSAPWLSLFPPEGNMEDKEMTGPQLPESLEDVAMYISQEEWGHQDPSKRALSRDTVQESYENVDSLESHIPSQEVPGTQVGQGGKLWDPSVQSCKEGLSPRGPAPGEEKFENLEGVPSVCSENIHPQVLLPDQARGEVPWSPELGRPHDRSQGDWAPPPEGGMEQALAGASSGRELGRPKELQPKKLHLCPLCGKNFSNNSNLIRHQRIHAAERLCMGVDCTEIFGGNPRFLSLHRAHLGEEAHKCLECGKCFSQNTHLTRHQRTHTGEKPYQCNICGKCFSCNSNLHRHQRTHTGEKPYKCPECGEIFAHSSNLLRHQRIHTGERPYKCPECGKSFSRSSHLVIHERTHERERLYPFSECGEAVSDSTPFLTNHGAHKAEKKLFECLTCGKSFRQGMHLTRHQRTHTGEKPYKCTLCGENFSHRSNLIRHQRIHTGEKPYTCHECGDSFSHSSNRIRHLRTHTGERPYKCSECGESFSRSSRLMSHQRTHTG

SEQ ID NO: 304 - protein, 660 aa, Homo sapiens
MEALMARGALTGPLRALCLLGCLLSHAAAAPSPIIKFPGDVAPKTDKELAVQYLNTFYGCPKESCNLFVLKDTLKKMQKFFGLPQTGDLDQNTIETMRKPRCGNPDVANYNFFPRKPKWDKNQITYRIIGYTPDLDPETVDDAFARAFQVWSDVTPLRFSRIHDGEADIMINFGRWEHGDGYPFDGKDGLLAHAFAPGTGVGGDSHFDDDELWTLGEGQVVRVKYGNADGEYCKFPFLFNGKEYNSCTDTGRSDGFLWCSTTYNFEKDGKYGFCPHEALFTMGGNAEGQPCKFPFRFQGTSYDSCTTEGRTDGYRWCGTTEDYDRDKKYGFCPETAMSTVGGNSEGAPCVFPFTFLGNKYESCTSAGRSDGKMWCATTANYDDDRKWGFCPDQGYSLFLVAAHEFGHAMGLEHSQDPGALMAPIYTYTKNFRLSQDDIKGIQELYGASPDIDLGTGPTPTLGPVTPEICKQDIVFDGIAQIRGEIFFFKDRFIWRTVTPRDKPMGPLLVATFWPELPEKIDAVYEAPQEEKAVFFAGNEYWIYSASTLERGYPKPLTSLGLPPDVQRVDAAFNWSKNKKTYIFAGDKFWRYNEVKKKMDPGFPKLIADAWNAIPDNLDAVVDLQGGGHSYFFKGAYYLKLENQSLKSVKFGSIKSDWLGC

SEQ ID NO: 305 - protein, 554 aa, Homo sapiens
MSADGGGIQDTQDKETPPEVPDRGHPHQEMPSKLGEAVPSGDTQESLHIKMEPEEPHSEGASQEDGAQGAWGWAPLSHGSKEKALFLPGGALPSPRIPVLSREGRTRDRQMAAALLTAWSQMPVTFEDVALYLSREEWGRLDHTQQNFYRDVLQKKNGLSLGFPFSRPFWAPQAHGKGEASGSSRQAGDEKEWRGACTGAVEVGQRVQTSSVAALGNVKPFRTRAGRVQWGVPQCAQEAACGRSSGPAKDSGQPAEPDRTPDAAPPDPSPTEPQEYRVPEKPNEEEKGAPESGEEGLAPDSEVGRKSYRCEQCGKGFSWHSHLVTHRRTHTGEKPYACTDCGKRFGRSSHLIQHQIIHTGEKPYTCPACRKSFSHHSTLIQHQRIHTGEKPYVCDRCAKRFTRRSDLVTHQGTHTGAKPHKCPICAKCFTQSSALVTHQRTHTGVKPYPCPECGKCFSQRSNLIAHNRTHTGEKPYHCLDCGKSFSHSSHLTAHQRTHRGVRPYACPLCGKSFSRRSNLHRHEKIHTTGPKALAMLMLGAAAAGALATPPPAPT

SEQ ID NO: 306 - protein, 193 aa, Homo sapiens
MLGVLELLLLGAAWLAGPARGQNETEPIVLEGKCLVVCDSNPTSDPTGTALGISVRSGSAKVAFSAIRSTNHEPSEMSNRTMIIYFDQVLVNIGNNFDSERSTFIAPRKGIYSFNFHVVKVYNRQTIQVSLMLNGWPVISAFAGDQDVTREAASNGVLIQMEKGDRAYLKLERGNLMGGWKYSTFSGFLVFPL

SEQ ID NO: 307 - protein, 93 aa, Homo sapiens
MDRLQTALLVVLVLLAVALQATEAGPYGANMEDSVCCRDYVRYRLPLRVVKHFYWTSDSCPRPGVVLLTFRDKEICADPRVPWVKMILNKLSQ

SEQ ID NO: 308 - protein, 275 aa, Homo sapiens
MPYANQPTVRITELTDENVKFIIENTDLAVANSIRRVFIAEVPIIAIDWVQIDANSSVLHDEFIAHRLGLIPLISDDIVDKLQYSRDCTCEEFCPECSVEFTLDVRCNEDQTRHVTSRDLISNSPRVIPVTSRNRDNDPNDYVEQDDILIVKLRKGQELRLRAYAKKGFGKEHAKWNPTAGVAFEYDPDNALRHTVYPKPEEWPKSEYSELDEDESQAPYDPNGKPERFYYNVESCGSLRPETIVLSALSGLKKKLSDLQTQLSHEIQSDVLTIN

SEQ ID NO: 309 - protein, 473 aa, Homo sapiens
MATQAKRPRVAGPVDGGDLDPVACFLSWCRRVGLELSPKVSERAGGRRTRGGARAALTSPPAQVAVSRQGTVAGYGMVARESVQAGELLFVVPRAALLSQHTCSIGGLLERERVALQSQSGWVPLLLALLHELQAPASRWRPYFALWPELGRLEHPMFWPEEERRCLLQGTGVPEAVEKDLANIRSEYQSIVLPFMEAHPDLFSLRVRSLELYHQLVALVMAYSFQEPLEEEEDEKEPNSPVMVPAADILNHLANHNANLEYSANCLRMVATQPIPKGHEIFNTYGQMANWQLIHMYGFVEPYPDNTDDTADIQMVTVREAALQGTKTEAERHLVYERWDFLCKLEMVGEEGAFVIGREEVLTEEELTTTLKVLCMPAEEFRELKDQDGGGDDKREEGSLTITNIPKLKASWRQLLQNSVLLTLQTYATDLKTDQGLLSNKEVYAKLSWREQQALQVRYGQKMILHQLLELTS

SEQ ID NO: 310 - protein, 515 aa, Homo sapiens
MEAREPGRPTPTYHLVPNTSQSQVEEDVSSPPQRSSETMQLKKEISLLNGVSLVVGNMIGSGIFVSPKGVLVHTASYGMSLIVWAIGGLFSVVGALCYAELGTTITKSGASYAYILEAFGGFIAFIRLWVSLLVVEPTGQAIIAITFANYIIQPSFPSCDPPYLACRLLAAACICLLTFVNCAYVKWGTRVQDTFTYAKVVALIAIIVMGLVKLCQGHSEHFQDAFEGSSWDMGNLSLALYSALFSYSGWDTLNFVTEEIKNPERNLPLAIGISMPIVTLIYILTNVAYYTVLNISDVLSSDAVAVTFADQTFGMFSWTIPIAVALSCFGGLNASIFASSRLFFVGSREGHLPDLLSMIHIERFTPIPALLFNCTMALIYLIVEDVFQLINYFSFSYWFFVGLSVVGQLYLRWKEPKRPRPLKLSVFFPIVFCICSVFLVIVPLFTDTINSLIGIGIALSGVPFYFMGVYLPESRRPLFIRNVLAAITRGTQQLCFCVLTELDVAEEKKDERKTD

SEQ ID NO: 311 - protein, 412 aa, Homo sapiens
MGLHLRPYRVGLLPDGLLFLLLLLMLLADPALPAGRHPPVVLVPGDLGNQLEAKLDKPTVVHYLCSKKTESYFTIWLNLELLLPVIIDCWIDNIRLVYNKTSRATQFPDGVDVRVPGFGKTFSLEFLDPSKSSVGSYFHTMVESLVGWGYTRGEDVRGAPYDWRRAPNENGPYFLALREMIEEMYQLYGGPVVLVAHSMGNMYTLYFLQRQPQAWKDKYIRAFVSLGAPWGGVAKTLRVLASGDNNRIPVIGPLKIREQQRSAVSTSWLLPYNYTWSPEKVFVQTPTINYTLRDYRKFFQDIGFEDGWLMRQDTEGLVEATMPPGVQLHCLYGTGVPTPDSFYYESFPDRDPKICFGDGDGTVNLKSALQCQAWQSRQEHQVLLQELPGSEHIEMLANATTLAYLKRVLLGP

SEQ ID NO: 312 - protein, 798 aa, Homo sapiens
MALHSPQYIFGDFSPDEFNQFFVTPRSSVELPPYSGTVLCGTQAVDKLPDGQEYQRIEFGVDEVIEPSDTLPRTPSYSISSTLNPQAPEFILGCTASKITPDGITKEASYGSIDCQYPGSALALDGSSNVEAEVLENDGVSGGLGQRERKKKKKRPPGYYSYLKDGGDDSISTEALVNGHANSAVPNSVSAEDAEFMGDMPPSVTPRTCNSPQNSTDSVSDIVPDSPFPGALGSDTRTAGQPEGGPGADFGQSCFPAEAGRDTLSRTAGAQPCVGTDTTENLGVANGQILESSGEGTATNGVELHTTESIDLDPTKPESASPPADGTGSASGTLPVSQPKSWASLFHDSKPSSSSPVAYVETKYSPPAISPLVSEKQVEVKEGLVPVSEDPVAIKIAELLENVTLIHKPVSLQPRGLINKGNWCYINATLQALVACPPMYHLMKFIPLYSKVQRPCTSTPMIDSFVRLMNEFTNMPVPPKPRQALGDKIVRDIRPGAAFEPTYIYRLLTVNKSSLSEKGRQEDAEEYLGFILNGLHEEMLNLKKLLSPSNEKLTISNGPKNHSVNEEEQEEQGEGSEDEWEQVGPRNKTSVTRQADFVQTPITGIFGGHIRSVVYQQSSKESATLQPFFTLQLDIQSDKIRTVQDALESLVARESVQGYTTKTKQEVEISRRVTLEKLPPVLVLHLKRFVYEKTGGCQKLIKNIEYPVDLEISKELLSPGVKNKNFKCHRTYRLFAVVYHHGNSATGGHYTTDVFQIGLNGWLRIDDQTVKVINQYQVVKPTAERTAYLLYYRRVDLL

SEQ ID NO: 313 - protein, 1807 aa, Homo sapiens
MAKPTSKDSGLKEKFKILLGLGTPRPNPRSAEGKQTEFIITAEILRELSMECGLNNRIRMIGQICEVAKTKKFEEHAVEALWKAVADLLQPERPLEARHAVLALLKAIVQGQGERLGVLRALFFKVIKDYPSNEDLHERLEVFKALTDNGRHITYLEEELADFVLQWMDVGLSSEFLLVLVNLVKFNSCYLDEYIARMVQMICLLCVRTASSVDIEVSLQVLDAVVCYNCLPAESLPLFIVTLCRTINVKELCEPCWKLMRNLLGTHLGHSAIYNMCHLMEDRAYMEDAPLLRGAVFFVGMALWGAHRLYSLRNSPTSVLPSFYQAMACPNEVVSYEIVLSITRLIKKYRKELQVVAWDILLNIIERLLQQLQTLDSPELRTIVHDLLTTVEELCDQNEFHGSQERYFELVERCADQRPESSLLNLISYRAQSIHPAKDGWIQNLQALMERFFRSESRGAVRIKVLDVLSFVLLINRQFYEEELINSVVISQLSHIPEDKDHQVRKLATQLLVDLAEGCHTHHFNSLLDIIEKVMARSLSPPPELEERDVAAYSASLEDVKTAVLGLLVILQTKLYTLPASHATRVYEMLVSHIQLHYKHSYTLPIASSIRLQAFDFLLLLRADSLHRLGLPNKDGVVRFSPYCVCDYMEPERGSEKKTSGPLSPPTGPPGPAPAGPAVRLGSVPYSLLFRVLLQCLKQESDWKVLKLVLGRLPESLRYKVLIFTSPCSVDQLCSALCSMLSGPKTLERLRGAPEGFSRTDLHLAVVPVLTALISYHNYLDKTKQREMVYCLEQGLIHRCASQCVVALSICSVEMPDIIIKALPVLVVKLTHISATASMAVPLLEFLSTLARLPHLYRNFAAEQYASVFAISLPYTNPSKFNQYIVCLAHHVIAMWFIRCRLPFRKDFVPFITKGLRSNVLLSFDDTPEKDSFRARSTSLNERPKSLRIARPPKQGLNNSPPVKEFKESSAAEAFRCRSISVSEHVVRSRIQTSLTSASLGSADENSVAQADDSLKNLHLELTETCLDMMARYVFSNFTAVPKRSPVGEFLLAGGRTKTWLVGNKLVTVTTSVGTGTRSLLGLDSGELQSGPESSSSPGVHVRQTKEAPAKLESQAGQQVSRGARDRVRSMSGGHGLRVGALDVPASQFLGSATSPGPRTAPAAKPEKASAGTRVPVQEKTNLAAYVPLLTQGWAEILVRRPTGNTSWLMSLENPLSPFSSDINNMPLQELSNALMAAERFKEHRDTALYKSLSVPAASTAKPPPLPRSNTVASFSSLYQSSCQGQLHRSVSWADSAVVMEEGSPGEVPVLVEPPGLEDVEAALGMDRRTDAYSRSSSVSSQEEKSLHAEELVGRGIPIERVVSSEGGRPSVDLSFQPSQPLSKSSSSPELQTLQDILGDPGDKADVGRLSPEVKARSQSGTLDGESAAWSASGEDSRGQPEGPLPSSSPRSPSGLRPRGYTISDSAPSRRGKRVERDALKSRATASNAEKVPGINPSFVFLQLYHSPFFGDESNKPILLPNESQSFERSVQLLDQIPSYDTHKIAVLYVGEGQSNSELAILSNEHGSYRYTEFLTGLGRLIELKDCQPDKVYLGGLDVCGEDGQFTYCWHDDIMQAVFHIATLMPTKDVDKHRCDKKRHLGNDFVSIVYNDSGEDFKLGTIKGQFNFVHVIVTPLDYECNLVSLQCRKDMEGLVDTSVAKIVSDRNLPFVARQMALHANMASQVHHSRSNPTDIYPSKWIARLRHIKRLRQRICEEAAYSNPSLPLVHPPSHSKAPAQTPAEPTPGYEVGQRKRLISSVEDFTEFV

SEQ ID NO: 314 - protein, 480 aa, Homo sapiens
MATVPGLQPLPTLEQDLEQEEILIVKVEEDFCLEEEPSVETEDPSPETFRQLFRLFCYQEVAGPREALSRLWELCCRWLRPELRTKEQILELLVLEQFLTVLPGEIQARVREQQPESGEEAVVLVEGLQRKPRKHRQRGSELLSDDEVPLGIGGQFLKHQAEAQPEDLSLEEEARFSSQQPPAQLSHRPQRGPLLWPERGPPAPRHQEMASASPFLSAWSQVPVNLEDVAVYLSGEEPRCMDPAQRDAPLENEGPGIQLEDGGDGREDAPLRMEWYRVLSARCQGPGHPLPGQRPAPVRGLVRPDQPRGGPPPGRRASHGADKPYTCPECGKGFSKTSHLTKHQRTHTGERPYKCLVCGKGFSDRSNFSTHQRVHTGEKPYPCPECGKRFSQSSSLVIHRRTHSGERPYACTQCGKRFNNSSHFSAHRRTHTGEKPYTCPACGRGFRRGTDLHKHQRTHMGAGSLPTLQPVAPGGPGAKA

SEQ ID NO: 315 - protein, 292 aa, Homo sapiens
MAQPPPDVEGDDCLPAYRHLFCPDLLRDKVAFITGGGSGIGFRIAEIFMRHGCHTVIASRSLPRVLTAARKLAGATGRRCLPLSMDVRAPPAVMAAVDQALKEFGRIDILINCAAGNFLCPAGALSFNAFKTVMDIDTSGTFNVSRVLYEKFFRDHGGVIVNITATLGNRGQALQVHAGSAKAAVDAMTRHLAVEWGPQNIRVNSLAPGPISGTEGLRRLGGPQASLSTKVTASPLQRLGNKTEIAHSVLYLASPLASYVTGAVLVADGGAWLTFPNGVKGLPDFASFSAKL

SEQ ID NO: 316 - protein, 781 aa, Homo sapiens
MAKTPSDHLLSTLEELVPYDFEKFKFKLQNTSVQKEHSRIPRSQIQRARPVKMATLLVTYYGEEYAVQLTLQVLRAINQRLLAEELHRAAIQEYSTQENGTDDSAASSSLGENKPRSLKTPDHPEGNEGNGPRPYGGGAASLRCSQPEAGRGLSRKPLSKRREKASEGLDAQGKPRTRSPALPGGRSPGPCRALEGGQAEVRLRRNASSAGRLQGLAGGAPGQKECRPFEVYLPSGKMRPRSLEVTISTGEKAPANPEILLTLEEKTAANLDSATEPRARPTPDGGASADLKEGPGNPEHSVTGRPPDTAASPRCHAQEGDPVDGTCVRDSCSFPEAVSGHPQASGSRSPGCPRCQDSHERKSPGSLSPQPLPQCKRHLKQVQLLFCEDHDEPICLICSLSQEHQGHRVRPIEEVALEHKKKIQKQLEHLKKLRKSGEEQRSYGEEKAVSFLKQTEALKQRVQRKLEQVYYFLEQQEHFFVASLEDVGQMVGQIRKAYDTRVSQDIALLDALIGELEAKECQSEWELLQDIGDILHRAKTVPVPEKWTTPQEIKQKIQLLHQKSEFVEKSTKYFSETLRSEMEMFNVPELIGAQAHAVNVILDAETAYPNLIFSDDLKSVRLGNKWERLPDGPQRFDSCIIVLGSPSFLSGRRYWEVEVGDKTAWILGACKTSISRKGNMTLSPENGYWVVIMMKENEYQASSVPPTRLLIKEPPKRVGIFVDYRVGSISFYNVTARSHIYTFASCSFSGPLQPIFSPGTRDGGKNTAPLTICPVGGQGPD

SEQ ID NO: 317 - protein, 1086 aa, Homo sapiens
MATVGEWSCVRCTFLNPAGQRQCSICEAPRHKPDLNHILRLSVEEQKWPCARCTFRNFLGKEACEVCGFTPEPAPGAAFLPVLNGVLPKPPAILGEPKGSCQEEAGPVRTAGLVATEPARGQCEDKDEEEKEEQEEEEGAAEPRGGWACPRCTLHNTPVASSCSVCGGPRRLSLPRIPPEALVVPEVVAPAGFHVVPAAPPPGLPGEGAEANPPATSQGPAAEPEPPRVPPFSPFSSTLQNNPVPRSRREVPPQLQPPVPEAAQPSPSAGCRGAPQGSGWAGASRLAELLSGKRLSVLEEEATEGGTSRVEAGSSTSGSDIIDLAGDTVRYTPASPSSPDFTTWSCAKCTLRNPTVAPRCSACGCSKLHGFQEHGEPPTHCPDCGADKPSPCGRSCGRVSSAQKAARVLPERPGQWACPACTLLNALRAKHCAACHTPQLLVAQRRGAAPLRRRESMHVEQRRQTDEGEAKALWENIVAFCRENNVSFVDDSFPPGPESVGFPAGDSVQQRVRQWLRPQEINCSVFRDHRATWSVFHTLRPSDILQGLLGNCWFLSALAVLAERPDLVERVMVTRSLCAEGAYQVRLCKDGTWTTVLVDDMLPCDEAGCLLFSQAQRKQLWVALIEKALAKLHGSYFALQAGRAIEGLATLTGAPCESLALQLSSTNPREEPVDTDLIWAKMLSSKEAGFLMGASCGGGNMKVDDSAYESLGLRPRHAYSILDVRDVQGTRLLRLRNPWGRFSWNGSWSDEWPHWPGHLRGELMPHGSSEGVFWMEYGDFVRYFDSVDICKVHSDWQEARVQGCFPSSASAPVGVTALTVLERASLEFALFQEGSRRSDAVDSHLLDLCILVFRATFGSGGHLSLGRLLAHSKRAVKKFVSCDVMLEPGEYAVVCCAFNHWGPPLPGTPAPQASSPSAGVPRASPEPPGHVLAVYSSRLVMVEPVEAQPTTLADAIILLTESRGERHEGREGMTCYYLTHGWAGLIVVVENRHPKAYLHVQCDCTDSFNVVSTRGSLRTQDSVPPLHRQVLVILSQLEGNAGFSITHRLAHRKAAQAFLSDWTASKGTHSPPLTPEVAGLHGPRPL

SEQ ID NO: 318 - protein, 261 aa, Homo sapiens
MSGEIAMCEPEFGNDKAREPSVGGRWRVSWYERFVQPCLVELLGSALFIFIGCLSVIENGTDTGLLQPALAHGLALGLVIATLGNISGGHFNPAVSLAAMLIGGLNLVMLLPYWVSQLLGGMLGAALAKAVSPEERFWNASGAAFVTVQEQGQVAGALVAEIILTTLLALAVCMGAINEKTKGPLAPFSIGFAVTVDILAGGPVSGGCMNPARAFGPAVVANHWNFHWIYWLGPLLAGLLVGLLIRCFIGDGKTRLILKAR

SEQ ID NO: 319 - protein, 1352 aa, Homo sapiens
MSKVTAPGSGPPAAASGKEKRSFSKRLFRSGRAGGGGAGGPGASGPAAPSSPSSPSSARSVGSFMSRVLKTLSTLSHLSSEGAAPDRGGLRSCFPPGPAAAPTPPPCPPPPASPAPPACAAEPVPGVAGLRNHGNTCFMNATLQCLSNTELFAEYLALGQYRAGRPEPSPDPEQPAGRGAQGQGEVTEQLAHLVRALWTLEYTPQHSRDFKTIVSKNALQYRGNSQHDAQEFLLWLLDRVHEDLNHSVKQSGQPPLKPPSETDMMPEGPSFPVCSTFVQELFQAQYRSSLTCPHCQKQSNTFDPFLCISLPIPLPHTRPLYVTVVYQGKCSHCMRIGVAVPLSGTVARLREAVSMETKIPTDQIVLTEMYYDGFHRSFCDTDDLETVHESDCIFAFETPEIFRPEGILSQRGIHLNNNLNHLKFGLDYHRLSSPTQTAAKQGKMDSPTSRAGSDKIVLLVCNRACTGQQGKRFGLPFVLHLEKTIAWDLLQKEILEKMKYFLRPTVCIQVCPFSLRVVSVVGITYLLPQEEQPLCHPIVERALKSCGPGGTAHVKLVVEWDKETRDFLFVNTEDEYIPDAESVRLQRERHHQPQTCTLSQCFQLYTKEERLAPDDAWRCPHCKQLQQGSITLSLWTLPDVLIIHLKRFRQEGDRRMKLQNMVKFPLTGLDMTPHVVKRSQSSWSLPSHWSPWRRPYGLGRDPEDYIYDLYAVCNHHGTMQGGHYTAYCKNSVDGLWYCFDDSDVQQLSEDEVCTQTAYILFYQRRTAIPSWSANSSVAGSTSSSLCEHWVSRLPGSKPASVTSAASSRRTSLASLSESVEMTGERSEDDGGFSTRPFVRSVQRQSLSSRSSVTSPLAVNENCMRPSWSLSAKLQMRSNSPSRFSGDSPIHSSASTLEKIGEAADDKVSISCFGSLRNLSSSYQEPSDSHSRREHKAVGRAPLAVMEGVFKDESDTRRLNSSVVDTQSKHSAQGDRLPPLSGPFDNNNQIAYVDQSDSVDSSPVKEVKAPSHPGSLAKKPESTTKRSPSSKGTSEPEKSLRKGRPALASQESSLSSTSPSSPLPVKVSLKPSRSRSKADSSSRGSGRHSSPAPAQPKKESSPKSQDSVSSPSPQKQKSASALTYTASSTSAKKASGPATRSPFPPGKSRTSDHSLSREGSRQSLGSDRASATSTSKPNSPRVSQARAGEGRGAGKHVRSSSMASLRSPSTSIKSGLKRDSKSEDKGLSFFKSALRQKETRRSTDLGKTALLSKKAGGSSVKSVCKNTGDDEAERGHQPPASQQPNANTTGKEQLVTKDPASAKHSLLSARKSKSSQLDSGVPSSPGGRQSAEKSSKKLSSSMQTSARPSQKPQ

SEQ ID NO: 320 - protein, 576 aa, Homo sapiens
MDVRFYPAAAGDPASLDFAQCLGYYGYSKFGNNNNYMNMAEANNAFFAASEQTFHTPSLGDEEFEIPPITPPPESDPALGMPDVLLPFQALSDPLPSQGSEFTPQFPPQSLDLPSITISRNLVEQDGVLHSSGLHMDQSHTQVSQYRQDPSLIMRSIVHMTDAARSGVMPPAQLTTINQSQLSAQLGLNLGGASMPHTSPSPPASKSATPSPSSSINEEDADEANRAIGEKRAAPDSGKKPKTPKKKKKKDPNEPQKPVSAYALFFRDTQAAIKGQNPNATFGEVSKIVASMWDSLGEEQKQVYKRKTEAAKKEYLKALAAYRASLVSKAAAESAEAQTIRSVQQTLASTNLTSSLLLNTPLSQHGTVSASPQTLQQSLPRSIAPKPLTMRLPMNQIVTSVTIAANMPSNIGAPLISSMGTTMVGSAPSTQVSPSVQTQQHQMQLQQQQQQQQQQMQQMQQQQLQQHQMHQQIQQQMQQQHFQHHMQQHLQQQQQHLQQQINQQQLQQQLQQRLQLQQLQHMQHQSQPSPRQHSPVASQITSPIPAIGSPQPASQQHQSQIQSQTQTQVLSQVSIF

SEQ ID NO: 321 - protein, 493 aa, Homo sapiens
MFPVFPCTLLAPPFPVLGLDSRGVGGLMNSFPPPQGHAQNPLQVGAELQSRFFASQGCAQSPFQAAPAPPPTPQAPAAEPLQVDLLPVLAAAQESAAAAAAAAAAAAAVAAAPPAPAAASTVDTAALKQPPAPPPPPPPVSAPAAEAAPPASAATIAAAAATAVVAPTSTVAVAPVASALEKKTKSKGPYICALCAKEFKNGYNLRRHEAIHTGAKAGRVPSGAMKMPTMVPLSLLSVPQLSGAGGGGGEAGAGGGAAAVAAGGVVTTTASGKRIRKNHACEMCGKAFRDVYHLNRHKLSHSDEKPYQCPVCQQRFKRKDRMSYHVRSHDGAVHKPYNCSHCGKSFSRPDHLNSHVRQVHSTERPFKCEKCEAAFATKDRLRAHTVRHEEKVPCHVCGKMLSSAYISDHMKVHSQGPHHVCELCNKGFTTAAYLRIHAVKDHGLQAPRADRILCKLCSVHCKTPAQLAGHMQTHLGGAAPPVPGDAPQPQPTC

SEQ ID NO: 322 - protein, 458 aa, Homo sapiens
MAAQGAAAAVAAGTSGVAGEGEPGPGENAAAEGTAPSPGRVSPPTPARGEPEVTVEIGETYLCRRPDSTWHSAEVIQSRVNDQEGREEFYVHYVGFNRRLDEWVDKNRLALTKTVKDAVQKNSEKYLSELAEQPERKITRNQKRKHDEINHVQKTYAEMDPTTAALEKEHEAITKVKYVDKIHIGNYEIDAWYFSPFPEDYGKQPKLWLCEYCLKYMKYEKSYRFHLGQCQWRQPPGKEIYRKSNISVYEVDGKDHKIYCQNLCLLAKLFLDHKTLYFDVEPFVFYILTEVDRQGAHIVGYFSKEKESPDGNNVACILTLPPYQRRGYGKFLIAFSYELSKLESTVGSPEKPLSDLGKLSYRSYWSWVLLEILRDFRGTLSIKDLSQMTSITQNDIISTLQSLNMVKYWKGQHVICVTPKLVEEHLKSAQYKKPPITVDSVCLKWAPPKHKQVKLSKK

SEQ ID NO: 323 - protein, 760 aa, Homo sapiens
MLSDDHVNEIIIQVENVSSGVQSHPSSNQIFQEKVLLDSSINMVLSISDIDVIDSQTVSKRNDQKGNQVLRFSTSLNESMSQTLHSLECMGIDTPGSSHETVQGQKLIASLIPMTSRDRIKAIRNQPRTMEEKRNLRKIVDKEKSKQTHRILQLNCCIQCLNSISRAYRRSKNSLSEILNSISLWQKTLKIIGGKFGTSVLSYFNFLRWLLKFNIFSFILNFSFIIIPQFTVAKKNTLQFTGLEFFTGVGYFRDTVMYYGFYTNSTIQHGNSGASYNMQLAYIFTIGACLTTCFFSLLFSMAKYFRNNFINPHIYSGGITKLIFCWDFTVTHEKAVKLKQKNLSTEIRENLSELRQENSKLTFNQLLTRFSAYMVAWVVSTGVAIACCAAVYYLAEYNLEFLKTHSNPGAVLLLPFVVSCINLAVPCIYSMFRLVERYEMPRHEVYVLLIRNIFLKISIIGILCYYWLNTVALSGEECWETLIGQDIYRLLLMDFVFSLVNSFLGEFLRRIIGMQLITSLGLQEFDIARNVLELIYAQTLVWIGIFFCPLLPFIQMIMLFIMFYSKNISLMMNFQPPSKAWRASQMMTFFIFLLFFPSFTGVLCTLAITIWRLKPSADCGPFRGLPLFIHSIYSWIDTLSTRPGYLWVVWIYRNLIGSVHFFFILTLIVLIITYLYWQITEGRKIMIRLLHEQIINEGKDKMFLIEKLIKLQDMEKKANPSSLVLERREVEQQGFLHLGEHDGSLDLRSRRSVQEGNPRA

SEQ ID NO: 324 - protein, 458 aa, Homo sapiens
MITKTHKVDLGLPEKKKKKKVVKEPETRYSVLNNDDYFADVSPLRATSPSKSVAHGQAPEMPLVKKKKKKKKGVSTLCEEHVEPETTLPARRTEKSPSLRKQVFGHLEFLSGEKKNKKSPLAMSHASGVKTSPDPRQGEEETRVGKKLKKHKKEKKGAQDPTAFSVQDPWFCEAREARDVGDTCSVGKKDEEQAALGQKRKRKSPREHNGKVKKKKKIHQEGDALPGHSKPSRSMESSPRKGSKKKPVKVEAPEYIPISDDPKASAKKKMKSKKKVEQPVIEEPALKRKKKKKRKESGVAGDPWKEETDTDLEVVLEKKGNMDEAHIDQVRRKALQEEIDRESGKTEASETRKWTGTQFGQWDTAGFENEDQKLKFLRLMGGFKNLSPSFSRPASTIARPNMALGKKAADSLQQNLQRDYDRAMSWKYSRGAGLGFSTAPNKIFYIDRNASKSVKLED

SEQ ID NO: 325 - protein, 3065 aa, Homo sapiens
MEEKQQIILANQDGGTVAGAAPTFFVILKQPGNGKTDQGILVTNQDACALASSVSSPVKSKGKICLPADCTVGGITVTLDNNSMWNEFYHRSTEMILTKQGRRMFPYCRYWITGLDSNLKYILVMDISPVDNHRYKWNGRWWEPSGKAEPHVLGRVFIHPESPSTGHYWMHQPVSFYKLKLTNNTLDQEGHIILHSMHRYLPRLHLVPAEKAVEVIQLNGPGVHTFTFPQTEFFAVTAYQNIQITQLKIDYNPFAKGFRDDGLNNKPQRDGKQKNSSDQEGNNISSSSGHRVRLTEGQGSEIQPGDLDPLSRGHETSGKGLEKTSLNIKRDFLGFMDTDSALSEVPQLKQEISECLIASSFEDDSRVASPLDQNGSFNVVIKEEPLDDYDYELGECPEGVTVKQEETDEETDVYSNSDDDPILEKQLKRHNKVDNPEADHLSSKWLPSSPSGVAKAKMFKLDTGKMPVVYLEPCAVTRSTVKISELPDNMLSTSRKDKSSMLAELEYLPTYIENSNETAFCLGKESENGLRKHSPDLRVVQKYPLLKEPQWKYPDISDSISTERILDDSKDSVGDSLSGKEDLGRKRTTMLKIATAAKVVNANQNASPNVPGKRGRPRKLKLCKAGRPPKNTGKSLISTKNTPVSPGSTFPDVKPDLEDVDGVLFVSFESKEALDIHAVDGTTEESSSLQASTTNDSGYRARISQLEKELIEDLKTLRHKQVIHPGLQEVGLKLNSVDPTMSIDLKYLGVQLPLAPATSFPFWNLTGTNPASPDAGFPFVSRTGKTNDFTKIKGWRGKFHSASASRNEGGNSESSLKNRSAFCSDKLDEYLENEGKLMETSMGFSSNAPTSPVVYQLPTKSTSYVRTLDSVLKKQSTISPSTSYSLKPHSVPPVSRKAKSQNRQATFSGRTKSSYKSILPYPVSPKQKYSHVILGDKVTKNSSGIISENQANNFVVPTLDENIFPKQISLRQAQQQQQQQQGSRPPGLSKSQVKLMDLEDCALWEGKPRTYITEERADVSLTTLLTAQASLKTKPIHTIIRKRAPPCNNDFCRLGCVCSSLALEKRQPAHCRRPDCMFGCTCLKRKVVLVKGGSKTKHFQRKAAHRDPVFYDTLGEEAREEEEGIREEEEQLKEKKKRKKLEYTICETEPEQPVRHYPLWVKVEGEVDPEPVYIPTPSVIEPMKPLLLPQPEVLSPTVKGKLLTGIKSPRSYTPKPNPVIREEDKDPVYLYFESMMTCARVRVYERKKEDQRQPSSSSSPSPSFQQQTSCHSSPENHNNAKEPDSEQQPLKQLTCDLEDDSDKLQEKSWKSSCNEGESSSTSYMHQRSPGGPTKLIEIISDCNWEEDRNKILSILSQHINSNMPQSLKVGSFIIELASQRKSRGEKNPPVYSSRVKISMPSCQDQDDMAEKSGSETPDGPLSPGKMEDISPVQTDALDSVRERLHGGKGLPFYAGLSPAGKLVAYKRKPSSSTSGLIQVASNAKVAASRKPRTLLPSTSNSKMASSSGTATNRPGKNLKAFVPAKRPIAARPSPGGVFTQFVMSKVGALQQKIPGVSTPQTLAGTQKFSIRPSPVMVVTPVVSSEPVQVCSPVTAAVTTTTPQVFLENTTAVTPMTAISDVETKETTYSSGATTTGVVEVSETNTSTSVTSTQSTATVNLTKTTGITTPVASVAFPKSLVASPSTITLPVASTASTSLVVVTAAASSSMVTTPTSSLGSVPIILSGINGSPPVSQRPENAAQIPVATPQVSPNTVKRAGPRLLLIPVQQGSPTLRPVSNTQLQGHRMVLQPVRSPSGMNLFRHPNGQIVQLLPLHQLRGSNTQPNLQPVMFRNPGSVMGIRLPAPSKPSETPPSSTSSSAFSVMNPVIQAVGSSSAVNVITQAPSLLSSGASFVSQAGTLTLRISPPEPQSFASKTGSETKITYSSGGQPVGTASLIPLQSGSFALLQLPGQKPVPSSILQHVASLQMKRESQNPDQKDETNSIKREQETKKVLQSEGEAVDPEANVIKQNSGAATSEETLNDSLEDRGDHLDEECLPEEGCATVKPSEHSCITGSHTDQDYKDVNEEYGARNRKSSKEKVAVLEVRTISEKASNKTVQNLSKVQHQKLGDVKVEQQKGFDNPEENSSEFPVTFKEESKFELSGSKVMEQQSNLQPEAKEKECGDSLEKDRERWRKHLKGPLTRKCVGASQECKKEADEQLIKETKTCQENSDVFQQEQGISDLLGKSGITEDARVLKTECDSWSRISNPSAFSIVPRRAAKSSRGNGHFQGHLLLPGEQIQPKQEKKGGRSSADFTVLDLEEDDEDDNEKTDDSIDEIVDVVSDYQSEEVDDVEKNNCVEYIEDDEEHVDIETVEELSEEINVAHLKTTAAHTQSFKQPSCTHISADEKAAERSRKAPPIPLKLKPDYWSDKLQKEAEAFAYYRRTHTANERRRRGEMRDLFEKLKITLGLLHSSKVSKSLILTRAFSEIQGLTDQADKLIGQKNLLTRKRNILIRKVSSLSGKTEEVVLKKLEYIYAKQQALEAQKRKKKMGSDEFDISPRISKQQEGSSASSVDLGQMFINNRRGKPLILSRKKDQATENTSPLNTPHTSANLVMTPQGQLLTLKGPLFSGPVVAVSPDLLESDLKPQVAGSAVALPENDDLFMMPRIVNVTSLATEGGLVDMGGSKYPHEVPDSKPSDHLKDTVRNEDNSLEDKGRISSRGNRDGRVTLGPTQVFLANKDSGYPQIVDVSNMQKAQEFLPKKISGDMRGIQYKWKESESRGERVKSKDSSFHKLKMKDLKDSSIEMELRKVTSAIEEAALDSSELLTNMEDEDDTDETLTSLLNEIAFLNQQLNDDSVGLAELPSSMDTEFPGDARRAFISKVPPGSRATFQVEHLGTGLKELPDVQGESDSISPLLLHLEDDDFSENEKQLAEPASEPDVLKIVIDSEIKDSLLSNKKAIDGGKNTSGLPAEPESVSSPPTLHMKTGLENSNSTDTLWRPMPKLAPLGLKVANPSSDADGQSLKVMPCLAPIAAKVGSVGHKMNLTGNDQEGRESKVMPTLAPVVAKLGNSGASPSSAGK

SEQ ID NO: 326 - protein, 295 aa, Homo sapiens
MQPEGAEKGKSFKQRLVLKSSLAKETLSEFLGTFILIVLGCGCVAQAILSRGRFGGVITINVGFSMAVAMAIYVAGGVSGGHINPAVSLAMCLFGRMKWFKLPFYVGAQFLGAFVGAATVFGIYYDGLMSFAGGKLLIVGENATAHIFATYPAPYLSLANAFADQVVATMILLIIVFAIFDSRNLGAPRGLEPIAIGLLIIVIASSLGLNSGCAMNPARDLSPRLFTALAGWGFEVFRAGNNFWWIPVVGPLVGAVIGGLIYVLVIEIHHPEPDSVFKTEQSEDKPEKYELSVIM

SEQ ID NO: 327 - protein, 335 aa, Homo sapiens
MWATLPLLCAGAWLLGVPVCGAAELCVNSLEKFHFKSWMSKHRKTYSTEEYHHRLQTFASNWRKINAHNNGNHTFKMALNQFSDMSFAEIKHKYLWSEPQNCSATKSNYLRGTGPYPPSVDWRKKGNFVSPVKNQGACGSCWTFSTTGALESAIAIATGKMLSLAEQQLVDCAQDFNNHGCQGGLPSQAFEYILYNKGIMGEDTYPYQGKDGYCKFQPGKAIGFVKDVANITIYDEEAMVEAVALYNPVSFAFEVTQDFMMYRTGIYSSTSCHKTPDKVNHAVLAVGYGEKNGIPYWIVKNSWGPQWGMNGYFLIERGKNMCGLAACASYPIPLV

SEQ ID NO: 328 - protein, 1361 aa, Homo sapiens
MGAAGRQDFLFKAMLTISWLTLTCFPGATSTVAAGCPDQSPELQPWNPGHDQDHHVHIGQGKTLLLTSSATVYSIHISEGGKLVIKDHDEPIVLRTRHILIDNGGELHAGSALCPFQGNFTIILYGRADEGIQPDPYYGLKYIGVGKGGALELHGQKKLSWTFLNKTLHPGGMAEGGYFFERSWGHRGVIVHVIDPKSGTVIHSDRFDTYRSKKESERLVQYLNAVPDGRILSVAVNDEGSRNLDDMARKAMTKLGSKHFLHLGFRHPWSFLTVKGNPSSSVEDHIEYHGHRGSAAARVFKLFQTEHGEYFNVSLSSEWVQDVEWTEWFDHDKVSQTKGGEKISDLWKAHPGKICNRPIDIQATTMDGVNLSTEVVYKKGQDYRFACYDRGRACRSYRVRFLCGKPVRPKLTVTIDTNVNSTILNLEDNVQSWKPGDTLVIASTDYSMYQAEEFQVLPCRSCAPNQVKVAGKPMYLHIGEEIDGVDMRAEVGLLSRNIIVMGEMEDKCYPYRNHICNFFDFDTFGGHIKFALGFKAAHLEGTELKHMGQQLVGQYPIHFHLAGDVDERGGYDPPTYIRDLSIHHTFSRCVTVHGSNGLLIKDVVGYNSLGHCFFTEDGPEERNTFDHCLGLLVKSGTLLPSDRDSKMCKMITEDSYPGYIPKPRQDCNAVSTFWMANPNNNLINCAAAGSEETGFWFIFHHVPTGPSVGMYSPGYSEHIPLGKFYNNRAHSNYRAGMIIDNGVKTTEASAKDKRPFLSIISARYSPHQDADPLKPREPAIIRHFIAYKNQDHGAWLRGGDVWLDSCRFADNGIGLTLASGGTFPYDDGSKQEIKNSLFVGESGNVGTEMMDNRIWGPGGLDHSGRTLPIGQNFPIRGIQLYDGPINIQNCTFRKFVALEGRHTSALAFRLNNAWQSCPHNNVTGIAFEDVPITSRVFFGEPGPWFNQLDMDGDKTSVFHDVDGSVSEYPGSYLTKNDNWLVRHPDCINVPDWRGAICSGCYAQMYIQAYKTSNLRMKIIKNDFPSHPLYLEGALTRSTHYQQYQPVVTLQKGYTIHWDQTAPAELAIWLINFNKGDWIRVGLCYPRGTTFSILSDVHNRLLKQTSKTGVFVRTLQMDKVEQSYPGRSHYYWDEDSGLLFLKLKAQNEREKFAFCSMKGCERIKIKALIPKNAGVSDCTATAYPKFTERAVVDVPMPKKLFGSQLKTKDHFLEVKMESSKQHFFHLWNDFAYIEVDGKKYPSSEDGIQVVVIDGNQGRVVSHTSFRNSILQGIPWQLFNYVATIPDNSIVLMASKGRYVSRGPWTRVLEKLGADRGLKLKEQMAFVGFKGSFRPIWVTLDTEDHKAKIFQVVPIPVVKKKKL

SEQ ID NO: 329 - protein, 638 aa, Homo sapiens
MAQGLEVALTDLQSSRNNVRHHTEEITVDHLLVRRGQAFNLTLYFRNRSFQPGLDNIIFVVETEDAVYLDSEPQRQEYVMNDYGFIYQGSKNWIRPCPWNYGQFEDKIIDICLKLLDKSLHFQTDPATDCALRGSPVYVSRVVCAMINSNDDNGVLNGNWSENYTDGANPAEWTGSVAILKQWNATGCQPVRYGQCWVFAAVMCTVMRCLGIPTRVITNFDSGHDTDGNLIIDEYYDNTGRILGNKKKDTIWNFHVWNECWMARKDLPPAYGGWQVLDATPQEMSNGVYCCGPASVRAIKEGEVDLNYDTPFVFSMVNADCMSWLVQGGKEQKLHQDTSSVGNFISTKSIQSDERDDITENYKYEEGSLQERQVFLKALQKLKARSFHGSQRGAELQPSRPTSLSQDSPRSLHTPSLRPSDVVQVSLKFKLLDPPNMGQDICFVLLALNMSSQFKDLKVNLSAQSLLHDGSPLSPFWQDTAFITLSPKEAKTYPCKISYSQYSQYLSTDKLIRISALGEEKSSPEKILVNKIITLSYPSITINVLGAAVVNQPLSIQVIFSNPLSEQVEDCVLTVEGSGLFKKQQKVFLGVLKPQHQASIILETVPFKSGQRQIQANMRSNKFKDIKGYRNVYVDFAL

SEQ ID NO: 330 - protein, 720 aa, Homo sapiens
MAQGLEVALTDLQSSRNNVRHHTEEITVDHLLVRRGQAFNLTLYFRNRSFQPGLDNIIFVVETGPLPDLALGTRAVFSLARHHSPSPWIAWLETNGATSTEVSLCAPPTAAVGRYLLKIHIDSFQGSVTAYQLGEFILLFNPWCPEDAVYLDSEPQRQEYVMNDYGFIYQGSKNWIRPCPWNYGQFEDKIIDICLKLLDKSLHFQTDPATDCALRGSPVYVSRVVCAMINSNDDNGVLNGNWSENYTDGANPAEWTGSVAILKQWNATGCQPVRYGQCWVFAAVMCTVMRCLGIPTRVITNFDSGHDTDGNLIIDEYYDNTGRILGNKKKDTIWNFHVWNECWMARKDLPPAYGGWQVLDATPQEMSNGVYCCGPASVRAIKEGEVDLNYDTPFVFSMVNADCMSWLVQGGKEQKLHQDTSSVGNFISTKSIQSDERDDITENYKYEEGSLQERQVFLKALQKLKARSFHGSQRGAELQPSRPTSLSQDSPRSLHTPSLRPSDVVQVSLKFKLLDPPNMGQDICFVLLALNMSSQFKDLKVNLSAQSLLHDGSPLSPFWQDTAFITLSPKEAKTYPCKISYSQYSQYLSTDKLIRISALGEEKSSPEKILVNKIITLSYPSITINVLGAAVVNQPLSIQVIFSNPLSEQVEDCVLTVEGSGLFKKQQKVFLGVLKPQHQASIILETVPFKSGQRQIQANMRSNKFKDIKGYRNVYVDFAL

SEQ ID NO: 331 - protein, 468 aa, Homo sapiens
MGFLGTGTWILVLVLPIQAFPKPGGSQDKSLHNRELSAERPLNEQIAEAEEDKIKKTYPPENKPGQSNYSFVDNLNLLKAITEKEKIEKERQSIRSSPLDNKLNVEDVDSTKNRKLIDDYDSTKSGLDHKFQDDPDGLHQLDGTPLTAEDIVHKIAARIYEENDRAVFDKIVSKLLNLGLITESQAHTLEDEVAEVLQKLISKEANNYEEDPNKPTSWTENQAGKIPEKVTPMAAIQDGLAKGENDETVSNTLTLTNGLERRTKTYSEDNFEELQYFPNFYALLKSIDSEKEAKEKETLITIMKTLIDFVKMMVKYGTISPEEGVSYLENLDEMIALQTKNKLEKNATDNISKLFPAPSEKSHEETDSTKEEAAKMEKEYGSLKDSTKDDNSNPGGKTDEPKGKTEAYLEAIRKNIEWLKKHDKKGNKEDYDLSKMRDFINKQADAYVEKGILDKEEAEAIKRIYSSL

SEQ ID NO: 332 - protein, 973 aa, Homo sapiens
MASILDEYENSLSRSAVLQPGCPSVGIPHSGYVNAQLEKEVPIFTKQRIDFTPSERITSLVVSSNQLCMSLGKDTLLRIDLGKANEPNHVELGRKDDAKVHKMFLDHTGSHLLIALSSTEVLYVNRNGQKVRPLARWKGQLVESVGWNKALGTESSTGPILVGTAQGHIFEAELSASEGGLFGPAPDLYFRPLYVLNEEGGPAPVCSLEAERGPDGRSFVIATTRQRLFQFIGRAAEGAEAQGFSGLFAAYTDHPPPFREFPSNLGYSELAFYTPKLRSAPRAFAWMMGDGVLYGALDCGRPDSLLSEERVWEYPEGVGPGASPPLAIVLTQFHFLLLLADRVEAVCTLTGQVVLRDHFLEKFGPLKHMVKDSSTGQLWAYTERAVFRYHVQREARDVWRTYLDMNRFDLAKEYCRERPDCLDTVLAREADFCFRQRRYLESARCYALTQSYFEEIALKFLEARQEEALAEFLQRKLASLKPAERTQATLLTTWLTELYLSRLGALQGDPEALTLYRETKECFRTFLSSPRHKEWLFASRASIHELLASHGDTEHMVYFAVIMQDYERVVAYHCQHEAYEEALAVLARHRDPQLFYKFSPILIRHIPRQLVDAWIEMGSRLDARQLIPALVNYSQGGEVQQVSQAIRYMEFCVNVLGETEQAIHNYLLSLYARGRPDSLLAYLEQAGASPHRVHYDLKYALRLCAEHGHHRACVHVYKVLELYEEAVDLALQVDVDLAKQCADLPEEDEELRKKLWLKIARHVVQEEEDVQTAMACLASCPLLKIEDVLPFFPDFVTIDHFKEAICSSLKAYNHHIQELQREMEEATASAQRIRRDLQELRGRYGTVEPQDKCATCDFPLLNRPFYLFLCGHMFHADCLLQAVRPGLPAYKQARLEELQRKLGAAPPPAKGSARAKEAEGGAATAGPSREQLKADLDELVAAECVYCGELMIRSIDRPFIDPQRYEEEQLSWL

SEQ ID NO: 333 - protein, 919 aa, Homo sapiens
MTGYTMLRNGGAGNGGQTCMLRWSNRIRLTWLSFTLFVILVFFPLIAHYYLTTLDEADEAGKRIFGPRVGNELCEVKHVLDLCRIRESVSEELLQLEAKRQELNSEIAKLNLKIEACKKSIENAKQDLLQLKNVISQTEHSYKELMAQNQPKLSLPIRLLPEKDDAGLPPPKATRGCRLHNCFDYSRCPLTSGFPVYVYDSDQFVFGSYLDPLVKQAFQATARANVYVTENADIACLYVILVGEMQEPVVLRPAELEKQLYSLPHWRTDGHNHVIINLSRKSDTQNLLYNVSTGRAMVAQSTFYTVQYRPGFDLVVSPLVHAMSEPNFMEIPPQVPVKRKYLFTFQGEKIESLRSSLQEARSFEEEMEGDPPADYDDRIIATLKAVQDSKLDQVLVEFTCKNQPKPSLPTEWALCGEREDRLELLKLSTFALIITPGDPRLVISSGCATRLFEALEVGAVPVVLGEQVQLPYQDMLQWNEAALVVPKPRVTEVHFLLRSLSDSDLLAMRRQGRFLWETYFSTADSIFNTVLAMIRTRIQIPAAPIREEAAAEIPHRSGKAAGTDPNMADNGDLDLGPVETEPPYASPRYLRNFTLTVTDFYRSWNCAPGPFHLFPHTPFDPVLPSEAKFLGSGTGFRPIGGGAGGSGKEFQAALGGNVPREQFTVVMLTYEREEVLMNSLERLNGLPYLNKVVVVWNSPKLPSEDLLWPDIGVPIMVVRTEKNSLNNRFLPWNEIETEAILSIDDDAHLRHDEIMFGFRVWREARDRIVGFPGRYHAWDIPHQSWLYNSNYSCELSMVLTGAAFFHKYYAYLYSYVMPQAIRDMVDEYINCEDIAMNFLVSHITRKPPIKVTSRWTFRCPGCPQALSHDDSHFHERHKCINFFVKVYGYMPLLYTQFRVDSVLFKTRLPHDKTKCFKFI

SEQ ID NO: 334 - protein, 859 aa, Homo sapiens
MYSGAGPALAPPAPPPPIQGYAFKPPPRPDFGTSGRTIKLQANFFEMDIPKIDIYHYELDIKPEKCPRRVNREIVEHMVQHFKTQIFGDRKPVFDGRKNLYTAMPLPIGRDKVELEVTLPGEGKDRIFKVSIKWVSCVSLQALHDALSGRLPSVPFETIQALDVVMRHLPSMRYTPVGRSFFTASEGCSNPLGGGREVWFGFHQSVRPSLWKMMLNIDVSATAFYKAQPVIEFVCEVLDFKSIEEQQKPLTDSQRVKFTKEIKGLKVEITHCGQMKRKYRVCNVTRRPASHQTFPLQQESGQTVECTVAQYFKDRHKLVLRYPHLPCLQVGQEQKHTYLPLEVCNIVAGQRCIKKLTDNQTSTMIRATARSAPDRQEEISKLMRSASFNTDPYVREFGIMVKDEMTDVTGRVLQPPSILYGGRNKAIATPVQGVWDMRNKQFHTGIEIKVWAIACFAPQRQCTEVHLKSFTEQLRKISRDAGMPIQGQPCFCKYAQGADSVEPMFRHLKNTYAGLQLVVVILPGKTPVYAEVKRVGDTVLGMATQCVQMKNVQRTTPQTLSNLCLKINVKLGGVNNILLPQGRPPVFQQPVIFLGADVTHPPAGDGKKPSIAAVVGSMDAHPNRYCATVRVQQHRQEIIQDLAAMVRELLIQFYKSTRFKPTRIIFYRDGVSEGQFQQVLHHELLAIREACIKLEKDYQPGITFIVVQKRHHTRLFCTDKNERVGKSGNIPAGTTVDTKITHPTEFDFYLCSHAGIQGTSRPSHYHVLWDDNRFSSDELQILTYQLCHTYVRCTRSVSIPAPAYYAHLVAFRARYHLVDKEHDSAEGSHTSGQSNGRDHQALAKAVQVHQDTLRTMYFA

SEQ ID NO: 335 - protein, 432 aa, Homo sapiens
MGPAGSLLGSGQMQITLWGSLAAVAIFFVITFLIFLCSSCDREKKPRQHSGDHENLMNVPSDKEMFSRSVTSLATDAPASSEQNGALTNGDILSEDSTLTCMQHYEEVQTSASDLLDSQDSTGKPKCHQSRELPRIPPESAVDTMLTARSVDGDQGLGMEGPYEVLKDSSSQENMVEDCLYETVKEIKEVAAAAHLEKGHSGKAKSTSASKELPGPQTEGKAEFAEYASVDRNKKCRQSVNVESILGNSCDPEEEAPPPVPVKLLDENENLQEKEGGEAEESATDTTSETNKRFSSLSYKSREEDPTLTEEEISAMYSSVNKPGQLVNKSGQSLTVPESTYTSIQGDPQRSPSSCNDLYATVKDFEKTPNSTLPPAGRPSEEPEPDYEAIQTLNREEEKATLGTNGHHGLVPKENDYESISDLQQGRDITRL

SEQ ID NO: 336 - protein, 2768 aa, Homo sapiens
MALVLEIFTLLASICWVSANIFEYQVDAQPLRPCELQRETAFLKQADYVPQCAEDGSFQTVQCQNDGRSCWCVGANGSEVLGSRQPGRPVACLSFCQLQKQQILLSGYINSTDTSYLPQCQDSGDYAPVQCDVQQVQCWCVDAEGMEVYGTRQLGRPKRCPRSCEIRNRRLLHGVGDKSPPQCSAEGEFMPVQCKFVNTTDMMIFDLVHSYNRFPDAFVTFSSFQRRFPEVSGYCHCADSQGRELAETGLELLLDEIYDTIFAGLDLPSTFTETTLYRILQRRFLAVQSVISGRFRCPTKCEVERFTATSFGHPYVPSCRRNGDYQAVQCQTEGPCWCVDAQGKEMHGTRQQGEPPSCAEGQSCASERQQALSRLYFGTSGYFSQHDLFSSPEKRWASPRVARFATSCPPTIKELFVDSGLLRPMVEGQSQQFSVSENLLKEAIRAIFPSRGLARLALQFTTNPKRLQQNLFGGKFLVNVGQFNLSGALGTRGTFNFSQFFQQLGLASFLNGGRQEDLAKPLSVGLDSNSSTGTPEAAKKDGTMNKPTVGSFGFEINLQENQNALKFLASLLELPEFLLFLQHAISVPEDVARDLGDVMETVLSSQTCEQTPERLFVPSCTTEGSYEDVQCFSGECWCVNSWGKELPGSRVRGGQPRCPTDCEKQRARMQSLMGSQPAGSTLFVPACTSEGHFLPVQCFNSECYCVDAEGQAIPGTRSAIGKPKKCPTPCQLQSEQAFLRTVQALLSNSSMLPTLSDTYIPQCSTDGQWRQVQCNGPPEQVFELYQRWEAQNKGQDLTPAKLLVKIMSYREAASGNFSLFIQSLYEAGQQDVFPVLSQYPSLQDVPLAALEGKRPQPRENILLEPYLFWQILNGQLSQYPGSYSDFSTPLAHFDLRNCWCVDEAGQELEGMRSEPSKLPTCPGSCEEAKLRVLQFIRETEEIVSASNSSRFPLGESFLVAKGIRLRNEDLGLPPLFPPREAFAEQFLRGSDYAIRLAAQSTLSFYQRRRFSPDDSAGASALLRSGPYMPQCDAFGSWEPVQCHAGTGHCWCVDEKGGFIPGSLTARSLQIPQCPTTCEKSRTSGLLSSWKQARSQENPSPKDLFVPACLETGEYARLQASGAGTWCVDPASGEELRPGSSSSAQCPSLCNVLKSGVLSRRVSPGYVPACRAEDGGFSPVQCDQAQGSCWCVMDSGEEVPGTRVTGGQPACESPRCPLPFNASEVVGGTILCETISGPTGSAMQQCQLLCRQGSWSVFPPGPLICSLESGRWESQLPQPRACQRPQLWQTIQTQGHFQLQLPPGKMCSADYADLLQTFQVFILDELTARGFCQIQVKTFGTLVSIPVCNNSSVQVGCLTRERLGVNVTWKSRLEDIPVASLPDLHDIERALVGKDLLGRFTDLIQSGSFQLHLDSKTFPAETIRFLQGDHFGTSPRTWFGCSEGFYQVLTSEASQDGLGCVKCPEGSYSQDEECIPCPVGFYQEQAGSLACVPCPVGRTTISAGAFSQTHCVTDCQRNEAGLQCDQNGQYRASQKDRGSGKAFCVDGEGRRLPWWETEAPLEDSQCLMMQKFEKVPESKVIFDANAPVAVRSKVPDSEFPVMQCLTDCTEDEACSFFTVSTTEPEISCDFYAWTSDNVACMTSDQKRDALGNSKATSFGSLRCQVKVRSHGQDSPAVYLKKGQGSTTTLQKRFEPTGFQNMLSGLYNPIVFSASGANLTDAHLFCLLACDRDLCCDGFVLTQVQGGAIICGLLSSPSVLLCNVKDWMDPSEAWANATCPGVTYDQESHQVILRLGDQEFIKSLTPLEGTQDTFTNFQQVYLWKDSDMGSRPESMGCRKDTVPRPASPTEAGLTTELFSPVDLNQVIVNGNQSLSSQKHWLFKHLFSAQQANLWCLSRCVQEHSFCQLAEITESASLYFTCTLYPEAQVCDDIMESNAQGCRLILPQMPKALFRKKVILEDKVKNFYTRLPFQKLMGISIRNKVPMSEKSISNGFFECERRCDADPCCTGFGFLNVSQLKGGEVTCLTLNSLGIQMCSEENGGAWRILDCGSPDIEVHTYPFGWYQKPIAQNNAPSFCPLVVLPSLTEKVSLDSWQSLALSSVVVDPSIRHFDVAHVSTAATSNFSAVRDLCLSECSQHEACLITTLQTQPGAVRCMFYADTQSCTHSLQGQNCRLLLREEATHIYRKPGISLLSYEASVPSVPISTHGRLLGRSQAIQVGTSWKQVDQFLGVPYAAPPLAERRFQAPEPLNWTGSWDASKPRASCWQPGTRTSTSPGVSEDCLYLNVFIPQNVAPNASVLVFFHNTMDREESEGWPAIDGSFLAAVGNLIVVTASYRVGVFGFLSSGSGEVSGNWGLLDQVAALTWVQTHIRGFGGDPRRVSLAADRGGADVASIHLLTARATNSQLFRRAVLMGGSALSPAAVISHERAQQQAIALAKEVSCPMSSSQEVVSCLRQKPANVLNDAQTKLLAVSGPFHYWGPVIDGHFLREPPARALKRSLWVEVDLLIGSSQDDGLINRAKAVKQFEESRGRTSSKTAFYQALQNSLGGEDSDARVEAAATWYYSLEHSTDDYASFSRALENATRDYFIICPIIDMASAWAKRARGNVFMYHAPENYGHGSLELLADVQFALGLPFYPAYEGQFSLEEKSLSLKIMQYFSHFIRSGNPNYPYEFSRKVPTFATPWPDFVPRAGGENYKEFSELLPNRQGLKKADCSFWSKYISSLKTSADGAKGGQSAESEEEELTAGSGLREDLLSLQEPGSKTYSK

SEQ ID NO: 337 - protein, 419 aa, Homo sapiens
MPGRGRCPDCGSTELVEDSHYSQSQLVCSDCGCVVTEGVLTTTFSDEGNLREVTYSRSTGENEQVSRSQQRGLRRVRDLCRVLQLPPTFEDTAVAYYQQAYRHSGIRAARLQKKEVLVGCCVLITCRQHNWPLTMGAICTLLYADLDVFSSTYMQIVKLLGLDVPSLCLAELVKTYCSSFKLFQASPSVPAKYVEDKEKMLSRTMQLVELANETWLVTGRHPLPVITAATFLAWQSLQPADRLSCSLARFCKLANVDLPYPASSRLQELLAVLLRMAEQLAWLRVLRLDKRSVVKHIGDLLQHRQSLVRSAFRDGTAEVETREKEPPGWGQGQGEGEVGNNSLGLPQGKRPASPALLLPPCMLKSPKRICPVPPVSTVTGDENISDSEIEQYLRTPQEVRDFQRAQAARQAATSVPNPP

SEQ ID NO: 338 - protein, 2156 aa, Homo sapiens
MSDTPSTGFSIIHPTSSEGQVPPPRHLSLTHPVVAKRISFYKSGDPQFGGVRVVVNPRSFKSFDALLDNLSRKVPLPFGVRNISTPRGRHSITRLEELEDGESYLCSHGRKVQPVDLDKARRRPRPWLSSRAISAHSPPHPVAVAAPGMPRPPRSLVVFRNGDPKTRRAVLLSRRVTQSFEAFLQHLTEVMQRPVVKLYATDGRRVPSLQAVILSSGAVVAAGREPFKPGNYDIQKYLLPARLPGISQRVYPKGNAKSESRKISTHMSSSSRSQIYSVSSEKTHNNDCYLDYSFVPEKYLALEKNDSQNLPIYPSEDDIEKSIIFNQDGTMTVEMKVRFRIKEEETIKWTTTVSKTGPSNNDEKSEMSFPGRTESRSSGLKLAACSFSADVSPMERSSNQEGSLAEEINIQMTDQVAETCSSASWENATVDTDIIQGTQDQAKHRFYRPPTPGLRRVRQKKSVIGSVTLVSETEVQEKMIGQFSYSEERESGENKSEYHMFTHSCSKMSSVSNKPVLVQINNNDQMEESSLERKKENSLLKSSAISAGVIEITSQKMLEMSHNNGLPSTISNNSIVEEDVVDCVVLDNKTGIKNFKTYGNTNDRFSPISADATHFSSNNSGTDKNISEAPASEASSTVTARIDRLINEFAQCGLTKLPKNEKKILSSVASKKKKKSRQQAINSRYQDGQLATKGILNKNERINTKGRITKEMIVQDSDSPLKGGILCEEDLQKSDTVIESNTFCSKSNLNSTISKNFHRNKLNTTQNSKVQGLLTKRKSRSLNKISLGAPKKREIGQRDKVFPHNESKYCKSTFENKSLFHVFNILEQKPKDFYAPQSQAEVASGYLRGMAKKSLVSKVTDSHITLKSQKKRKGDKVKASAILSKQHATTRANSLASLKKPDFPEAIAHHSIQNYIQSWLQNINPYPTLKPIKSAPVCRNETSVVNCSNNSFSGNDPHTNSGKISNFVMESNKHITKIAGLTGDNLCKEGDKSFIANDTGEEDLHETQVGSLNDAYLVPLHEHCTLSQSAINDHNTKSHIAAEKSGPEKKLVYQEINLARKRQSVEAAIQVDPIEEETPKDLLPVLMLHQLQASVPGIHKTQNGVVQMPGSLAGVPFHSAICNSSTNLLLAWLLVLNLKGSMNSFCQVDAHKATNKSSETLALLEILKHIAITEEADDLKAAVANLVESTTSHFGLSEKEQDMVPIDLSANCSTVNIQSVPKCSENERTQGISSLDGGCSASEACAPEVCVLEVTCSPCEMCTVNKAYSPKETCNPSDTFFPSDGYGVDQTSMNKACFLGEVCSLTDTVFSDKACAQKENHTYEGACPIDETYVPVNVCNTIDFLNSKENTYTDNLDSTEELERGDDIQKDLNILTDPEYKNGFNTLVSHQNVSNLSSCGLCLSEKEAELDKKHSSLDDFENCSLRKFQDENAYTSFDMEEPRTSEEPGSITNSMTSSERNISELESFEELENHDTDIFNTVVNGGEQATEELIQEEVEASKTLELIDISSKNIMEEKRMNGIIYEIISKRLATPPSLDFCYDSKQNSEKETNEGETKMVKMMVKTMETGSYSESSPDLKKCIKSPVTSDWSDYRPDSDSEQPYKTSSDDPNDSGELTQEKEYNIGFVKRAIEKLYGKADIIKPSFFPGSTRKSQVCPYNSVEFQCSRKASLYDSEGQSFGSSEQVSSSSSMLQEFQEERQDKCDVSAVRDNYCRGDIVEPGTKQNDDSRILTDIEEGVLIDKGKWLLKENHLLRMSSENPGMCGNADTTSVDTLLDNNSSEVPYSHFGNLAPGPTMDELSSSELEELTQPLELKCNYFNMPHGSDSEPFHEDLLDVRNETCAKERIANHHTEEKGSHQSERVCTSVTHSFISAGNKVYPVSDDAIKNQPLPGSNMIHGTLQEADSLDKLYALCGQHCPILTVIIQPMNEEDRGFAYRKESDIENFLGFYLWMKIHPYLLQTDKNVFREENNKASMRQNLIDNAIGDIFDQFYFSNTFDLMGKRRKQKRINFLGLEEEGNLKKFQPDLKERFCMNFLHTSLLVVGNVDSNTQDLSGQTNEIFKAVDENNNLLNNRFQGSRTNLNQVVRENINCHYFFEMLGQACLLDICQVETSLNISNRNILELCMFEGENLFIWEEEDILNLTDLESSREQEDL

SEQ ID NO: 339 - protein, 472 aa, Homo sapiens
MKFLIFAFFGGVHLLSLCSGKAICKNGISKRTFEEIKEEIASCGDVAKAIINLAVYGKAQNRSYERLALLVDTVGPRLSGSKNLEKAIQIMYQNLQQDGLEKVHLEPVRIPHWERGEESAVMLEPRIHKIAILGLGSSIGTPPEGITAEVLVVTSFDELQRRASEARGKIVVYNQPYINYSRTVQYRTQGAVEAAKVGALASLIRSVASFSIYSPHTGIQEYQDGVPKIPTACITVEDAEMMSRMASHGIKIVIQLKMGAKTYPDTDSFNTVAEITGSKYPEQVVLVSGHLDSWDVGQGAMDDGGGAFISWEALSLIKDLGLRPKRTLRLVLWTAEEQGGVGAFQYYQLHKVNISNYSLVMESDAGTFLPTGLQFTGSEKARAIMEEVMSLLQPLNITQVLSHGEGTDINFWIQAGVPGASLLDDLYKYFFFHHSHGDTMTVMDPKQMNVAAAVWAVVSYVVADMEEMLPRS

SEQ ID NO: 340 - protein, 562 aa, Homo sapiens
MDAMKRGLCCVLLLCGAVFVSPSQEIHARFRRGARSYQVICRDEKTQMIYQQHQSWLRPVLRSNRVEYCWCNSGRAQCHSVPVKSCSEPRCFNGGTCQQALYFSDFVCQCPEGFAGKCCEIDTRATCYEDQGISYRGTWSTAESGAECTNWNSSALAQKPYSGRRPDAIRLGLGNHNYCRNPDRDSKPWCYVFKAGKYSSEFCSTPACSEGNSDCYFGNGSAYRGTHSLTESGASCLPWNSMILIGKVYTAQNPSAQALGLGKHNYCRNPDGDAKPWCHVLKNRRLTWEYCDVPSCSTCGLRQYSQPQFRIKGGLFADIASHPWQAAIFAKHRRSPGERFLCGGILISSCWILSAAHCFQERFPPHHLTVILGRTYRVVPGEEEQKFEVEKYIVHKEFDDDTYDNDIALLQLKSDSSRCAQESSVVRTVCLPPADLQLPDWTECELSGYGKHEALSPFYSERLKEAHVRLYPSSRCTSQHLLNRTVTDNMLCAGDTRSGGPQANLHDACQGDSGGPLVCLNDGRMTLVGIISWGLGCGQKDVPGVYTKVTNYLDWIRDNMRP

SEQ ID NO: 341 - protein, 224 aa, Homo sapiens
MVAAVLLGLSWLCSPLGALVLDFNNIRSSADLHGARKGSQCLSDTDCNTRKFCLQPRDEKPFCATCRGLRRRCQRDAMCCPGTLCVNDVCTTMEDATPILERQLDEQDGTHAEGTTGHPVQENQPKRKPSIKKSQGRKGQEGESCLRTFDCGPGLCCARHFWTKICKPVLLEGQVCSRRGHKDTAQAPEIFQRCDCGPGLLCRSQLTSNRQHARLRVCQKIEKL

SEQ ID NO: 342 - protein, 991 aa, Homo sapiens
MSKKPPNRPGITFEIGARLEALDYLQKWYPSRIEKIDYEEGKMLVHFERWSHRYDEWIYWDSNRLRPLERPALRKEGLKDEEDFFDFKAGEEVLARWTDCRYYPAKIEAINKEGTFTVQFYDGVIRCLKRMHIKAMPEDAKGQDWIALVKAAAAAAAKNKTGSKPRTSANSNKDKDKDERKWFKVPSKKEETSTCIATPDVEKKEDLPTSSETFGLHVENVPKMVFPQPESTLSNKRKNNQGNSFQAKRARLNKITGLLASKAVGVDGAEKKEDYNETAPMLEQAISPKPQSQKKNEADISSSANTQKPALLSSTLSSGKARSKKCKHESGDSSGCIKPPKSPLSPELIQVEDLTLVSQLSSSVINKTSPPQPVNPPRPFKHSERRRRSQRLATLPMPDDSVEKVSSPSPATDGKVFSISSQNQQESSVPEVPDVAHLPLEKLGPCLPLDLSRGSEVTAPVASDSSYRNECPRAEKEDTQMLPNPSSKAIADGRGAPAAAGISKTEKKVKLEDKSSTAFGKRKEKDKERREKRDKDHYRPKQKKKKKKKKKSKQHDYSDYEDSSLEFLERCSSPLTRSSGSSLASRSMFTEKTTTYQYPRAILSVDLSGENLSDVDFLDDSSTESLLLSGDEYNQDFDSTNFEESQDEDDALNEIVRCICEMDEENGFMIQCEECLCWQHSVCMGLLEESIPEQYICYICRDPPGQRWSAKYRYDKEWLNNGRMCGLSFFKENYSHLNAKKIVSTHHLLADVYGVTEVLHGLQLKIGILKNKHHPDLHLWACSGKRKDQDQIIAGVEKKIAQDTVNREEKKYVQNHKEPPRLPLKMEGTYITSEHSYQKPQSFGQDCKSLADPGSSDDDDVSSLEEEQEFHMRSKNSLQYSAKEHGMPEKNPAEGNTVFVYNDKKGTEDPGDSHLQWQLNLLTHIENVQNEVTSRMDLIEKEVDVLESWLDFTGELEPPDPLARLPQLKRHIKQLLIDMGKVQQIATLCSV

SEQ ID NO: 343 - protein, 1281 aa, Homo sapiens
MVRKKNPPLRNVASEGEGQILEPIGTESKVSGKNKEFSADQMSENTDQSDAAELNHKEEHSLHVQDPSSSSKKDLKSAVLSEKAGFNYESPSKGGNFPSFPHDEVTDRNMLAFSSPAAGGVCEPLKSPQRAEADDPQDMACTPSGDSLETKEDQKMSPKATEETGQAQSGQANCQGLSPVSVASKNPQVPSDGGVRLNKSKTDLLVNDNPDPAPLSPELQDFKCNICGYGYYGNDPTDLIKHFRKYHLGLHNRTRQDAELDSKILALHNMVQFSHSKDFQKVNRSVFSGVLQDINSSRPVLLNGTYDVQVTSGGTFIGIGRKTPDCQGNTKYFRCKFCNFTYMGNSSTELEQHFLQTHPNKIKASLPSSEVAKPSEKNSNKSIPALQSSDSGDLGKWQDKITVKAGDDTPVGYSVPIKPLDSSRQNGTEATSYYWCKFCSFSCESSSSLKLLEHYGKQHGAVQSGGLNPELNDKLSRGSVINQNDLAKSSEGETMTKTDKSSSGAKKKDFSSKGAEDNMVTSYNCQFCDFRYSKSHGPDVIVVGPLLRHYQQLHNIHKCTIKHCPFCPRGLCSPEKHLGEITYPFACRKSNCSHCALLLLHLSPGAAGSSRVKHQCHQCSFTTPDVDVLLFHYESVHESQASDVKQEANHLQGSDGQQSVKESKEHSCTKCDFITQVEEEISRHYRRAHSCYKCRQCSFTAADTQSLLEHFNTVHCQEQDITTANGEEDGHAISTIKEEPKIDFRVYNLLTPDSKMGEPVSESVVKREKLEEKDGLKEKVWTESSSDDLRNVTWRGADILRGSPSYTQASLGLLTPVSGTQEQTKTLRDSPNVEAAHLARPIYGLAVETKGFLQGAPAGGEKSGALPQQYPASGENKSKDESQSLLRRRRGSGVFCANCLTTKTSLWRKNANGGYVCNACGLYQKLHSTPRPLNIIKQNNGEQIIRRRTRKRLNPEALQAEQLNKQQRGSNEEQVNGSPLERRSEDHLTESHQREIPLPSLSKYEAQGSLTKSHSAQQPVLVSQTLDIHKRMQPLHIQIKSPQESTGDPGNSSSVSEGKGSSERGSPIEKYMRPAKHPNYSPPGSPIEKYQYPLFGLPFVHNDFQSEADWLRFWSKYKLSVPGNPHYLSHVPGLPNPCQNYVPYPTFNLPPHFSAVGSDNDIPLDLAIKHSRPGPTANGASKEKTKAPPNVKNEGPLNVVKTEKVDRSTQDELSTKCVHCGIVFLDEVMYALHMSCHGDSGPFQCSICQHLCTDKYDFTTHIQRGLHRNNAQVEKNGKPKE

SEQ ID NO: 344 - protein, 158 aa, Homo sapiens
MLLFALLLAMELPLVAASATMRAQWTYSLRCHDCAVINDFNCPNIRVCPYHIRRCMTISIRINSRELLVYKNCTNNCTFVYAAEQPPEAPGKIFKTNSFYWVCCCNSMVCNAGGPTNLERDMLPDEVTEEELPEGTVRLGVSKLLLSFASIIVSNILP

SEQ ID NO: 345 - protein, 2798 aa, Homo sapiens
MTSIHFVVHPLPGTEDQLNDRLREVSEKLNKYNLNSHPPLNVLEQATIKQCVVGPNHAAFLLEDGRVCRIGFSVQPDRLELGKPDNNDGSKLNSNSGAGRTSRPGRTSDSPWFLSGSETLGRLAGNTLGSRWSSGVGGSGGGSSGRSSAGARDSRRQTRVIRTGRDRGSGLLGSQPQPVIPASVIPEELISQAQVVLQGKSRSVIIRELQRTNLDVNLAVNNLLSRDDEDGDDGDDTASESYLPGEDLMSLLDADIHSAHPSVIIDADAMFSEDISYFGYPSFRRSSLSRLGSSRVLLLPLERDSELLRERESVLRLRERRWLDGASFDNERGSTSKEGEPNLDKKNTPVQSPVSLGEDLQWWPDKDGTKFICIGALYSELLAVSSKGELYQWKWSESEPYRNAQNPSLHHPRATFLGLTNEKIVLLSANSIRATVATENNKVATWVDETLSSVASKLEHTAQTYSELQGERIVSLHCCALYTCAQLENSLYWWGVVPFSQRKKMLEKARAKNKKPKSSAGISSMPNITVGTQVCLRNNPLYHAGAVAFSISAGIPKVGVLMESVWNMNDSCRFQLRSPESLKNMEKASKTTEAKPESKQEPVKTEMGPPPSPASTCSDASSIASSASMPYKRRRSTPAPKEEEKVNEEQWSLREVVFVEDVKNVPVGKVLKVDGAYVAVKFPGTSSNTNCQNSSGPDADPSSLLQDCRLLRIDELQVVKTGGTPKVPDCFQRTPKKLCIPEKTEILAVNVDSKGVHAVLKTGNWVRYCIFDLATGKAEQENNFPTSSIAFLGQNERNVAIFTAGQESPIILRDGNGTIYPMAKDCMGGIRDPDWLDLPPISSLGMGVHSLINLPANSTIKKKAAVIIMAVEKQTLMQHILRCDYEACRQYLMNLEQAVVLEQNLQMLQTFISHRCDGNRNILHACVSVCFPTSNKETKEEEEAERSERNTFAERLSAVEAIANAISVVSSNGPGNRAGSSSSRSLRLREMMRRSLRAAGLGRHEAGASSSDHQDPVSPPIAPPSWVPDPPAMDPDGDIDFILAPAVGSLTTAATGTGQGPSTSTIPGPSTEPSVVESKDRKANAHFILKLLCDSVVLQPYLRELLSAKDARGMTPFMSAVSGRAYPAAITILETAQKIAKAEISSSEKEEDVFMGMVCPSGTNPDDSPLYVLCCNDTCSFTWTGAEHINQDIFECRTCGLLESLCCCTECARVCHKGHDCKLKRTSPTAYCDCWEKCKCKTLIAGQKSARLDLLYRLLTATNLVTLPNSRGEHLLLFLVQTVARQTVEHCQYRPPRIREDRNRKTASPEDSDMPDHDLEPPRFAQLALERVLQDWNALKSMIMFGSQENKDPLSASSRIGHLLPEEQVYLNQQSGTIRLDCFTHCLIVKCTADILLLDTLLGTLVKELQNKYTPGRREEAIAVTMRFLRSVARVFVILSVEMASSKKKNNFIPQPIGKCKRVFQALLPYAVEELCNVAESLIVPVRMGIARPTAPFTLASTSIDAMQGSEELFSVEPLPPRPSSDQSSSSSQSQSSYIIRNPQQRRISQSQPVRGRDEEQDDIVSADVEEVEVVEGVAGEEDHHDEQEEHGEENAEAEGQHDEHDEDGSDMELDLLAAAETESDSESNHSNQDNASGRRSVVTAATAGSEAGASSVPAFFSEDDSQSNDSSDSDSSSSQSDDIEQETFMLDEPLERTTNSSHANGAAQAPRSMQWAVRNTQHQRAASTAPSSTSTPAASSAGLIYIDPSNLRRSGTISTSAAAAAAALEASNASSYLTSASSLARAYSIVIRQISDLMGLIPKYNHLVYSQIPAAVKLTYQDAVNLQNYVEEKLIPTWNWMVSIMDSTEAQLRYGSALASAGDPGHPNHPLHASQNSARRERMTAREEASLRTLEGRRRATLLSARQGMMSARGDFLNYALSLMRSHNDEHSDVLPVLDVCSLKHVAYVFQALIYWIKAMNQQTTLDTPQLERKRTRELLELGIDNEDSEHENDDDTNQSATLNDKDDDSLPAETGQNHPFFRRSDSMTFLGCIPPNPFEVPLAEAIPLADQPHLLQPNARKEDLFGRPSQGLYSSSASSGKCLMEVTVDRNCLEVLPTKMSYAANLKNVMNMQNRQKKEGEEQPVLPEETESSKPGPSAHDLAAQLKSSLLAEIGLTESEGPPLTSFRPQCSFMGMVISHDMLLGRWRLSLELFGRVFMEDVGAEPGSILTELGGFEVKESKFRREMEKLRNQQSRDLSLEVDRDRDLLIQQTMRQLNNHFGRRCATTPMAVHRVKVTFKDEPGEGSGVARSFYTAIAQAFLSNEKLPNLECIQNANKGTHTSLMQRLRNRGERDREREREREMRRSSGLRAGSRRDRDRDFRRQLSIDTRPFRPASEGNPSDDPEPLPAHRQALGERLYPRVQAMQPAFASKITGMLLELSPAQLLLLLASEDSLRARVDEAMELIIAHGRENGADSILDLGLVDSSEKVQENRKRHGSSRSVVDMDLDDTDDGDDNAPLFYQPGKRGFYTPRPGKNTEARLNCFRNIGRILGLCLLQNELCPITLNRHVIKVLLGRKVNWHDFAFFDPVMYESLRQLILASQSSDADAVFSAMDLAFAIDLCKEEGGGQVELIPNGVNIPVTPQNVYEYVRKYAEHRMLVVAEQPLHAMRKGLLDVLPKNSLEDLTAEDFRLLVNGCGEVNVQMLISFTSFNDESGENAEKLLQFKRWFWSIVEKMSMTERQDLVYFWTSSPSLPASEEGFQPMPSITIRPPDDQHLPTANTCISRLYVPLYSSKQILKQKLLLAIKTKNFGFV

SEQ ID NO: 346 - protein, 522 aa, Homo sapiens
MALLPRALSAGAGPSWRRAARAFRGFLLLLPEPAALTRALSRAMACRQEPQPQGPPPAAGAVASYDYLVIGGGSGGLASARRAAELGARAAVVESHKLGGTCVNVGCVPKKVMWNTAVHSEFMHDHADYGFPSCEGKFNWRVIKEKRDAYVSRLNAIYQNNLTKSHIEIIRGHAAFTSDPKPTIEVSGKKYTAPHILIATGGMPSTPHESQIPGASLGITSDGFFQLEELPGRSVIVGAGYIAVEMAGILSALGSKTSLMIRHDKVLRSFDSMISTNCTEELENAGVEVLKFSQVKEVKKTLSGLEVSMVTAVPGRLPVMTMIPDVDCLLWAIGRVPNTKDLSLNKLGIQTDDKGHIIVDEFQNTNVKGIYAVGDVCGKALLTPVAIAAGRKLAHRLFEYKEDSKLDYNNIPTVVFSHPPIGTVGLTEDEAIHKYGIENVKTYSTSFTPMYHAVTKRKTKCVMKMVCANKEEKVVGIHMQGLGCDEMLQGFAVAVKMGATKADFDNTVAIHPTSSEELVTLR

SEQ ID NO: 347 - protein, 916 aa, Homo sapiens
MSYTLDSLGNPSAYRRVTETRSSFSRVSGSPSSGFRSQSWSRGSPSTVSSSYKRSMLAPRLAYSSAMLSSAESSLDFSQSSSLLNGGSGPGGDYKLSRSNEKEQLQGLNDRFAGYIEKVHYLEQQNKEIEAEIQALRQKQASHAQLGDAYDQEIRELRATLEMVNHEKAQVQLDSDHLEEDIHRLKERFEEEARLRDDTEAAIRALRKDIEEASLVKVELDKKVQSLQDEVAFLRSNHEEEVADLLAQIQASHITVERKDYLKTDISTALKEIRSQLESHSDQNMHQAEEWFKCRYAKLTEAAEQNKEAIRSAKEEIAEYRRQLQSKSIELESVRGTKESLERQLSDIEERHNHDLSSYQDTIQQLENELRGTKWEMARHLREYQDLLNVKMALDIEIAAYRKLLEGEETRFSTFAGSITGPLYTHRPPITISSKIQKPKVEAPKLKVQHKFVEEIIEETKVEDEKSEMEEALTAITEELAVSMKEEKKEAAEEKEEEPEAEEEEVAAKKSPVKATAPEVKEEEGEKEEEEGQEEEEEEDEGAKSDQAEEGGSEKEGSSEKEEGEQEEGETEAEAEGEEAEAKEEKKVEEKSEEVATKEELVADAKVEKPEKAKSPVPKSPVEEKGKSPVPKSPVEEKGKSPVPKSPVEEKGKSPVPKSPVEEKGKSPVSKSPVEEKAKSPVPKSPVEEAKSKAEVGKGEQKEEEEKEVKEAPKEEKVEKKEEKPKDVPEKKKAESPVKEEAVAEVVTITKSVKVHLEKETKEEGKPLQQEKEKEKAGGEGGSEEEGSDKGAKGSRKEDIAVNGEVEGKEEVEQETKEKGSGREEEKGVVTNGLDLSPADEKKGGDKSEEKVVVTKTVEKITSEGGDGATKYITKSVTVTQKVEEHEETFEEKLVSTKKVEKVTSHAIVKEVTQSD

SEQ ID NO: 348 - protein, 389 aa, Homo sapiens
MRRVTLFLNGSPKNGKVVAVYGTLSDLLSVASSKLGIKATSVYNGKGGLIDDIALIRDDDVLFVCEGEPFIDPQTDSKPPEGLLGFHTDWLTLNVGGRYFTTTRSTLVNKEPDSMLAHMFKDKGVWGNKQDHRGAFLIDRSPEYFEPILNYLRHGQLIVNDGINLLGVLEEARFFGIDSLIEHLEVAIKNSQPPEDHSPISRKEFVRFLLATPTKSELRCQGLNFSGADLSRLDLRYINFKMANLSRCNLAHANLCCANLERADLSGSVLDCANLQGVKMLCSNAEGASLKLCNFEDPSGLKANLEGANLKGVDMEGSQMTGINLRVATLKNAKLKNCNLRGATLAGTDLENCDLSGCDLQEANLRGSNVKGAIFEEMLTPLHMSQSVR

SEQ ID NO: 349 - protein, 358 aa, Homo sapiens
MSTAREQPIFSTRAHVFQIDPATKRNWIPAGKHALTVSYFYDATRNVYRIISIGGAKAIINSTVTPNMTFTKTSQKFGQWADSRANTVYGLGFASEQHLTQFAEKFQEVKEAARLAREKSQDGGELTSPALGLASHQVPPSPLVSANGPGEEKLFRSQSADAPGPTERERLKKMLSEGSVGEVQWEAEFFALQDSNNKLAGALREANAAAAQWRQQLEAQRAEAERLRQRVAELEAQAASEVTPTGEKEGLGQGQSLEQLEALVQTKDQEIQTLKSQTGGPREALEAAEREETQQKVQTRNAELEHQLRAMERSLEEARAERERARAEVGRAAQLLDVSLFELSELREGLARLAEAAP

SEQ ID NO: 350 - protein, 520 aa, Homo sapiens
MPQLSLSSLGLWPMAASPWLLLLLVGASWLLARILAWTYTFYDNCCRLRCFPQPPKRNWFLGHLGLIHSSEEGLLYTQSLACTFGDMCCWWVGPWHAIVRIFHPTYIKPVLFAPAAIVPKDKVFYSFLKPWLGDGLLLSAGEKWSRHRRMLTPAFHFNILKPYMKIFNESVNIMHAKWQLLASEGSARLDMFEHISLMTLDSLQKCVFSFDSHCQEKPSEYIAAILELSALVTKRHQQILLYIDFLYYLTPDGQRFRRACRLVHDFTDAVIQERRRTLPSQGVDDFLQAKAKSKTLDFIDVLLLSKDEDGKKLSDEDIRAEADTFMFEGHDTTASGLSWVLYHLAKHPEYQERCRQEVQELLKDREPKEIEWDDLAQLPFLTMCIKESLRLHPPVPAVSRCCTQDIVLPDGRVIPKGIICLISVFGTHHNPAVWPDPEVYDPFRFDPKNIKERSPLAFIPFSAGPRNCIGQAFAMAEMKVVLGLTLLRFRVLPDHTEPRRKPELVLRAEGGLWLRVEPLS

SEQ ID NO: 351 - protein, 692 aa, Homo sapiens
MRACAGSTREAGSGAQDLSTLLCLEESMEEQDEKPPEPPKVCAQDSFLPQEIIIKVEGEDTGSLTIPSQEGVNFKIVTVDFTREEQGTCNPAQRTLDRDVILENHRDLVSWDLATAVGKKDSTSKQRIFDEEPANGVKIERFTRDDPWLSSCEEVDDCKDQLEKQQEKQEILLQEVAFTQRKAVIHERVCKSDETGEKSGLNSSLFSSPVIPIRNHFHKHVSHAKKWHLNAAVNSHQKINENETLYENNECGKPPQSIHLIQFTRTQTKDKSYGFSDRIQSFCHGTPLHIHEKIHGGGKTFDFKECGQVLNPKISHNEQQRIPFEESQYKCSETSHSSSLTQNMRNNSEEKPFECNQCGKSFSWSSHLVAHQRTHTGEKPYECSECGKSFSRSSHLVSHQRTHTGEKPYRCNQCGKSFSQSYVLVVHQRTHTGEKPYECNQCGKSFRQSYKLIAHQRTHTGEKPYECNQCGKSFIQSYKLIAHQRIHTGEKPYECNQCGKSFSQSYKLVAHQRTHTGEKPFECNQCGKSFSWSSQLVAHQRTHTGEKPYECSECGKSFNRSSHLVMHQRIHTGEKPYECNQCGKSFSQSYVLVVHQRTHTGEKPYECSQCGKSFRQSSCLTQHQRTHTGEKPFECNQCGKTFSLSARLIVHQRTHTGEKPFTCIQCGKAFINSYKLIRHQATHTEEKLYECN

SEQ ID NO: 352 - protein, 1010 aa, Homo sapiens
MGAYARASGVCARGCLDSAGPWTMSRALRPPLPPLCFFLLLLAAAGARAGGYETCPTVQPNMLNVHLLPHTHDDVGWLKTVDQYFYGIKNDIQHAGVQYILDSVISALLADPTRRFIYVEIAFFSRWWHQQTNATQEVVRDLVRQGRLEFANGGWVMNDEAATHYGAIVDQMTLGLRFLEDTFGNDGRPRVAWHIDPFGHSREQASLFAQMGFDGFFFGRLDYQDKWVRMQKLEMEQVWRASTSLKPPTADLFTGVLPNGYNPPRNLCWDVLCVDQPLVEDPRSPEYNAKELVDYFLNVATAQGRYYRTNHTVMTMGSDFQYENANMWFKNLDKLIRLVNAQAKGSSVHVLYSTPACYLWELNKANLTWSVKHDDFFPYADGPHQFWTGYFSSRPALKRYERLSYNFLQVCNQLEALVGLAANVGPYGSGDSAPLNEAMAVLQHHDAVSGTSRQHVANDYARQLAAGWGPCEVLLSNALARLRGFKDHFTFCQQLNISICPLSQTAARFQVIVYNPLGRKVNWMVRLPVSEGVFVVKDPNGRTVPSDVVIFPSSDSQAHPPELLFSASLPALGFSTYSVAQVPRWKPQARAPQPIPRRSWSPALTIENEHIRATFDPDTGLLMEIMNMNQQLLLPVRQTFFWYNASIGDNESDQASGAYIFRPNQQKPLPVSRWAQIHLVKTPLVQEVHQNFSAWCSQVVRLYPGQRHLELEWSVGPIPVGDTWGKEVISRFDTPLETKGRFYTDSNGREILERRRDYRPTWKLNQTEPVAGNYYPVNTRIYITDGNMQLTVLTDRSQGGSSLRDGSLELMVHRRLLKDDGRGVSEPLMENGSGAWVRGRHLVLLDTAQAAAAGHRLLAEQEVLAPQVVLAPGGGAAYNLGAPPRTQFSGLRRDLPPSVHLLTLASWGPEMVLLRLEHQFAVGEDSGRNLSAPVTLNLRDLFSTFTITRLQETTLVANQLREAASRLKWTTNTGPTPHQTPYQLDPANITLEPMEIRTFLASVQWKEVDG

SEQ ID NO: 353 - protein, 589 aa, Homo sapiens
MSRRLLPRAEKRRRRLEQRQQPDEQRRRSGAMVKMAAAGGGGGGGRYYGGGSEGGRAPKRLKTDNAGDQHGGGGGGGGGAGAAGGGGGGENYDDPHKTPASPVVHIRGLIDGVVEADLVEALQEFGPISYVVVMPKKRQALVEFEDVLGACNAVNYAADNQIYIAGHPAFVNYSTSQKISRPGDSDDSRSVNSVLLFTILNPIYSITTDVLYTICNPCGPVQRIVIFRKNGVQAMVEFDSVQSAQRAKASLNGADIYSGCCTLKIEYAKPTRLNVFKNDQDTWDYTNPNLSGQGDPGSNPNKRQRQPPLLGDHPAEYGGPHGGYHSHYHDEGYGPPPPHYEGRRMGPPVGGHRRGPSRYGPQYGHPPPPPPPPEYGPHADSPVLMVYGLDQSKMNCDRVFNVFCLYGNVEKVKFMKSKPGAAMVEMADGYAVDRAITHLNNNFMFGQKLNVCVSKQPAIMPGQSYGLEDGSCSYKDFSESRNNRFSTPEQAAKNRIQHPSNVLHFFNAPLEVTEENFFEICDELGVKRPSSVKVFSGKSERSSSGLLEWESKSDALETLGFLNHYQMKNPNGPYPYTLKLCFSTAQHAS

SEQ ID NO: 354 - protein, 456 aa, Homo sapiens
MEPRCPPPCGCCERLVLNVAGLRFETRARTLGRFPDTLLGDPARRGRFYDDARREYFFDRHRPSFDAVLYYYQSGGRLRRPAHVPLDVFLEEVAFYGLGAAALARLREDEGCPVPPERPLPRRAFARQLWLLFEFPESSQAARVLAVVSVLVILVSIVVFCLETLPDFRDDRDGTGLAAAAAAGPFPAPLNGSSQMPGNPPRLPFNDPFFVVETLCICWFSFELLVRLLVCPSKAIFFKNVMNLIDFVAILPYFVALGTELARQRGVGQQAMSLAILRVIRLVRVFRIFKLSRHSKGLQILGQTLRASMRELGLLIFFLFIGVVLFSSAVYFAEVDRVDSHFTSIPESFWWAVVTMTTVGYGDMAPVTVGGKIVGSLCAIAGVLTISLPVPVIVSNFSYFYHRETEGEEAGMFSHVDMQPCGPLEGKANGGLVDGEVPELPPPLWAPPGKHLVTEV

SEQ ID NO: 355 - protein, 428 aa, Homo sapiens
MTQFLPPNLLALFAPRDPIPYLPPLEKLPHEKHHNQPYCGIAPYIREFEDPRDAPPPTRAETREERMERKRREKIERRQQEVETELKMWDPHNDPNAQGDAFKTLFVARVNYDTTESKLRREFEVYGPIKRIHMVYSKRSGKPRGYAFIEYEHERDMHSAYKHADGKKIDGRRVLVDVERGRTVKGWRPRRLGGGLGGTRRGGADVNIRHSGRDDTSRYDERDRDRDRERERRERSRERDKERERRRSRSRDRRRRSRSRDKEERRRSRERSKDKDRDRKRRSSRSRERARRERERKEELRGGGGDMAEPSEAGDAPPDDGPPGELGPDGPDGPEEKGRDRDRERRRSHRSERERRRDRDRDRDRDREHKRGERGSERGRDEARGGGGGQDNGLEGLGNDSRDMYMESEGGDGYLAPENGYLMEAAPE

SEQ ID NO: 356 - protein, 579 aa, Homo sapiens
MLRSGPASGPSVPTGRAMPSRRVARPPAAPELGALGSPDLSSLSLAVSRSTDELEIIDEYIKENGFGLDGGQPGPGEGLPRLVSRGAASLSTVTLGPVAPPATPPPWGCPLGRLVSPAPGPGPQPHLVITEQPKQRGMRFRYECEGRSAGSILGESSTEASKTLPAIELRDCGGLREVEVTACLVWKDWPHRVHPHSLVGKDCTDGICRVRLRPHVSPRHSFNNLGIQCVRKKEIEAAIERKIQLGIDPYNAGSLKNHQEVDMNVVRICFQASYRDQQGQMRRMDPVLSEPVYDKKSTNTSELRICRINKESGPCTGGEELYLLCDKVQKEDISVVFSRASWEGRADFSQADVHRQIAIVFKTPPYEDLEIVEPVTVNVFLQRLTDGVCSEPLPFTYLPRDHDSYGVDKKRKRGMPDVLGELNSSDPHGIESKRRKKKPAILDHFLPNHGSGPFLPPSALLPDPDFFSGTVSLPGLEPPGGPDLLDDGFAYDPTAPTLFTMLDLLPPAPPHASAVVCSGGAGAVVGETPGPEPLTLDSYQAPGPGDGGTASLVGSNMFPNHYREAAFGGGLLSPGPEAT

SEQ ID NO: 357 - protein, 381 aa, Homo sapiens
MPFGNTHNKFKLNYKPEEEYPDLSKHNNHMAKVLTLELYKKLRDKETPSGFTVDDVIQTGVDNPGHPFIMTVGCVAGDEESYEVFKELFDPIISDRHGGYKPTDKHKTDLNHENLKGGDDLDPNYVLSSRVRTGRSIKGYTLPPHCSRGERRAVEKLSVEALNSLTGEFKGKYYPLKSMTEKEQQQLIDDHFLFDKPVSPLLLASGMARDWPDARGIWHNDNKSFLVWVNEEDHLRVISMEKGGNMKEVFRRFCVGLQKIEEIFKKAGHPFMWNQHLGYVLTCPSNLGTGLRGGVHVKLAHLSKHPKFEEILTRLRLQKRGTGGVDTAAVGSVFDVSNADRLGSSEVEQVQLVVDGVKLMVEMEKKLEKGQSIDDMIPAQK

SEQ ID NO: 358 - protein, 241 aa, Homo sapiens
MASLSGLASALESYRGRDRLIRVLGYCCQLVGGVLVEQCPARSEVGTRLLVVSTQLSHCRTILRLFDDLAMFVYTKQYGLGAQEEDAFVRCVSVLGNLADQLYYPCEHVAWAADARVLHVDSSRWWTLSTTLWALSLLLGVARSLWMLLKLRQRLRSPTAPFTSPLPRGKRRAMEAQMQSEALSLLSNLADLANAVHWLPRGVLWAGRFPPWLVGLMGTISSILSMYQAARAGGQAEATTP

SEQ ID NO: 359 - protein, 464 aa, Homo sapiens
MDFQHRPGGKTGSGGVASSSESNRDRRERLRQLALETIDINKDPYFMKNHLGSYECKLCLTLHNNEGSYLAHTQGKKHQTNLARRAAKEAKEAPAQPAPEKVKVEVKKFVKIGRPGYKVTKQRDSEMGQQSLLFQIDYPEIAEGIMPRHRFMSAYEQRIEPPDRRWQYLLMAAEPYETIAFKVPSREIDKAEGKFWTHWNRETKQFFLQFHFKMEKPPAPPSLPAGPPGVKRPPPPLMNGLPPRPPLPESLPPPPPGGLPLPPMPPTGPAPSGPPGPPQLPPPAPGVHPPAPVVHPPASGVHPPAPGVHPPAPGVHPPAPGVHPPTSGVHPPAPGVHPPAPGVHPPAPGVHPPAPGVHPPAPGVHPPPSAGVHPQAPGVHPAAPAVHPQAPGVHPPAPGMHPQAPGVHPQPPGVHPSAPGVHPQPPGVHPSNPGVHPPTPMPPMLRPPLPSEGPGNIPPPPPTN

SEQ ID NO: 360 - protein, 560 aa, Homo sapiens
MRDLPLTSLALVLSALGALLGTEALRAEEPAVGTSGLIFREDLDWPPGSPQEPLCLVALGGDSNGSSSPLRVVGALSAYEQAFLGAVQRARWGPRDLATFGVCNTGDRQAALPSLRRLGAWLRDPGGQRLVVLHLEEVTWEPTPSLRFQEPPPGGAGPPELALLVLYPGPGPEVTVTRAGLPGAQSLCPSRDTRYLVLAVDRPAGAWRGSGLALTLQPRGEDSRLSTARLQALLFGDDHRCFTRMTPALLLLPRSEPAPLPAHGQLDTVPFPPPRPSAELEESPPSADPFLETLTRLVRALRVPPARASAPRLALDPDALAGFPQGLVNLSDPAALERLLDGEEPLLLLLRPTAATTGDPAPLHDPTSAPWATALARRVAAELQAAAAELRSLPGLPPATAPLLARLLALCPGGPGGLGDPLRALLLLKALQGLRVEWRGRDPRGPGRAQRSAGATAADGPCALRELSVDLRAERSVLIPETYQANNCQGVCGWPQSDRNPRYGNHVVLLLKMQVRGAALARPPCCVPTAYAGKLLISLSEERISAHHVPNMVATECGCR

SEQ ID NO: 361 - protein, 242 aa, Homo sapiens
MGEASPPAPARRHLLVLLLLLSTLVIPSAAAPIHDADAQESSLGLTGLQSLLQGFSRLFLKGNLLRGIDSLFSAPMDFRGLPGNYHKEENQEHQLGNNTLSSHLQIDKMTDNKTGEVLISENVVASIQPAEGSFEGDLKVPRMEEKEALVPIQKATDSFHTELHPRVAFWIIKLPRRRSHQDALEGGHWLSEKRHRLQAIRDGLRKGTHKDVLEEGTESSSHSRLSPRKTHLLYILRPSRQL

SEQ ID NO: 362 - protein, 108 aa, Homo sapiens
MKALCLLLLPVLGLLVSSKTLCSMEEAINERIQEVAGSLIFRAISSIGLECQSVTSRGDLATCPRGFAVTGCTCGSACGSWDVRAETTCHCQCAGMDWTGARCCRVQP

SEQ ID NO: 363 - protein, 717 aa, Homo sapiens
MGDLPPYPERPAQQPPGRRTSQASQRRHSRDQAQALAADPEERQQIPPDAQRNAPGWSQRGSLSQQENLLMPQVFQAEEARLGGMEYPSVNTGFPSEFQPQPYSDESRMQVAELTTSLMLQRLQQGQSSLFQQLDPTFQEPPVNPLGQFNLYQTDQFSEGAQHGPYIRDDPALQFLPSELGFPHYSAQVPEPEPLELAVQNAKAYLLQTSINCDLSLYEHLVNLLTKILNQRPEDPLSVLESLNRTTQWEWFHPKLDTLRDDPEMQPTYKMAEKQKALFTRSGGGTEGEQEMEEEVGETPVPNIMETAFYFEQAGVGLSSDESFRIFLAMKQLVEQQPIHTCRFWGKILGIKRSYLVAEVEFREGEEEAEEEEVEEMTEGGEVMEAHGEEEGEEDEEKAVDIVPKSVWKPPPVIPKEESRSGANKYLYFVCNEPGLPWTRLPHVTPAQIVNARKIKKFFTGYLDTPVVSYPPFPGNEANYLRAQIARISAATQVSPLGFYQFSEEEGDEEEEGGAGRDSYEENPDFEGIPVLELVDSMANWVHHTQHILPQGRCTWVNPLQKTEEEEDLGEEEEKADEGPEEVEQEVGPPLLTPLSEDAEIMHLAPWTTRLSCSLCPQYSVAVVRSNLWPGAYAYASGKKFENIYIGWGHKYSPESFNPALPAPIQQEYPSGPEIMEMSDPTVEEEQALKAAQEQALGATEEEEEGEEEEEGEETDD

SEQ ID NO: 364 - protein, 648 aa, Homo sapiens
MEGAGYRVVFEKGGVYLHTSAKKYQDRDSLIAGVIRVVEKDNDVLLHWAPVEEAGDSTQILFSKKDSSGGDSCASEEEPTFDPGYEPDWAVISTVRPQLCHSEPTRGAEPSCPQGSWAFSVSLGELKSIRRSKPGLSWAYLVLVTQAGGSLPALHFHRGGTRALLRVLSRYLLLASSPQDSRLYLVFPHDSSALSNSFHHLQLFDQDSSNVVSRFLQDPYSTTFSSFSRVTNFFRGALQPQPEGAASDLPPPPDDEPEPGFEVISCVELGPRPTVERGPPVTEEEWARHVGPEGRLQQVPELKNRIFSGGLSPSLRREAWKFLLGYLSWEGTAEEHKAHIRKKTDEYFRMKLQWKSVSPEQERRNSLLHGYRSLIERDVSRTDRTNKFYEGPENPGLGLLNDILLTYCMYHFDLGYVQGMSDLLSPILYVIQNEVDAFWCFCGFMELVQGNFEESQETMKRQLGRLLLLLRVLDPLLCDFLDSQDSGSLCFCFRWLLIWFKREFPFPDVLRLWEVLWTGLPGPNLHLLVACAILDMERDTLMLSGFGSNEILKHINELTMKLSVEDVLTRAEALHRQLTACPELPHNVQEILGLAPPAEPHSPSPTASPLPLSPTRAPPTPPPSTDTAPQPDSSLEILPEEEDEGADS

SEQ ID NO: 365 - protein, 334 aa, Homo sapiens
MKPPPRRRAAPARYLGEVTGPATWSAREKRQLVRLLQARQGQPEPDATELARELRGRSEAEIRVFLQQLKGRVAREAIQKVHPGGLQGPRRREAQPPAPIEVWTDLAEKITGPLEEALAVAFSQVLTIAATEPVTLLHSKPPKPTQARGKPLLLSAPGGQEDPAPEIPSSAPAAPSSAPRTPDPAPEKPSESSAGPSTEEDFAVDFEKIYKYLSSVSRSGRSPELSAAESAVVLDLLMSLPEELPLLPCTALVEHMTETYLRLTAPQPIPAGGSLGPAAEGDGAGSKAPEETPPATEKAEHSELKSPWQAAGICPLNPFLVPLELLGRAATPAR

SEQ ID NO: 366 - protein, 657 aa, Homo sapiens
MASARKASRPMRDVFGDFSDVSLEDSTMEEIRNFQISRNLTKIAPGHSRFLKRNQTLDEKHLLLKENPVLGSGPRLASCRPPTTASRIRANAALMKLAQLETRIMNRKLQRNLSDTESDSMTADAGLPKRADRILSGGALELASQNTDKTSQNQARELPVTENNAQNAKVSRFLKKKQAPVENISPEAPAGKERTLQTPKQKEPARTFDSPDSDEEEMKVLLGSLMDSSREKNTNQGFSSANVSEEEERKLFSVPSQLRAFTVPSVELSSAKPSQTSHLPTSLAADRTLHSTRSRADYPQSHVSSDTASHTPSVSITGAFSNSVSLKMGHVKLVSSPGRSEAETVDEPVSEGADDSLDEFRINILSLDGLAPAVSENSDLEQEEESAQRQKTAGKIFRAEASTGQDAPRQAQARSWASQGKAASAEGDESEVSEHLSASSASAIQQDSTSSMQPPSEAPMVNTVSSAYSEDFENSPSLTASEPTAHSKESLDRTLDALSESSSSVKTDLPQTAESRKKSGRHVTRVLVKDTAVQTPDPAFTYEWTKVASMAAMGPALGGAYVDPTPIANHVISADAIEALTAYSPAVLALHDVLKQQLSLTQQFIQASRHLHASLLRSLDADSFHYHTLEEAKEYIRCHRPAPLTMEDALEEVNKEL

SEQ ID NO: 367 - protein, 520 aa, Homo sapiens
MSQLSLSWLGLWPVAASPWLLLLLVGASWLLAHVLAWTYAFYDNCRRLRCFPQPPRRNWFWGHQGMVNPTEEGMRVLTQLVATYPQGFKVWMGPISPLLSLCHPDIIRSVINASAAIAPKDKFFYSFLEPWLGDGLLLSAGDKWSRHRRMLTPAFHFNILKPYMKIFNESVNIMHAKWQLLASEGSACLDMFEHISLMTLDSLQKCVFSFDSHCQEKPSEYIAAILELSALVSKRHHEILLHIDFLYYLTPDGQRFRRACRLVHDFTDAVIQERRRTLPSQGVDDFLQAKAKSKTLDFIDVLLLSKDEDGKKLSDEDIRAEADTFMFEGHDTTASGLSWVLYHLAKHPEYQERCRQEVQELLKDREPKEIEWDDLAHLPFLTMCMKESLRLHPPVPVISRHVTQDIVLPDGRVIPKGIICLISVFGTHHNPAVWPDPEVYDPFRFDPENIKERSPLAFIPFSAGPRNCIGQTFAMAEMKVVLALTLLRFRVLPDHTEPRRKPELVLRAEGGLWLRVEPLS

SEQ ID NO: 368 - protein, 510 aa, Homo sapiens
MAAAALRDPAQVPVAADLLTDHEEGYVTFEDVAVYFSQEEWRLLDDAQRLLYRNVMLENFTLLASLGLASSKTHEITQLESWEEPFMPAWEVVTSAIPRGCWHGAEAEEAPEQIASVGLLSSNIQQHQKQHCGEKPLKRQEGRVPVLRSCKVHLSEKSLQSREVGKALLISSGVLKHQVTHTGEKSHRSSKSREAFHAGKRHYKCSECGKAFGQKYLLVQHQRLHAGKKTYECSECGKLFRDMSNLFIHQIVHTGERPYGCSNCGKSFSRNAHLIEHQRVHTGEKPFTCSECGKAFRHNSTLVQHHKIHTGVRPYECSECGKLFSFNSSLMKHQRIHTGERPYKCSECGKFYSHKSNLIKHWRVHTGERPYKCSDCGKFFTQCSSLMQHQKVHTGEKPFKCNECGRFFRENSTLVRHQRVHTGAKPYECRECGKFFSQSSTLMQHRKVHIGEKPFKCNECGRLFRENSSLVKHQRVHTGAKPYECRECGKFFRHNSSLFKHRRIHTGEMQ

SEQ ID NO: 369 - protein, 564 aa, Homo sapiens
MSSHGNSLFLRESGQRLGRVGWLQRLQESLQQRALRTRLRLQTMTLEHVLRFLRRNAFILLTVSAVVIGVSLAFALRPYQLTYRQIKYFSFPGELLMRMLQMLVLPLIVSSLVTGMASLDNKATGRMGMRAAVYYMVTTIIAVFIGILMVTIIHPGKGSKEGLHREGRIETIPTADAFMDLIRNMFPPNLVEACFKQFKTQYSTRVVTRTMVRTENGSEPGASMPPPFSVENGTSFLENVTRALGTLQEMLSFEETVPVPGSANGINALGLVVFSVAFGLVIGGMKHKGRVLRDFFDSLNEAIMRLVGIIIWYAPVGILFLIAGKILEMEDMAVLGGQLGMYTLTVIVGLFLHAGIVLPLIYFLVTHRNPFPFIGGMLQALITAMGTSSSSATLPITFRCLEEGLGVDRRITRFVLPVGATVNMDGTALYEALAAIFIAQVNNYELNLGQITTISITATAASVGAAGIPQAGLVTMVIVLTSVGLPTEDITLIIAVDWFLDRLRTMTNVLGDSIGAAVIEHLSQRELELQEAELTLPSLGKPYKSLMAQEKGASRGRGGNESAM

SEQ ID NO: 370 - protein, 96 aa, Homo sapiens
MIQAKLLKADLHGAIISVTKSKCPSYVGITGILLQETKHIFKIITKEDRLKVIPKLNCVFTVETDGFISYIYGSKFQLRSSERSAKKFKAKGTIDL

SEQ ID NO: 371 - protein, 321 aa, Homo sapiens
MKPGFSPRGGGFGGRGGFGDRGGRGGRGGFGGGRGRGGGFRGRGRGGGGGGGGGGGGGRGGGGFHSGGNRGRGRGGKRGNQSGKNVMVEPHRHEGVFICRGKEDALVTKNLVPGESVYGEKRVSISEGDDKIEYRAWNPFRSKLAAAILGGVDQIHIKPGAKVLYLGAASGTTVSHVSDIVGPDGLVYAVEFSHRSGRDLINLAKKRTNIIPVIEDARHPHKYRMLIAMVDVIFADVAQPDQTRIVALNAHTFLRNGGHFVISIKANCIDSTASAEAVFASEVKKMQQENMKPQEQLTLEPYERDHAVVVGVYRPPPKVKN

SEQ ID NO: 372 - protein, 601 aa, Homo sapiens
MAVPPGHGPFSGFPGPQEHTQVLPDVRLLPRRLPLAFRDATSAPLRKLSVDLIKTYKHINEVYYAKKKRRAQQAPPQDSSNKKEKKVLNHGYDDDNHDYIVRSGERWLERYEIDSLIGKGSFGQVVKAYDHQTQELVAIKIIKNKKAFLNQAQIELRLLELMNQHDTEMKYYIVHLKRHFMFRNHLCLVFELLSYNLYDLLRNTHFRGVSLNLTRKLAQQLCTALLFLATPELSIIHCDLKPENILLCNPKRSAIKIVDFGSSCQLGQRIYQYIQSRFYRSPEVLLGTPYDLAIDMWSLGCILVEMHTGEPLFSGSNEVDQMNRIVEVLGIPPAAMLDQAPKARKYFERLPGGGWTLRRTKELRKDYQGPGTRRLQEDLVLRMLEYEPAARISPLGALQHGFFRRTADEATNTGPAGSSASTSPAPLDTCPSSSTASSISSSGGSSGSSSDNRTYRYSNRYCGGPGPPITDCEMNSPQVPPSQPLRPWAGGDVPHKTHQAPASASSLPGTGAQLPPQPRYLGRPPSPTSPPPPELMDVSLVGGPADCSPPHPAPAPQHPAASALRTRMTGGRPPLPPPDDPATLGPHLGLRGVPQSTAASS

SEQ ID NO: 373 - protein, 651 aa, Homo sapiens
MGPASPAARGLSRRPGQPPLPLLLPLLLLLLRAQPAIGSLAGGSPGAAEAPGSAQVAGLCGRLTLHRDLRTGRWEPDPQRSRRCLRDPQRVLEYCRQMYPELQIARVEQATQAIPMERWCGGSRSGSCAHPHHQVVPFRCLPGEFVSEALLVPEGCRFLHQERMDQCESSTRRHQEAQEACSSQGLILHGSGMLLPCGSDRFRGVEYVCCPPPGTPDPSGTAVGDPSTRSWPPGSRVEGAEDEEEEESFPQPVDDYFVEPPQAEEEEETVPPPSSHTLAVVGKVTPTPRPTDGVDIYFGMPGEISEHEGFLRAKMDLEERRMRQINEVMREWAMADNQSKNLPKADRQALNEHFQSILQTLEEQVSGERQRLVETHATRVIALINDQRRAALEGFLAALQADPPQAERVLLALRRYLRAEQKEQRHTLRHYQHVAAVDPEKAQQMRFQVHTHLQVIEERVNQSLGLLDQNPHLAQELRPQIQELLHSEHLGPSELEAPAPGGSSEDKGGLQPPDSKDADTPMTLPKGSTEQDAASPEKEKMNPLEQYERKVNASVPRGFPFHSSEIQRDELAPAGTGVSREAVSGLLIMGAGGGSLIVLSMLLLRRKKPYGAISHGVVEVDPMLTLEEQQLRELQRHGYENPTYRFLEERP

SEQ ID NO: 374 - protein, 758 aa, Homo sapiens
MGRDTRSRSRSAGRRGRRRQSQSGSRSRSRSHGRRNRRRREDEGRRRRRRRSRERRSDSEEERWQRSGMRSRSPPRPKWHSRDGSSQSDSGEEQSRGQWARRRRRARSWSPSSSASSSASPGRSQSPRAAAAALSQQQSLQERLRLREERKQQEELMKAFETPEEKRARRLAKKEAKERKKREKMGWGEEYMGYTNTDNPFGDNNLLGTFIWNKALEKKGISHLEEKELKERNKRIQEDNRLELQKVKQLRLEREREKAMREQELEMLQREKEAEHFKTWEEQEDNFHLQQAKLRSKIRIRDGRAKPIDLLAKYISAEDDDLAVEMHEPYTFLNGLTVADMEDLLEDIQVYMELEQGKNADFWRDMTTITEDEISKLRKLEASGKGPGERREGVNASVSSDVQSVFKGKTYNQLQVIFQGIEGKIRAGGPNLDMGYWESLLQQLRAHMARARLRERHQDVLRQKLYKLKQEQGVESEPLFPILKQEPQSPSRSLEPEDAAPTPPGPSSEGGPAEAEVDGATPTEGDGDGDGEGEGEGEAVLMEEDLIQQSLDDYDAGRYSPRLLTAHELPLDAHVLEPDEDLQRLQLSRQQLQVTGDASESAEDIFFRRAKEGMGQDEAQFSVEMPLTGKAYLWADKYRPRKPRFFNRVHTGFEWNKYNQTHYDFDNPPPKIVQGYKFNIFYPDLIDKRSTPEYFLEACADNKDFAILRFHAGPPYEDIAFKIVNREWEYSHRHGFRCQFANGIFQLWFHFKRYRYRR

SEQ ID NO: 375 - protein, 390 aa, Homo sapiens
MPPSGLRLLPLLLPLLWLLVLTPGRPAAGLSTCKTIDMELVKRKRIEAIRGQILSKLRLASPPSQGEVPPGPLPEAVLALYNSTRDRVAGESAEPEPEPEADYYAKEVTRVLMVETHNEIYDKFKQSTHSIYMFFNTSELREAVPEPVLLSRAELRLLRLKLKVEQHVELYQKYSNNSWRYLSNRLLAPSDSPEWLSFDVTGVVRQWLSRGGEIEGFRLSAHCSCDSRDNTLQVDINGFTTGRRGDLATIHGMNRPFLLLMATPLERAQHLQSSRHRRALDTNYCFSSTEKNCCVRQLYIDFRKDLGWKWIHEPKGYHANFCLGPCPYIWSLDTQYSKVLALYNQHNPGASAAPCCVPQALEPLPIVYYVGRKPKVEQLSNMIVRSCKCS

SEQ ID NO: 376 - protein, 226 aa, Homo sapiens
MPGGPGVLQALPATIFLLFLLSAVYLGPGCQALWMHKVPASLMVSLGEDAHFQCPHNSSNNANVTWWRVLHGNYTWPPEFLGPGEDPNGTLIIQNVNKSHGGIYVCRVQEGNESYQQSCGTYLRVRQPPPRPFLDMGEGTKNRIITAEGIILLFCAVVPGTLLLFRKRWQNEKLGLDAGDEYEDENLYEGLNLDDCSMYEDISRGLQGTYQDVGSLNIGDVQLEKP

SEQ ID NO: 377 - protein, 702 aa, Homo sapiens
MESPSAPPHRWCIPWQRLLLTASLLTFWNPPTTAKLTIESTPFNVAEGKEVLLLVHNLPQHLFGYSWYKGERVDGNRQIIGYVIGTQQATPGPAYSGREIIYPNASLLIQNIIQNDTGFYTLHVIKSDLVNEEATGQFRVYPELPKPSISSNNSKPVEDKDAVAFTCEPETQDATYLWWVNNQSLPVSPRLQLSNGNRTLTLFNVTRNDTASYKCETQNPVSARRSDSVILNVLYGPDAPTISPLNTSYRSGENLNLSCHAASNPPAQYSWFVNGTFQQSTQELFIPNITVNNSGSYTCQAHNSDTGLNRTTVTTITVYAEPPKPFITSNNSNPVEDEDAVALTCEPEIQNTTYLWWVNNQSLPVSPRLQLSNDNRTLTLLSVTRNDVGPYECGIQNELSVDHSDPVILNVLYGPDDPTISPSYTYYRPGVNLSLSCHAASNPPAQYSWLIDGNIQQHTQELFISNITEKNSGLYTCQANNSASGHSRTTVKTITVSAELPKPSISSNNSKPVEDKDAVAFTCEPEAQNTTYLWWVNGQSLPVSPRLQLSNGNRTLTLFNVTRNDARAYVCGIQNSVSANRSDPVTLDVLYGPDTPIISPPDSSYLSGANLNLSCHSASNPSPQYSWRINGIPQQHTQVLFIAKITPNNNGTYACFVSNLATGRNNSIVKSITVSASGTSPGLSAGATVGIMIGVLVGVALI

SEQ ID NO: 378 - protein, 299 aa, Homo sapiens [sequence omitted]

SEQ ID NO: 379 - protein, 578 aa, Homo sapiens
MRQQDAPKPTPAACRCSGLARRVLTIAFALLILGLMTWAYAAGVPLASDRYGLLAFGLYGAFLSAHLVAQSLFAYLEHRRVAAAARGPLDAATARSVALTISAYQEDPAYLRQCLASARALLYPRARLRVLMVVDGNRAEDLYMVDMFREVFADEDPATYVWDGNYHQPWEPAAAGAVGAGAYREVEAEDPGRLAVEALVRTRRCVCVAQRWGGKREVMYTAFKALGDSVDYVQVCDSDTRLDPMALLELVRVLDEDPRVGAVGGDVRILNPLDSWVSFLSSLRYWVAFNVERACQSYFHCVSCISGPLGLYRNNLLQQFLEAWYNQKFLGTHCTFGDDRHLTNRMLSMGYATKYTSRSRCYSETPSSFLRWLSQQTRWSKSYFREWLYNALWWHRHHAWMTYEAVVSGLFPFFVAATVLRLFYAGRPWALLWVLLCVQGVALAKAAFAAWLRGCLRMVLLSLYAPLYMCGLLPAKFLALVTMNQSGWGTSGRRKLAANYVPLLPLALWALLLLGGLVRSVAHEARADWSGPSRAAEAYHLAAGAGAYVGYWVAMLTLYWVGVRRLCRRRTGGYRVQV

SEQ ID NO: 380 - protein, 508 aa, Homo sapiens
MDHLGASLWPQVGSLCLLLAGAAWAPPPNLPDPKFESKAALLAARGPEELLCFTERLEDLVCFWEEAASAGVGPGNYSFSYQLEDEPWKLCRLHQAPTARGAVRFWCSLPTADTSSFVPLELRVTAASGAPRYHRVIHINEVVLLDAPVGLVARLADESGHVVLRWLPPPETPMTSHIRYEVDVSAGNGAGSVQRVEILEGRTECVLSNLRGRTRYTFAVRARMAEPSFGGFWSAWSEPVSLLTPSDLDPLILTLSLILVVILVLLTVLALLSHRRALKQKIWPGIPSPESEFEGLFTTHKGNFQLWLYQNDGCLWWSPCTPFTEDPPASLEVLSERCWGTMQAVEPGTDDEGPLLEPVGSEHAQDTYLVLDKWLLPRNPPSEDLPGPGGSVDIVAMDEGSEASSCSSALASKPSPEGASAASFEYTILDPSSQLLRPWTLCPELPPTPPHLKYLYLVVSDSGISTDYSSGDSQGAQGGLSDGPYSNPYENSLIPAAEPLPPSYVACS

SEQ ID NO: 381 - protein, 963 aa, Homo sapiens
MLSGERKEGGSPRFGKLHLPVGLWINSPRKQLAKLGRRWPSAASVKSSSSDTGSRSSEPLPPPPPHVELRRVGAVKAAGGASGSRAKRISQLFRGSGTGTTGSSGAGGPGTPGGAQRWASEKKLPELAAGVAPEPPLATRATAPPGVLKIFGAGLASGANYKSVLATARSTARELVAEALERYGLAGSPGGGPGESSCVDAFALCDALGRPAAAGVGSGEWRAEHLRVLGDSERPLLVQELWRARPGWARRFELRGREEARRLEQEAFGAADSEGTGAPSWRPQKNRSRAASGGAALASPGPGTGSGAPAGSGGKERSENLSLRRSVSELSLQGRRRRQQERRQQALSMAPGAADAQIGTADPGDFDQLTQCLIQAPSNRPYFLLLQGYQDAQDFVVYVMTREQHVFGRGGNSSGRGGSPAPYVDTFLNAPDILPRHCTVRAGPEHPAMVRPSRGAPVTHNGCLLLREAELHPGDLLGLGEHFLFMYKDPRTGGSGPARPPWLPARPGATPPGPGWAFSCRLCGRGLQERGEALAAYLDGREPVLRFRPREEEALLGEIVRAAAAGSGDLPPLGPATLLALCVQHSARELELGHLPRLLGRLARLIKEAVWEKIKEIGDRQPENHPEGVPEVPLTPEAVSVELRPLMLWMANTTELLSFVQEKVLEMEKEADQEDPQLCNDLELCDEAMALLDEVIMCTFQQSVYYLTKTLYSTLPALLDSNPFTAGAELPGPGAELGAMPPGLRPTLGVFQAALELTSQCELHPDLVSQTFGYLFFFSNASLLNSLMERGQGRPFYQWSRAVQIRTNLDLVLDWLQGAGLGDIATEFFRKLSMAVNLLCVPRTSLLKASWSSLRTDHPTLTPAQLHHLLSHYQLGPGRGPPAAWDPPPAEREAVDTGDIFESFSSHPPLILPLGSSRLRLTGPVTDDALHRELRRLRRLLWDLEQQELPANYRHGPPVATSP

SEQ ID NO: 382 - protein, 438 aa, Homo sapiens
MALRGVSVRLLSRGPGLHVLRTWVSSAAQTEKGGRTQSQLAKSSRPEFDWQDPLVLEEQLTTDEILIRDTFRTYCQERLMPRILLANRNEVFHREIISEMGELGVLGPTIKGYGCAGVSSVAYGLLARELERVDSGYRSAMSVQSSLVMHPIYAYGSEEQRQKYLPQLAKGELLGCFGLTEPNSGSDPSSMETRAHYNSSNKSYTLNGTKTWITNSPMADLFVVWARCEDGCIRGFLLEKGMRGLSAPRIQGKFSLRASATGMIIMDGVEVPEENVLPGASSLGGPFGCLNNARYGIAWGVLGASEFCLHTARQYALDRMQFGVPLARNQLIQKKLADMLTEITLGLHACLQLGRLKDQDKAAPEMVSLLKRNNCGKALDIARQARDMLGGNGISDEYHVIRHAMNLEAVNTYEGTHDIHALILGRAITGIQAFTASK

SEQ ID NO: 383 - protein, 643 aa, Homo sapiens
MEAVETGERPTFGAWDYGVFALMLLVSTGIGLWVGLARGGQRSAEDFFTGGRRLAALPVGLSLSASFMSAVQVLGVPSEAYRYGLKFLWMCLGQLLNSVLTALLFMPVFYRLGLTSTYEYLEMRFSRAVRLCGTLQYIVATMLYTGIVIYAPALILNQVTGLDIWASLLSTGIICTFYTAVGGMKAVVWTDVFQVVVMLSGFWVVLARGVMLVGGPRQVLTLAQNHSRINLMDFNPDPRSRYTFWTFVVGGTLVWLSMYGVNQAQVQRYVACRTEKQAKLALLINQVGLFLIVSSAACCGIVMFVFYTDCDPLLLGRISAPDQYMPLLVLDIFEDLPGVPGLFLACAYSGTLSTASTSINAMAAVTVEDLIKPRLRSLAPRKLVIISKGLSLIYGSACLTVAALSSLLGGGVLQGSFTVMGVISGPLLGAFILGMFLPACNTPGVLAGLGAGLALSLWVALGATLYPPSEQTMRVLPSSAARCVALSVNASGLLDPALLPANDSSRAPSSGMDASRPALADSFYAISYLYYGALGTLTTVLCGALISCLTGPTKRSTLAPGLLWWDLARQTASVAPKEEVAILDDNLVKGPEELPTGNKKPPGFLPTNEDRLFFLGQKELEGAGSWTPCVGHDGGRDQQETNL

SEQ ID NO: 384 - protein, 728 aa, Homo sapiens
MAGPEGFQYRALYPFRRERPEDLELLPGDVLVVSRAALQALGVAEGGERCPQSVGWMPGLNERTRQRGDFPGTYVEFLGPVALARPGPRPRGPRPLPARPRDGAPEPGLTLPDLPEQFSPPDVAPPLLVKLVEAIERTGLDSESHYRPELPAPRTDWSLSDVDQWDTAALADGIKSFLLALPAPLVTPEASAEARRALREAAGPVGPALEPPTLPLHRALTLRFLLQHLGRVASRAPALGPAVRALGATFGPLLLRAPPPPSSPPPGGAPDGSEPSPDFPALLVEKLLQEHLEEQEVAPPALPPKPPKAKPASTVLANGGSPPSLQDAEWYWGDISREEVNEKLRDTPDGTFLVRDASSKIQGEYTLTLRKGGNNKLIKVFHRDGHYGFSEPLTFCSVVDLINHYRHESLAQYNAKLDTRLLYPVSKYQQDQIVKEDSVEAVGAQLKVYHQQYQDKSREYDQLYEEYTRTSQELQMKRTAIEAFNETIKIFEEQGQTQEKCSKEYLERFRREGNEKEMQRILLNSERLKSRIAEIHESRTKLEQQLRAQASDNREIDKRMNSLKPDLMQLRKIRDQYLVWLTQKGARQKKINEWLGIKNETEDQYALMEDEDDLPHHEERTWYVGKINRTQAEEMLSGKRDGTFLIRESSQRGCYACSVVVDGDTKHCVIYRTATGFGFAEPYNLYGSLKELVLHYQHASLVQHNDALTVTLAHPVRAPGPGPPPAAR

SEQ ID NO: 385 - protein, 258 aa, Homo sapiens
MASAAAAEAEKGSPVVVGLLVVGNIIILLSGLSLFAETIWVTADQYRVYPLMGVSGKDDVFAGAWIAIFCGFSFFMVASFGVGAALCRRRSMVLTYLVLMLIVYIFECASCITSYTHRDYMVSNPSLITKQMLTFYSADTDQGQELTRLWDRVMIEQECCGTSGPMDWVNFTSAFRAATPEVVFPWPPLCCRRTGNFIPLNEEGCRLGHMDYLFTKGCFEHIGHAIDSYTWGISWFGFAILMWTLPVMLIAMYFYTML

SEQ ID NO: 386 - protein, 412 aa, Homo sapiens
MASCAEPSEPSAPLPAGVPPLEDFEVLDGVEDAEGEEEEEEEEEEEDDLSELPPLEDMGQPPAEEAEQPGALAREFLAAMEPEPAPAPAPEEWLDILGNGLLRKKTLVPGPPGSSRPVKGQVVTVHLQTSLENGTRVQEEPELVFTLGDCDVIQALDLSVPLMDVGETAMVTADSKYCYGPQGRSPYIPPHAALCLEVTLKTAVDGPDLEMLTGQERVALANRKRECGNAHYQRADFVLAANSYDLAIKAITSSAKVDMTFEEEAQLLQLKVKCLNNLAASQLKLDHYRAALRSCSLVLEHQPDNIKALFRKGKVLAQQGEYSEAIPILRAALKLEPSNKTIHAELSKLVKKHAAQRSTETALYRKMLGNPSRLPAKCPGKGAWSIPWKWLFGATAVALGGVALSVVIAARN

SEQ ID NO: 387 - protein, 548 aa, Homo sapiens
MKTPADTGFAFPDWAYKPESSPGSRQIQLWHFILELLRKEEYQGVIAWQGDYGEFVIKDPDEVARLWGVRKCKPQMNYDKLSRALRYYYNKRILHKTKGKRFTYKFNFNKLVLVNYPFIDVGLAGGAVPQSAPPVPSGGSHFRFPPSTPSEVLSPTEDPRSPPACSSSSSSLFSAVVARRLGRGSVSDCSDGTSELEEPLGEDPRARPPGPPDLGAFRGPPLARLPHDPGVFRVYPRPRGGPEPLSPFPVSPLAGPGSLLPPQLSPALPMTPTHLAYTPSPTLSPMYPSGGGGPSGSGGGSHFSFSPEDMKRYLQAHTQSVYNYHLSPRAFLHYPGLVVPQPQRPDKCPLPPMAPETPPVPSSASSSSSSSSSPFKFKLQPPPLGRRQRAAGEKAVAGADKSGGSAGGLAEGAGALAPPPPPPQIKVEPISEGESEEVEVTDISDEDEEDGEVFKTPRAPPAPPKPEPGEAPGASQCMPLKLRFKRRWSEDCRLEGGGGPAGGFEDEGEDKKVRGEGPGEAGGPLTPRRVSSDLQHATAQLSLEHRDS

SEQ ID NO: 388 - protein, 483 aa, Homo sapiens
MSGGGPSGGGPGGSGRARTSSFAEPGGGGGGGGGGPGGSASGPGGTGGGKASVGAMGGGVGASSSGGGPGGSGGGGSGGPGAGTSFPPPGVKLGRDSGKVTTVVATLGQGPERSQEVAYTDIKVIGNGSFGVVYQARLAETRELVAIKKVLQDKRFKNRELQIMRKLDHCNIVRLRYFFYSSGEKKDELYLNLVLEYVPETVYRVARHFTKAKLTIPILYVKVYMYQLFRSLAYIHSQGVCHRDIKPQNLLVDPDTAVLKLCDFGSAKQLVRGEPNVSYICSRYYRAPELIFGATDYTSSIDVWSAGCVLAELLLGQPIFPGDSGVDQLVEIIKVLGTPTREQIREMNPNYTEFKFPQIKAHPWTKVFKSRTPPEAIALCSSLLEYTPSSRLSPLEACAHSFFDELRCLGTQLPNNRPLPPLFNFSAGELSIQPSLNAILIPPHLRSPAGTTTLTPSSQALTETPTSSDWQSTDATPTLTNSS

SEQ ID NO: 389 - protein, 986 aa, Homo sapiens
MPRATWANSKERSWAESERGPRDTGNGGSKAERHIQEIETGRGGDRAKAHRRQRMRLRGTERASLGPGRRLGDSRGTDMPGARAQGLAAAMTEESEETVLYIEHRYVCSECNQLYGSLEEVLMHQNSHVPQQHFELVGVADPGVTVATDTASGTGLYQTLVQESQYQCLECGQLLMSPSQLLEHQELHLKMMAPQEAVPAEPSPKAPPLSSSTIHYECVDCKALFASQELWLNHRQTHLRATPTKAPAPVVLGSPVVLGPPVGQARVAVEHSYRKAEEGGEGATVPSAAATTTEVVTEVELLLYKCSECSQLFQLPADFLEHQATHFPAPVPESQEPALQQEVQASSPAEVPVSQPDPLPASDHSYELRNGEAIGRDRRGRRARRNNSGEAGGAATQELFCSACDQLFLSPHQLQQHLRSHREGVFKCPLCSRVFPSPSSLDQHLGDHSSESHFLCVDCGLAFGTEALLLAHRRAHTPNPLHSCPCGKTFVNLTKFLYHRRTHGVGGVPLPTTPVPPEEPVIGFPEPAPAETGEPEAPEPPVSEETSAGPAAPGTYRCLLCSREFGKALQLTRHQRFVHRLERRHKCSICGKMFKKKSHVRNHLRTHTGERPFPCPDCSKPFNSPANLARHRLTHTGERPYRCGDCGKAFTQSSTLRQHRLVHAQHFPYRCQECGVRFHRPYRLLMHRYHHTGEYPYKCRECPRSFLLRRLLEVHQLVVHAGRQPHRCPSCGAAFPSSLRLREHRCAAAAAQAPRRFECGTCGKKVGSAARLQAHEAAHAAAGPGEVLAKEPPAPRAPRATRAPVASPAALGSTATASPAAPARRRGLECSECKKLFSTETSLQVHRRIHTGERPYPCPDCGKAFRQSTHLKDHRRLHTGERPFACEVCGKAFAISMRLAEHRRIHTGERPYSCPDCGKSYRSFSNLWKHRKTHQQQHQAAVRQQLAEAEAAVGLAVMETAVEALPLVEAIEIYPLAEAEGVQISG

SEQ ID NO: 390 - protein, 1781 aa, Homo sapiens
MTTYRAIPSDGVDLAASCGARVGDVLPGPHTGDYAPLGFWAQNGSMSQPLGESPATATATATATTRPSPTTPAMPKMGVRARVADWPPKREALREHSNPSPSQDTDGTKATKMAHSMRSIQNGQPPTSTPASSGSKAFHRLSRRRSKDVEFQDGWPRSPGRAFLPLRHRSSSEITLSECDAEDAGEPRGARHTGALPLFREYGSTSSIDVQGMPEQSFFDILNEFRSEQPDARGCQALTELLRADPGPHLMGGGGGAKGDSHNGQPAKDSLLPLQPTKEKEKARKKPARGLGGGDTVDSSIFRKLRSSKPEGEAGRSPGEADEGRSPPEASRPWVCQKSFAHFDVQSMLFDLNEAAANRVSVSQRRNTTTGASAASAASAMASLTASRAHSLGGLDPAFTSTEDLNCKENLEQDLGDDNSNDLLLSCPHFRNEIGGECERNVSFSRASVGSPSSGEGHLAEPALSAYRTNASISVLEVPKEQQRTQSRPRQYSIEHVDLGARYYQDYFVGKEHANYFGVDEKLGPVAVSIKREKLEDHKEHGPQYQYRIIFRTRELITLRGSILEDATPTATKHGTGRGLPLKDALEYVIPELNIHCLRLALNTPKVTEQLLKLDEQGLCRKHKVGILYCKAGQSSEEEMYNNEEAGPAFEEFLSLIGEKVCLKGFTKYAAQLDVKTDSTGTHSLYTMYQDYEIMFHVSTLLPYTPNNRQQLLRKRHIGNDIVTIIFQEPGALPFTPKNIRSHFQHVFIIVRVHNPCTDNVCYSMAVTRSKDAPPFGPPIPSGTTFRKSDVFRDFLLAKVINAENAAHKSDKFHTMATRTRQEYLKDLAENCVSNTPIDSTGKFNLISLTSKKKEKTKARAGAEQHSAGAIAWRVVAQDYAQGVEIDCILGISNEFVVLLDLRTKEVVFNCYCGDVIGWTPDSSTLKIFYGRGDHIFLQATEGSVEDIREIVQRLKVMTSGWETVDMTLRRNGLGQLGFHVKYDGTVAEVEDYGFAWQAGLRQGSRLVEICKVAVVTLTHDQMIDLLRTSVTVKVVIIPPFEDGTPRRGWPETYDMNTSEPKTEQESITPGGRPPYRSNAPWQWSGPASHNSLPASKWATPTTPGHAQSLSRPLKQTPIVPFRESQPLHSKRPVSFPETPYTVSPAGADRVPPYRQPSGSFSTPGSATYVRYKPSPERYTAAPHPLLSLDPHFSHDGTSSGDSSSGGLTSQESTMERQKPEPLWHVPAQARLSAIAGSSGNKHPSRQDAAGKDSPNRHSKGEPQYSSHSSSNTLSSNASSSHSDDRWFDPLDPLEPEQDPLSKGGSSDSGIDTTLYTSSPSCMSLAKAPRPAKPHKPPGSMGLCGGGREAAGRSHHADRRREVSPAPAVAGQSKGYRPKLYSSGSSTPTGLAGGSRDPPRQPSDMGSRVGYPAQVYKTASAETPRPSQLAQPSPFQLSASVPKSFFSKQPVRNKHPTGWKRTEEPPPRPLPFSDPKKQVDTNTKNVFGQPRLRASLRDLRSPRKNYKSTIEDDLKKLIIMDNLGPEQERDTGQSPQKGLQRTLSDESLCSGRREPSFASPAGLEPGLPSDVLFTSTCAFPSSTLPARRQHQHPHPPVGPGATPAAGSGFPEKKSTISASELSLADGRDRPLRRLDPGLMPLPDTAAGLEWSSLVNAAKAYEVQRAVSLFSLNDPALSPDIPPAHSPVHSHLSLERGPPTPRTTPTMSEEPPLDLTGKVYQLEVMLKQLHTDLQKEKQDKVVLQSEVASLRQNNQRLQEESQAASEQLRKFAEIFCREKKEL

SEQ ID NO: 391 - protein, 355 aa, Homo sapiens [sequence omitted]

SEQ ID NO: 392 - protein, 504 aa, Homo sapiens
MDLIPNFAMETWVLVATSLVLLYIYGTHSHKLFKKLGIPGPTPLPFLGTILFYLRGLWNFDRECNEKYGEMWGLYEGQQPMLVIMDPDMIKTVLVKECYSVFTNQMPLGPMGFLKSALSFAEDEEWKRIRTLLSPAFTSVKFKEMVPIISQCGDMLVRSLRQEAENSKSINLKDFFGAYTMDVITGTLFGVNLDSLNNPQDPFLKNMKKLLKLDFLDPFLLLISLFPFLTPVFEALNIGLFPKDVTHFLKNSIERMKESRLKDKQKHRVDFFQQMIDSQNSKETKSHKALSDLELVAQSIIIIFAAYDTTSTTLPFIMYELATHPDVQQKLQEEIDAVLPNKAPVTYDALVQMEYLDMVVNETLRLFPVVSRVTRVCKKDIEINGVFIPKGLAVMVPIYALHHDPKYWTEPEKFCPESRFSKKNKDSIDLYRYIPFGAGPRNCIGMRFALTNIKLAVIRALQNFSFKPCKETQIPLKLDNLPILQPEKPIVLKVHLRDGITSGP

SEQ ID NO: 393 - protein, 728 aa, Homo sapiens
MWVTKLLPALLLQHVLLHLLLLPIAIPYAEGQRKRRNTIHEFKKSAKTTLIKIDPALKIKTKKVNTADQCANRCTRNKGLPFTCKAFVFDKARKQCLWFPFNSMSSGVKKEFGHEFDLYENKDYIRNCIIGKGRSYKGTVSITKSGIKCQPWSSMIPHEHSFLPSSYRGKDLQENYCRNPRGEEGGPWCFTSNPEVRYEVCDIPQCSEVECMTCNGESYRGLMDHTESGKICQRWDHQTPHRHKFLPERYPDKGFDDNYCRNPDGQPRPWCYTLDPHTRWEYCAIKTCADNTMNDTDVPLETTECIQGQGEGYRGTVNTIWNGIPCQRWDSQYPHEHDMTPENFKCKDLRENYCRNPDGSESPWCFTTDPNIRVGYCSQIPNCDMSHGQDCYRGNGKNYMGNLSQTRSGLTCSMWDKNMEDLHRHIFWEPDASKLNENYCRNPDDDAHGPWCYTGNPLIPWDYCPISRCEGDTTPTIVNLDHPVISCAKTKQLRVVNGIPTRTNIGWMVSLRYRNKHICGGSLIKESWVLTARQCFPSRDLKDYEAWLGIHDVHGRGDEKCKQVLNVSQLVYGPEGSDLVLMKLARPAVLDDFVSTIDLPNYGCTIPEKTSCSVYGWGYTGLINYDGLLRVAHLYIMGNEKCSQHHRGKVTLNESEICAGAEKIGSGPCEGDYGGPLVCEQHKMRMVLGVIVPGRGCAIPNRPGIFVRVAYYAKWIHKIILTYKVPQS

SEQ ID NO: 394 - protein, 1786 aa, Homo sapiens
MGLLQLLAFSFLALCRARVRAQEPEFSYGCAEGSCYPATGDLLIGRAQKLSVTSTCGLHKPEPYCIVSHLQEDKKCFICNSQDPYHETLNPDSHLIENVVTTFAPNRLKIWWQSENGVENVTIQLDLEAEFHFTHLIMTFKTFRPAAMLIERSSDFGKTWGVYRYFAYDCEASFPGISTGPMKKVDDIICDSRYSDIEPSTEGEVIFRALDPAFKIEDPYSPRIQNLLKITNLRIKFVKLHTLGDNLLDSRMEIREKYYYAVYDMVVRGNCFCYGHASECAPVDGFNEEVEGMVHGHCMCRHNTKGLNCELCMDFYHDLPWRPAEGRNSNACKKCNCNEHSISCHFDMAVYLATGNVSGGVCDDCQHNTMGRNCEQCKPFYYQHPERDIRDPNFCERCTCDPAGSQNEGICDSYTDFSTGLIAGQCRCKLNVEGEHCDVCKEGFYDLSSEDPFGCKSCACNPLGTIPGGNPCDSETGHCYCKRLVTGQHCDQCLPEHWGLSNDLDGCRPCDCDLGGALNNSCFAESGQCSCRPHMIGRQCNEVEPGYYFATLDHYLYEAEEANLGPGVSIVERQYIQDRIPSWTGAGFVRVPEGAYLEFFIDNIPYSMEYDILIRYEPQLPDHWEKAVITVQRPGRIPTSSRCGNTIPDDDNQVVSLSPGSRYVVLPRPVCFEKGTNYTVRLELPQYTSSDSDVESPYTLIDSLVLMPYCKSLDIFTVGGSGDGVVTNSAWETFQRYRCLENSRSVVKTPMTDVCRNIIFSISALLHQTGLACECDPQGSLSSVCDPNGGQCQCRPNVVGRTCNRCAPGTFGFGPSGCKPCECHLQGSVNAFCNPVTGQCHCFQGVYARQCDRCLPGHWGFPSCQPCQCNGHADDCDPVTGECLNCQDYTMGHNCERCLAGYYGDPIIGSGDHCRPCPCPDGPDSGRQFARSCYQDPVTLQLACVCDPGYIGSRCDDCASGYFGNPSEVGGSCQPCQCHNNIDTTDPEACDKETGRCLKCLYHTEGEHCQFCRFGYYGDALQQDCRKCVCNYLGTVQEHCNGSDCQCDKATGQCLCLPNVIGQNCDRCAPNTWQLASGTGCDPCNCNAAHSFGPSCNEFTGQCQCMPGFGGRTCSECQELFWGDPDVECRACDCDPRGIETPQCDQSTGQCVCVEGVEGPRCDKCTRGYSGVFPDCTPCHQCFALWDVIIAELTNRTHRFLEKAKALKISGVIGPYRETVDSVERKVSEIKDILAQSPAAEPLKNIGNLFEEAEKLIKDVTEMMAQVEVKLSDTTSQSNSTAKELDSLQTEAESLDNTVKELAEQLEFIKNSDIRGALDSITKYFQMSLEAEERVNASTTEPNSTVEQSALMRDRVEDVMMERESQFKEKQEEQARLLDELAGKLQSLDLSAAAEMTCGTPPGASCSETECGGPNCRTDEGERKCGGPGCGGLVTVAHNAWQKAMDLDQDVLSALAEVEQLSKMVSEAKLRADEAKQSAEDILLKTNATKEKMDKSNEELRNLIKQIRNFLTQDSADLDSIEAVANEVLKMEMPSTPQQLQNLTEDIRERVESLSQVEVILQHSAADIARAEMLLEEAKRASKSATDVKVTADMVKEALEEAEKAQVAAEKAIKQADEDIQGTQNLLTSIESETAASEETLFNASQRISELERNVEELKRKAAQNSGEAEYIEKVVYTVKQSAEDVKKTLDGELDEKYKKVENLIAKKTEESADARRKAEMLQNEAKTLLAQANSKLQLLKDLERKYEDNQRYLEDKAQELARLEGEVRSLLKDISQKVAVYSTCL

SEQ ID NO: 395 - protein, 365 aa, Homo sapiens
MDRAALLGLARLCALWAALLVLFPYGAQGNWMWLGIASFGVPEKLGCANLPLNSRQKELCKRKPYLLPSIREGARLGIQECGSQFRHERWNCMITAAATTAPMGASPLFGYELSSGTKETAFIYAVMAAGLVHSVTRSCSAGNMTECSCDTTLQNGGSASEGWHWGGCSDDVQYGMWFSRKFLDFPIGNTTGKENKVLLAMNLHNNEAGRQAVAKLMSVDCRCHGVSGSCAVKTCWKTMSSFEKIGHLLKDKYENSIQISDKTKRKMRRREKDQRKIPIHKDDLLYVNKSPNYCVEDKKLGIPGTQGRECNRTSEGADGCNLLCCGRGYNTHVVRHVERCECKFIWCCYVRCRRCESMTDVHTCK

SEQ ID NO: 396 - protein, 419 aa, Homo sapiens
MAMRLILFFGALFGHIYCLETFVGDQVLEIVPSNEEQIKNLLQLEAQEHLQLDFWKSPTTPGETAHVRVPFVNVQAVKVFLESQGIAYSIMIEDVQVLLDKENEEMLFNRRRERSGNFNFGAYHTLEEISQEMDNLVAEHPGLVSKVNIGSSFENRPMNVLKFSTGGDKPAIWLDAGIHAREWVTQATALWTANKIVSDYGKDPSITSILDALDIFLLPVTNPDGYVFSQTKNRMWRKTRSKVSGSLCVGVDPNRNWDAGFGGPGASSNPCSDSYHGPSANSEVEVKSIVDFIKSHGKVKAFITLHSYSQLLMFPYGYKCTKLDDFDELSEVAQKAAQSLRSLHGTKYKVGPICSVIYQASGGSIDWSYDYGIKYSFAFELRDTGRYGFLLPARQILPTAEETWLGLKAIMEHVRDHPY

SEQ ID NO: 397 - protein, 769 aa, Homo sapiens
MCGSALAFFTAAFVCLQNDRRGPASFLWAAWVFSLVLGLGQGEDNRCASSNAASCARCLALGPECGWCVQEDFISGGSRSERCDIVSNLISKGCSVDSIEYPSVHVIIPTENEINTQVTPGEVSIQLRPGAEANFMLKVHPLKKYPVDLYYLVDVSASMHNNIEKLNSVGNDLSRKMAFFSRDFRLGFGSYVDKTVSPYISIHPERIHNQCSDYNLDCMPPHGYIHVLSLTENITEFEKAVHRQKISGNIDTPEGGFDAMLQAAVCESHIGWRKEAKRLLLVMTDQTSHLALDSKLAGIVVPNDGNCHLKNNVYVKSTTMEHPSLGQLSEKLIDNNINVIFAVQGKQFHWYKDLLPLLPGTIAGEIESKAANLNNLVVEAYQKLISEVKVQVENQVQGIYFNITAICPDGSRKPGMEGCRNVTSNDEVLFNVTVTMKKCDVTGGKNYAIIKPIGFNETAKIHIHRNCSCQCEDNRGPKGKCVDETFLDSKCFQCDENKCHFDEDQFSSESCKSHKDQPVCSGRGVCVCGKCSCHKIKLGKVYGKYCEKDDFSCPYHHGNLCAGHGECEAGRCQCFSGWEGDRCQCPSAAAQHCVNSKGQVCSGRGTCVCGRCECTDPRSIGRFCEHCPTCYTACKENWNCMQCLHPHNLSQAILDQCKTSCALMEQQHYVDQTSECFSSPSYLRIFFIIFIVTFLIGLLKVLIIRQVILQWNSNKIKSSSDYRVSASKKDKLILQSVCTRAVTYRREKPEEIKMDISKLNAHETFRCNF

SEQ ID NO: 398 - protein, 490 aa, Homo sapiens
MDHTDNELQGTNSSGSLGGLDVRRRIPIKLISKQANKAKPAPRTQRTINRMPAKAPPGDEGFDYNEEERYDCKGGELFANQRRFPGHLFWDFQINILGEKDDTPVHFCDKCGLPIKIYGRMIPCKHVFCYDCAILHEKKGDKMCPGCSDPVQRIEQCTRGSLFMCSIVQGCKRTYLSQRDLQAHINHRHMRAGKPVTRASLENVHPPIAPPPTEIPERFIMPPDKHHMSHIPPKQHIMMPPPPLQHVPHEHYNQPHEDIRAPPAELSMAPPPPRSVSQETFRISTRKHSNLITVPIQDDSNSGAREPPPPAPAPAHHHPEYQGQPVVSHPHHIMPPQQHYAPPPPPPPPISHPMPHPPQAAGTPHLVYSQAPPPPMTSAPPPITPPPGHIIAQMPPYMNHPPPGPPPPQHGGPPVTAPPPHHYNPNSLPQFTEDQGTLSPPFTQPGGMSPGIWPAPRGPPPPPRLQGPPSQTPLPGPHHPDQTRYRPYYQ

SEQ ID NO: 399 - protein, 540 aa, Homo sapiens
MQQVLENLTELPSSTGAEEIDLIFLKGIMENPIVKSLAKAHERLEDSKLEAVSDNNLELVNEILEDITPLINVDENVAELVGILKEPHFQSLLEAHDIVASKCYDSPPSSPEMNNSSINNQLLPVDAIRILGIHKRAGEPLGVTFRVENNDLVIARILHGGMIDRQGLLHVGDIIKEVNGHEVGNNPKELQELLKNISGSVTLKILPSYRDTITPQQVFVKCHFDYNPYNDNLIPCKEAGLKFSKGEILQIVNREDPNWWQASHVKEGGSAGLIPSQFLEEKRKAFVRRDWDNSGPFCGTISSKKKKKMMYLTTRNAEFDRHEIQIYEEVAKMPPFQRKTLVLIGAQGVGRRSLKNRFIVLNPTRFGTTVPFTSRKPREDEKDGQAYKFVSRSEMEADIKAGKYLEHGEYEGNLYGTKIDSILEVVQTGRTCILDVNPQALKVLRTSEFMPYVVFIAAPELETLRAMHKAVVDAGITTKLLTDSDLKKTVDESARIQRAYNHYFDLIIINDNLDKAFEKLQTAIEKLRMEPQWVPISWVY

SEQ ID NO: 400 - protein, 162 aa, Homo sapiens
MGLETEKADVQLFMDDDSYSHHSGLEYADPEKFADSDQDRDPHRLNSHLKLGFEDVIAEPVTTHSFDKVWICSHALFEISKYVMYKFLTVFLAIPLAFIAGILFATLSCLHIWILMPFVKTCLMVLPSVQTIWKSVTDVIIAPLCTSVGRCFSSVSLQLSQD

SEQ ID NO: 401 - protein, 376 aa, Homo sapiens
MNYEFEREIGFINSQPSLAECLTSFPPVADTFQSSSIKTSTLSHSTLIPPPFEQTIPSLNPGSHPRHGAGGRPKPSPAGSRGSPVPAGALQPPEYPWMKEKKAAKKTALLPAAAAAATAAATGPACLSHKESLEIADGSGGGSRRLRTAYTNTQLLELEKEFHFNKYLCRPRRVEIAALLDLTERQVKVWFQNRRMKHKRQTQCKENQNSEGKCKSLEDSEKVEEDEEEKTLFEQALSVSGALLEREGYTFQQNALSQQQAPNGHNGDSQSFPVSPLTSNEKNLKHFQHQSPTVPNCLSTMGQNCGAGLNNDSPEALEVPSLQDFSVFSTDSCLQLSDAVSPSLPGSLDSPVDISADSLDFFTDTLTTIDLQHLNY

SEQ ID NO: 402 - protein, 270 aa, Homo sapiens
MSSYFVNSFCGRYPNGPDYQLHNYGDHSSVSEQFRDSASMHSGRYGYGYNGMDLSVGRSGSGHFGSGERARSYAASASAAPAEPRYSQPATSTHSPQPDPLPCSAVAPSPGSDSHHGGKNSLSNSSGASADAGSTHISSREGVGTASGAEEDAPASSEQASAQSEPSPAPPAQPQIYPWMRKLHISHDNIGGPEGKRARTAYTRYQTLELEKEFHFNRYLTRRRRIEIAHALCLSERQIKIWFQNRRMKWKKDNKLKSMSMAAAGGAFRP

SEQ ID NO: 403 - protein, 305 aa, Homo sapiens
MAREDSVKCLRCLLYALNLLFWLMSISVLAVSAWMRDYLNNVLTLTAETRVEEAVILTYFPVVHPVMIAVCCFLIIVGMLGYCGTVKRNLLLLAWYFGSLLVIFCVELACGVWTYEQELMVPVQWSDMVTLKARMTNYGLPRYRWLTHAWNFFQREFKCCGVVYFTDWLEMTEMDWPPDSCCVREFPGCSKQAHQEDLSDLYQEGCGKKMYSFLRGTKQLQVLRFLGISIGVTQILAMILTITLLWALYYDRREPGTDQMMSLKNDNSQHLSCPSVELLKPSLSRIFEHTSMANSFNTHFEMEEL

SEQ ID NO: 404 - protein, 468 aa, Homo sapiens
MAASSNSSLSGSSVSSDAEEYQPPIWKSYLYQLQQEAPRPKRIICPREVENRPKYYGREFHGIISREQADELLGGVEGAYILRESQRQPGCYTLALRFGNQTLNYRLFHDGKHFVGEKRFESIHDLVTDGLITLYIETKAAEYISKMTTNPIYEHIGYATLLREKVSRRLSRSKNEPRKTNVTHEEHTAVEKISSLVRRAALTHNDNHFNYEKTHNFKVHTFRGPHWCEYCANFMWGLIAQGVRCSDCGLNVHKQCSKHVPNDCQPDLKRIKKVYCCDLTTLVKAHNTQRPMVVDICIREIEARGLKSEGLYRVSGFTEHIEDVKMAFDRDGEKADISANVYPDINIITGALKLYFRDLPIPVITYDTYSKFIDAAKISNADERLEAVHEVLMLLPPAHYETLRYLMIHLKKVTMNEKDNFMNAENLGIVFGPTLMRPPEDSTLTTLHDMRYQKLIVQILIENEDVLF

SEQ ID NO: 405 - protein, 953 aa, Homo sapiens
MEEQGHSEMEIIPSESHPHIQLLKSNRELLVTHIRNTQCLVDNLLKNDYFSAEDAEIVCACPTQPDKVRKILDLVQSKGEEVSEFFLYLLQQLADAYVDLRPWLLEIGFSPSLLTQSKVVVNTDPVSRYTQQLRHHLGRDSKFVLCYAQKEELLLEEIYMDTIMELVGFSNESLGSLNSLACLLDHTTGILNEQGETIFILGDAGVGKSMLLQRLQSLWATGRLDAGVKFFFHFRCRMFSCFKESDRLCLQDLLFKHYCYPERDPEEVFAFLLRFPHVALFTFDGLDELHSDLDLSRVPDSSCPWEPAHPLVLLANLLSGKLLKGASKLLTARTGIEVPRQFLRKKVLLRGFSPSHLRAYARRMFPERALQDRLLSQLEANPNLCSLCSVPLFCWIIFRCFQHFRAAFEGSPQLPDCTMTLTDVFLLVTEVHLNRMQPSSLVQRNTRSPVETLHAGRDTLCSLGQVAHRGMEKSLFVFTQEEVQASGLQERDMQLGFLRALPELGPGGDQQSYEFFHLTLQAFFTAFFLVLDDRVGTQELLRFFQEWMPPAGAATTSCYPPFLPFQCLQGSGPAREDLFKNKDHFQFTNLFLCGLLSKAKQKLLRHLVPAAALRRKRKALWAHLFSSLRGYLKSLPRVQVESFNQVQAMPTFIWMLRCIYETQSQKVGQLAARGICANYLKLTYCNACSADCSALSFVLHHFPKRLALDLDNNNLNDYGVRELQPCFSRLTVLRLSVNQITDGGVKVLSEELTKYKIVTYLGLYNNQITDVGARYVTKILDECKGLTHLKLGKNKITSEGGKYLALAVKNSKSISEVGMWGNQVGDEGAKAFAEALRNHPSLTTLSLASNGISTEGGKSLARALQQNTSLEILWLTQNELNDEVAESLAEMLKVNQTLKHLWLIQNQITAKGTAQLADALQSNTGITEICLNGNLIKPEEAKVYEDEKRIICF

SEQ ID NO: 406 - protein, 502 aa, Homo sapiens
MDLIPNLAVETWLLLAVSLVLLYLYGTRTHGLFKRLGIPGPTPLPLLGNVLSYRQGLWKFDTECYKKYGKMWGTYEGQLPVLAITDPDVIRTVLVKECYSVFTNRRSLGPVGFMKSAISLAEDEEWKRIRSLLSPTFTSGKLKEMFPIIAQYGDVLVRNLRREAEKGKPVTLKDIFGAYSMDVITGTSFGVNIDSLNNPQDPFVESTKKFLKFGFLDPLFLSIILFPFLTPVFEALNVSLFPKDTINFLSKSVNRMKKSRLNDKQKHRLDFLQLMIDSQNSKETESHKALSDLELAAQSIIFIFAGYETTSSVLSFTLYELATHPDVQQKLQKEIDAVLPNKAPPTYDAVVQMEYLDMVVNETLRLFPVAIRLERTCKKDVEINGVFIPKGSMVVIPTYALHHDPKYWTEPEEFRPERFSKKKDSIDPYIYTPFGTGPRNCIGMRFALMNMKLALIRVLQNFSFKPCKETQIPLKLDTQGLLQPEKPIVLKVDSRDGTLSGE

SEQ ID NO: 407 - protein, 465 aa, Homo sapiens
MTGRAMDPLPAAAVGAAAEAEADEEADPPASDLPTPQAIEPQAIVQQVPAPSRMQMPQGNPLLLSHTLQELLARDTVQVELIPEKKGLFLKHVEYEVSSQRFKSSVYRRYNDFVVFQEMLLHKFPYRMVPALPPKRMLGADREFIEARRRALKRFVNLVARHPLFSEDVVLKLFLSFSGSDVQNKLKESAQCVGDEFLNCKLATRAKDFLPADIQAQFAISRELIRNIYNSFHKLRDRAERIASRAIDNAADLLIFGKELSAIGSDTTPLPSWAALNSSTWGSLKQALKGLSVEFALLADKAAQQGKQEENDVVEKLNLFLDLLQSYKDLCERHEKGVLHKHQRALHKYSLMKRQMMSATAQNREPESVEQLESRIVEQENAIQTMELRNYFSLYCLHQETQLIHVYLPLTSHILRAFVNSQIQGHKEMSKVWNDLRPKLSCLFAGPHSTLTPPCSPPEDGLCPH

SEQ ID NO: 408 - protein, 505 aa, Homo sapiens
MSSVQQQPPPPRRVTNVGSLLLTPQENESLFTFLGKKCVTMSSAVVQLYAADRNCMWSKKCSGVACLVKDNPQRSYFLRIFDIKDGKLLWEQELYNNFVYNSPRGYFHTFAGDTCQVALNFANEEEAKKFRKAVTDLLGRRQRKSEKRRDPPNGPNLPMATVDIKNPEITTNRFYGPQVNNISHTKEKKKGKAKKKRLTKADIGTPSNFQHIGHVGWDPNTGFDLNNLDPELKNLFDMCGISEAQLKDRETSKVIYDFIEKTGGVEAVKNELRRQAPPPPPPSRGGPPPPPPPPHNSGPPPPPARGRGAPPPPPSRAPTAAPPPPPPSRPSVAVPPPPPNRMYPPPPPALPSSAPSGPPPPPPSVLGVGPVAPPPPPPPPPPPGPPPPPGLPSDGDHQVPTTAGNKAALLDQIREGAQLKKVEQNSRPVSCSGRDALLDQIRQGIQLKSVADGQESTPPTPAPTSGIVGALMEVMQKRSKAIHSSDEDEDEDDEEDFEDDDEWED

SEQ ID NO: 409 - protein, 481 aa, Homo sapiens
MKVLSEGQLKLCVVQPVHLTSWLLIFFILKSISCLKPARLPIYQRKPFIAAWNAPTDQCLIKYNLRLNLKMFPVIGSPLAKARGQNVTIFYVNRLGYYPWYTSQGVPINGGLPQNISLQVHLEKADQDINYYIPAEDFSGLAVIDWEYWRPQWARNWNSKDVYRQKSRKLISDMGKNVSATDIEYLAKVTFEESAKAFMKETIKLGIKSRPKGLWGYYLYPDCHNYNVYAPNYSGSCPEDEVLRNNELSWLWNSSAALYPSIGVWKSLGDSENILRFSKFRVHESMRISTMTSHDYALPVFVYTRLGYRDEPLFFLSKQDLVSTIGESAALGAAGIVIWGDMNLTASKANCTKVKQFVSSDLGSYIANVTRAAEVCSLHLCRNNGRCIRKMWNAPSYLHLNPASYHIEASEDGEFTVKGKASDTDLAVMADTFSCHCYQGYEGADCREIKTADGCSGVSPSPGSLMTLCLLLLASYRSIQL

SEQ ID NO: 410 - protein, 509 aa, Homo sapiens
MGVLKFKHIFFRSFVKSSGVSQIVFTFLLIPCCLTLNFRAPPVIPNVPFLWAWNAPSEFCLGKFDEPLDMSLFSFIGSPRINATGQGVTIFYVDRLGYYPYIDSITGVTVNGGIPQKISLQDHLDKAKKDITFYMPVDNLGMAVIDWEEWRPTWARNWKPKDVYKNRSIELVQQQNVQLSLTEATEKAKQEFEKAGKDFLVETIKLGKLLRPNHLWGYYLFPDCYNHHYKKPGYNGSCFNVEIKRNDDLSWLWNESTALYPSIYLNTQQSPVAATLYVRNRVREAIRVSKIPDAKSPLPVFAYTRIVFTDQVLKFLSQDELVYTFGETVALGASGIVIWGTLSIMRSMKSCLLLDNYMETILNPYIINVTLAAKMCSQVLCQEQGVCIRKNWNSSDYLHLNPDNFAIQLEKGGKFTVRGKPTLEDLEQFSEKFYCSCYSTLSCKEKADVKDTDAVDVCIADGVCIDAFLKPPMETEEPQIFYNASPSTLSATMFIVSILFLIISSVASL

SEQ ID NO: 411 - protein, 759 aa, Homo sapiens
MAGLTLFVGRLPPSARSEQLEELFSQVGPVKQCFVVTEKGSKACRGFGYVTFSMLEDVQRALKEITTFEGCKINVTVAKKKLRNKTKEKGKNENSECPKKEPKAKKAKVADKKARLIIRNLSFKCSEDDLKTVFAQFGAVLEVNIPRKPDGKMRGFGFVQFKNLLEAGKALKGMNMKEIKGRTVAVDWAVAKDKYKDTQSVSAIGEEKSHESKHQESVKKKGREEEDMEEEENDDDDDDDDEEDGVFDDEDEEEENIESKVTKPVQIQKRAVKRPAPAKSSDHSEEDSDLEESDSIDDGEELAQSDTSTEEQEDKAVQVSNKKKRKLPSDVNEGKTVFIRNLSFDSEEEELGELLQQFGELKYVRIVLHPDTEHSKGCAFAQFMTQEAAQKCLLAASPENEAGGLKLDGRQLKVDLAVTRDEAAKLQTTKVKKPTGTRNLYLAREGLIRAGTKAAEGVSAADMAKRERFELLKHQKLKDQNIFVSRTRLCLHNLPKAVDDKQLRKLLLSATSGEKGVRIKECRVMRDLKGVHGNMKGQSLGYAFAEFQEHEHALKALRLINNNPEIFGPLKRPIVEFSLEDRRKLKMKELRIQRSLQKMRSKPATGEPQKGQPEPAKDQQQKAAQHHTEEQSKVPPEQKRKAGSTSWTGFQTKAEVEQVELPDGKKRRKVLALPSHRGPKIRLRDKGKVKPVHPKKPKPQINQWKQEKQQLSSEQVSRKKAKGNKTETRFNQLVEQYKQKLLGPSKGAPLAKRSKWFDS

SEQ ID NO: 412 - protein, 738 aa, Homo sapiens
MTSSGPGPRFLLLLPLLLPPAASASDRPRGRDPVNPEKLLVITVATAETEGYLRFLRSAEFFNYTVRTLGLGEEWRGGDVARTVGGGQKVRWLKKEMEKYADREDMIIMFVDSYDVILAGSPTELLKKFVQSGSRLLFSAESFCWPEWGLAEQYPEVGTGKRFLNSGGFIGFATTIHQIVRQWKYKDDDDDQLFYTRLYLDPGLREKLSLNLDHKSRIFQNLNGALDEVVLKFDRNRVRIRNVAYDTLPIVVHGNGPTKLQLNYLGNYVPNGWTPEGGCGFCNQDRRTLPGGQPPPRVFLAVFVEQPTPFLPRFLQRLLLLDYPPDRVTLFLHNNEVFHEPHIADSWPQLQDHFSAVKLVGPEEALSPGEARDMAMDLCRQDPECEFYFSLDADAVLTNLQTLRILIEENRKVIAPMLSRHGKLWSNFWGALSPDEYYARSEDYVELVQRKRVGVWNVPYISQAYVIRGDTLRMELPQRDVFSGSDTDPDMAFCKSFRDKGIFLHLSNQHEFGRLLATSRYDTEHLHPDLWQIFDNPVDWKEQYIHENYSRALEGEGIVEQPCPDVYWFPLLSEQMCDELVAEMEHYGQWSGGRHEDSRLAGGYENVPTVDIHMKQVGYEDQWLQLLRTYVGPMTESLFPGYHTKARAVMNFVVRYRPDEQPSLRPHHDSSTFTLNVALNHKGLDYEGGGCRFLRYDCVISSPRKGWALLHPGRLTHYHEGLPTTWGTRYIMVSFVDP

SEQ ID NO: 413 - protein, 503 aa, Homo sapiens
MEEHGVTQTEHMATIEAHAVAQQVQQVHVATYTEHSMLSADEDSPSSPEDTSYDDSDILNSTAADEVTAHLAAAGPVGMAAAAAVATGKKRKRPHVFESNPSIRKRQQTRLLRKLRATLDEYTTRVGQQAIVLCISPSKPNPVFKVFGAAPLENVVRKYKSMILEDLESALAEHAPAPQEVNSELPPLTIDGIPVSVDKMTQAQLRAFIPEMLKYSTGRGKPGWGKESCKPIWWPEDIPWANVRSDVRTEEQKQRVSWTQALRTIVKNCYKQHGREDLLYAFEDQQTQTQATATHSIAHLVPSQTVVQTFSNPDGTVSLIQVGTGATVATLADASELPTTVTVAQVNYSAVADGEVEQNWATLQGGEMTIQTTQASEATQAVASLAEAAVAASQEMQQGATVTMALNSEAAAHAVATLAEATLQGGGQIVLSGETAAAVGALTGVQDANGLVQIPVSMYQTVVTSLAQGNGPVQVAMAPVTTRISDSAVTMDGQAVEVVTLEQ

SEQ ID NO: 414 - protein, 707 aa, Homo sapiens
MGQTGKKSEKGPVCWRKRVKSEYMRLRQLKRFRRADEVKSMFSSNRQKILERTEILNQEWKQRRIQPVHILTSVSSLRGTREVEDETVLHNIPYMGDEVLDQDGTFIEELIKNYDGKVHGDRECGFINDEIFVELVNALGQYNDDDDDDDGDDPEEREEKQKDLEDHRDDKESRPPRKFPSDKIFEAISSMFPDKGTAEELKEKYKELTEQQLPGALPPECTPNIDGPNAKSVQREQSLHSFHTLFCRRCFKYDCFLHPFHATPNTYKRKNTETALDNKPCGPQCYQHLEGAKEFAAALTAERIKTPPKRPGGRRRGRLPNNSSRPSTPTINVLESKDTDSDREAGTETGGENNDKEEEEKKDETSSSSEANSRCQTPIKMKPNIEPPENVEWSGAEASMFRVLIGTYYDNFCAIARLIGTKTCRQVYEFRVKESSIIAPAPAEDVDTPPRKKKRKHRLWAAHCRKIQLKKDGSSNHVYNYQPCDHPRQPCDSSCPCVIAQNFCEKFCQCSSECQNRFPGCRCKAQCNTKQCPCYLAVRECDPDLCLTCGAADHWDSKNVSCKNCSIQRGSKKHLLLAPSDVAGWGIFIKDPVQKNEFISEYCGEIISQDEADRRGKVYDKYMCSFLFNLNNDFVVDATRKGNKIRFANHSVNPNCYAKVMMVNGDHRIGIFAKRAIQTGEELFFDYRYSQADALKYVGIEREMEIP

SEQ ID NO: 415 - protein, 1169 aa, Homo sapiens
MEPRESGKAPVTFDDITVYLLQEEWVLLSQQQKELCGSNKLVAPLGPTVANPELFRKFGRGPEPWLGSVQGQRSLLEHHPGKKQMGYMGEMEVQGPTRESGQSLPPQKKAYLSHLSTGSGHIEGDWAGRNRKLLKPRSIQKSWFVQFPWLIMNEEQTALFCSACREYPSIRDKRSRLIEGYTGPFKVETLKYHAKSKAHMFCVNALAARDPIWAARFRSIRDPPGDVLASPEPLFTADCPIFYPPGPLGGFDSMAELLPSSRAELEDPGGDGAIPAMYLDCISDLRQKEITDGIHSSSDINILYNDAVESCIQDPSAEGLSEEVPVVFEELPVVFEDVAVYFTREEWGMLDKRQKELYRDVMRMNYELLASLGPAAAKPDLISKLERRAAPWIKDPNGPKWGKGRPPGNKKMVAVREADTQASAADSALLPGSPVEARASCCSSSICEEGDGPRRIKRTYRPRSIQRSWFGQFPWLVIDPKETKLFCSACIERPNLHDKSSRLVRGYTGPFKVETLKYHEVSKAHRLCVNTVEIKEDTPHTALVPEISSDLMANMEHFFNAAYSIAYHSRPLNDFEKILQLLQSTGTVILGKYRNRTACTQFIKYISETLKREILEDVRNSPCVSVLLDSSTDASEQACVGIYIRYFKQMEVKESYITLAPLYSETADGYFETIVSALDELDIPFRKPGWVVGLGTDGSAMLSCRGGLVEKFQEVIPQLLPVHCVAHRLHLAVVDACGSIDLVKKCDRHIRTVFKFYQSSNKRLNELQEGAAPLEQEIIRLKDLNAVRWVASRRRTLHALLVSWPALARHLQRVAEAGGQIGHRAKGMLKLMRGFHFVKFCHFLLDFLSIYRPLSEVCQKEIVLITEVNATLGRAYVALESLRHQAGPKEEEFNASFKDGRLHGICLDKLEVAEQRFQADRERTVLTGIEYLQQRFDADRPPQLKNMEVFDTMAWPSGIELASFGNDDILNLARYFECSLPTGYSEEALLEEWLGLKTIAQHLPFSMLCKNALAQHCRFPLLSKLMAVVVCVPISTSCCERGFKAMNRIRTDERTKLSNEVLNMLMMTAVNGVAVTEYDPQPAIQHWYLTSSGRRFSHVYTCAQVPARSPASARLRKEEMGALYVEEPRTQKPPILPSREAAEVLKDCIMEPPERLLYPHTSQEAPGMS

SEQ ID NO: 416 - protein, 1158 aa, Homo sapiens
MAAVRGAPLLSCLLALLALCPGGRPQTVLTDDEIEEFLEGFLSELEPEPREDDVEAPPPPEPTPRVRKAQAGGKPGKRPGTAAEVPPEKTKDKGKKGKKDKGPKVPKESLEGSPRPPKKGKEKPPKATKKPKEKPPKATKKPKEKPPKATKKPKEKPPKATKKPPSGKRPPILAPSETLEWPLPPPPSPGPEELPQEGGAPLSNNWQNPGEETHVEAREHQPEPEEETEQPTLDYNDQIEREDYEDFEYIRRQKQPRPPPSRRRRPERVWPEPPEEKAPAPAPEERIEPPVKPLLPPLPPDYGDGYVIPNYDDMDYYFGPPPPQKPDAERQTDEEKEELKKPKKEDSSPKEETDKWAVEKGKDHKEPRKGEELEEEWTPTEKVKCPPIGMESHRIEDNQIRASSMLRHGLGAQRGRLNMQTGATEDDYYDGAWCAEDDARTQWIEVDTRRTTRFTGVITQGRDSSIHDDFVTTFFVGFSNDSQTWVMYTNGYEEMTFHGNVDKDTPVLSELPEPVVARFIRIYPLTWNGSLCMRLEVLGCSVAPVYSYYAQNEVVATDDLDFRHHSYKDMRQLMKVVNEECPTITRTYSLGKSSRGLKIYAMEISDNPGEHELGEPEFRYTAGIHGNEVLGRELLLLLMQYLCREYRDGNPRVRSLVQDTRIHLVPSLNPDGYEVAAQMGSEFGNWALGLWTEEGFDIFEDFPDLNSVLWGAEERKWVPYRVPNNNLPIPERYLSPDATVSTEVRAIIAWMEKNPFVLGANLNGGERLVSYPYDMARTPTQEQLLAAAMAAARGEDEDEVSEAQETPDHAIFRWLAISFASAHLTLTEPYRGGCQAQDYTGGMGIVNGAKWNPRTGTINDFSYLHTNCLELSFYLGCDKFPHESELPREWENNKEALLTFMEQVHRGIKGVVTDEQGIPIANATISVSGINHGVKTASGGDYWRILNPGEYRVTAHAEGYTPSAKTCNVDYDIGATQCNFILARSNWKRIREIMAMNGNRPIPHIDPSRPMTPQQRRLQQRRLQHRLRLRAQMRLRRLNATTTLGPHTVPPTLPPAPATTLSTTIEPWGLIPPTTAGWEESETETYTEVVTEFGTEVEPEFGTKVEPEFETQLEPEFETQLEPEFEEEEEEEKEEEIATGQAFPFTTVETYTVNFGDF

SEQ ID NO: 417 - protein, 466 aa, Homo sapiens
MAMDVTRSQAQTALTLVEQILAEFQLQEEDLKKVMRRMQKEMDRGLRLETHEEASVKMLPTYVRSTPEGSEVGDFLSLDLGGTNFRVMLVKVGEGEEGQWSVKTKHQMYSIPEDAMTGTAEMLFDYISECISDFLDKHQMKHKKLPLGFTFSFPVRHEDIDKGILLNWTKGFKASGAEGNNVVGLLRDAIKRRGDFEMDVVAMVNDTVATMISCYYEDHQCEVGMIVGTGCNACYMEEMQNVELVEGDEGRMCVNTEWGAFGDSGELDEFLLEYDRLVDESSANPGQQLYEKLIGGKYMGELVRLVLLRLVDENLLFHGEASEQLRTRGAFETRFVSQVESDTGDRKQIYNILSTLGLRPSTTDCDIVRRACESVSTRAAHMCSAGLAGVINRMRESRSEDVMRITVGVDGSVYKLHPSFKERFHASVRRLTPSCEITFIESEEGSGRGAALVSAVACKKACMLGQ

SEQ ID NO: 418 - protein, 198 aa, Homo sapiens
MKLYSLSVLYKGEAKVVLLKAAYDVSSFSFFQRSSVQEFMTFTSQLIVERSSKGTRASVKEQDYLCHVYVRNDSLAGVVIADNEYPSRVAFTLLEKVLDEFSKQVDRIDWPVGSPATIHYPALDGHLSRYQNPREADPMTKVQAELDETKIILHNTMESLLERGEKLDDLVSKSEVLGTQSKAFYKTARKQNSCCAIM

SEQ ID NO: 419 - protein, 1046 aa, Homo sapiens
MQKPSGLKPPGRGGKHSSPMGRTSTGSASSSAAVAASSKEGSPLHKQSSGPSSSPAAAAAPEKPGPKAAEVGDDFLGDFVVGERVWVNGVKPGVVQYLGETQFAPGQWAGVVLDDPVGKNDGAVGGVRYFECPALQGIFTRPSKLTRQPTAEGSGSDAHSVESLTAQNLSLHSGTATPPLTSRVIPLRESVLNSSVKTGNESGSNLSDSGSVKRGEKDLRLGDRVLVGGTKTGVVRYVGETDFAKGEWCGVELDEPLGKNDGAVAGTRYFQCPPKFGLFAPIHKVIRIGFPSTSPAKAKKTKRMAMGVSALTHSPSSSSISSVSSVASSVGGRPSRSGLLTETSSRYARKISGTTALQEALKEKQQHIEQLLAERDLERAEVAKATSHICEVEKEIALLKAQHEQYVAEAEEKLQRARLLVESVRKEKVDLSNQLEEERRKVEDLQFRVEEESITKGDLETQTQLEHARIGELEQSLLLEKAQAERLLRELADNRLTTVAEKSRVLQLEEELTLRRGEIEELQQCLLHSGPPPPDHPDAAEILRLRERLLSASKEHQRESGVLRDKYEKALKAYQAEVDKLRAANEKYAQEVAGLKDKVQQATSENMGLMDNWKSKLDSLASDHQKSLEDLKATLNSGPGAQQKEIGELKAVMEGIKMEHQLELGNLQAKHDLETAMHVKEKEALREKLQEAQEELAGLQRHWRAQLEVQASQHRLELQEAQDQRRDAELRVHELEKLDVEYRGQAQAIEFLKEQISLAEKKMLDYERLQRAEAQGKQEVESLREKLLVAENRLQAVEALCSSQHTHMIESNDISEETIRTKETVEGLQDKLNKRDKEVTALTSQTEMLRAQVSALESKCKSGEKKVDALLKEKRRLEAELETVSRKTHDASGQLVLISQELLRKERSLNELRVLLLEANRHSPGPERDLSREVHKAEWRIKEQKLKDDIRGLREKLTGLDKEKSLSDQRRYSLIDRSSAPELLRLQHQLMSTEDALRDALDQAQQVEKLMEAMRSCPDKAQTIGNSGSANGIHQQDKAQKQEDKH

SEQ ID NO: 420 - protein, 562 aa, Homo sapiens
MSRSLLLWFLLFLLLLPPLPVLLADPGAPTPVNPCCYYPCQHQGICVRFGLDRYQCDCTRTGYSGPNCTIPGLWTWLRNSLRPSPSFTHFLLTHGRWFWEFVNATFIREMLMRLVLTVRSNLIPSPPTYNSAHDYISWESFSNVSYYTRILPSVPKDCPTPMGTKGKKQLPDAQLLARRFLLRRKFIPDPQGTNLMFAFFAQHFTHQFFKTSGKMGPGFTKALGHGVDLGHIYGDNLERQYQLRLFKDGKLKYQVLDGEMYPPSVEEAPVLMHYPRGIPPQSQMAVGQEVFGLLPGLMLYATLWLREHNRVCDLLKAEHPTWGDEQLFQTTRLILIGETIKIVIEEYVQQLSGYFLQLKFDPELLFGVQFQYRNRIAMEFNHLYHWHPLMPDSFKIGGGRNMDHHILHVAVDVIRESREMRLQPFNEYRKRFGMKPYTSFQELVGEKEMAAELEELYGDIDALEFYPGLLLEKCHPNSIFGESMIEIGAPFSLKGLLGNPICSPEYWKPSTFGGEVGFNIVKTATLKKLVCLNTKTCPYVSFRVPDASQDDGPAVERPSTEL

SEQ ID NO: 421 - protein, 683 aa, Homo sapiens
MSPHPEAITDCVTLNTVGQLAEGGYPLRFSTLFQEQQKMNISQASVSFKDVTIEFTQEEWQQMAPVQKNLYRDVMLENYSNLVSVGYCCFKPEVIFKLEQGEEPWFSEEEFSNQSHPKDYRGDDLIKQNKKIKDKHLEQAICINNKTLTTEEEKVLGKPFTLHVAAVASTKMSCKCNSWEVNLQSISEFIINNRNYSTKKIGCGNVCENSPFKINFEKTQTGEKFYEHNKNMKALNYNENLPKHPKFQTLEQAFECNKIGKAFNDKANCVKHNSSHTGETSSKDDEFRKNCDKKTLFDHRRTGTGKKHLHLNQCGKSFEKSTVEEYNKLNMGIKHYELNPSGNNFNRKAHLTDPQTAVIEENPLVSNDRTQTWVKSSEYHENKKSYQTSVHRVRRRSHSMMKPYKCNECGKSFCQKGHLIQHQRTHTGEKPFECSECGKTFSQKSHLSTHQRIHTAEKPYKCNECGKTFVQKSTLRGHQRIHTGEKPYECSECGKTFVQKSTLRDHHRIHTGEKSFQCNQCGKTFGQKSNLRIHQRTHTGEKTYQCNECEKSFWRKDHLIQHQKTHTGEKPFKCNECGKTFARTSTLRVHQRIHTGEKPFKCNECGKKFVRKAILSDHQRIHTGEKPFQCNKCGKTFGQKSNLRIHQRTHSGEKSYECNEYGKLCKKSTLSLYQKIQGEGNPY

SEQ ID NO: 422 - protein, 1676 aa, Homo sapiens
MGLLGILCFLIFLGKTWGQEQTYVISAPKIFRVGASENIVIQVYGYTEAFDATISIKSYPDKKFSYSSGHVHLSSENKFQNSAILTIQPKQLPGGQNPVSYVYLEVVSKHFSKSKRMPITYDNGFLFIHTDKPVYTPDQSVKVRVYSLNDDLKPAKRETVLTFIDPEGSEVDMVEEIDHIGIISFPDFKIPSNPRYGMWTIKAKYKEDFSTTGTAYFEVKEYVLPHFSVSIEPEYNFIGYKNFKNFEITIKARYFYNKVVTEADVYITFGIREDLKDDQKEMMQTAMQNTMLINGIAQVTFDSETAVKELSYYSLEDLNNKYLYIAVTVIESTGGFSEEAEIPGIKYVLSPYKLNLVATPLFLKPGIPYPIKVQVKDSLDQLVGGVPVTLNAQTIDVNQETSDLDPSKSVTRVDDGVASFVLNLPSGVTVLEFNVKTDAPDLPEENQAREGYRAIAYSSLSQSYLYIDWTDNHKALLVGEHLNIIVTPKSPYIDKITHYNYLILSKGKIIHFGTREKFSDASYQSINIPVTQNMVPSSRLLVYYIVTGEQTAELVSDSVWLNIEEKCGNQLQVHLSPDADAYSPGQTVSLNMATGMDSWVALAAVDSAVYGVQRGAKKPLERVFQFLEKSDLGCGAGGGLNNANVFHLAGLTFLTNANADDSQENDEPCKEILRPRRTLQKKIEEIAAKYKHSVVKKCCYDGACVNNDETCEQRAARISLGPRCIKAFTECCVVASQLRANISHKDMQLGRLHMKTLLPVSKPEIRSYFPESWLWEVHLVPRRKQLQFALPDSLTTWEIQGVGISNTGICVADTVKAKVFKDVFLEMNIPYSVVRGEQIQLKGTVYNYRTSGMQFCVKMSAVEGICTSESPVIDHQGTKSSKCVRQKVEGSSSHLVTFTVLPLEIGLHNINFSLETWFGKEILVKTLRVVPEGVKRESYSGVTLDPRGIYGTISRRKEFPYRIPLDLVPKTEIKRILSVKGLLVGEILSAVLSQEGINILTHLPKGSAEAELMSVVPVFYVFHYLETGNHWNIFHSDPLIEKQKLKKKLKEGMLSIMSYRNADYSYSVWKGGSASTWLTAFALRVLGQVNKYVEQNQNSICNSLLWLVENYQLDNGSFKENSQYQPIKLQGTLPVEARENSLYLTAFTVIGIRKAFDICPLVKIDTALIKADNFLLENTLPAQSTFTLAISAYALSLGDKTHPQFRSIVSALKREALVKGNPPIYRFWKDNLQHKDSSVPNTGTARMVETTAYALLTSLNLKDINYVNPVIKWLSEEQRYGGGFYSTQDTINAIEGLTEYSLLVKQLRLSMDIDVSYKHKGALHNYKMTDKNFLGRPVEVLLNDDLIVSTGFGSGLATVHVTTVVHKTSTSEEVCSFYLKIDTQDIEASHYRGYGNSDYKRIVACASYKPSREESSSGSSHAVMDISLPTGISANEEDLKALVEGVDQLFTDYQIKDGHVILQLNSIPSSDFLCVRFRIFELFEVGFLSPATFTVYEYHRPDKQCTMFYSTSNIKIQKVCEGAACKCVEADCGQMQEELDLTISAETRKQTACKPEIAYAYKVSITSITVENVFVKYKATLLDIYKTGEAVAEKDSEITFIKKVTCTNAELVKGRQYLIMGKEALQIKYNFSFRYIYPLDSLTWIEYWPRDTTCSSCQAFLANLDEFAEDIFLNGC

SEQ ID NO: 423 - protein, 899 aa, Homo sapiens
MPTLGWLPENRDISEDQSSAEQTQALASQASQFLAKVESFERLIQAGRLMPQDQVKGFQRLKAAHAALEEEYLKACREQHPAQPLAGSKGTPGRFDPRRELEAEIYRLGSCLEELKEHIDQTQQEPEPPGSDSALDSTPALPCLHQPTHLPAPSGQAPMPAIKTSCPEPATTTAAASTGPCPLHVNVEVSSGNSEVEDRPQDPLARLRHKELQMEQVYHGLMERYLSVKSLPEAMRMEEEEEGEEEEEEEGGGDSLEVDGVAATPGKAEATRVLPRQCPVQAEKSHGAPLEEATEKMVSMKPPGFQASLARDGHMSGLGKAEAAPPGPGVPPHPPGTKSAASHQSSMTSLEGSGISERLPQKPLHRGGGPHLEETWMASPETDSGFVGSETSRVSPLTQTPEHRLSHISTAGTLAQPFAASVPRDGASYPKARGSLIPRRATEPSTPRSQAQRYLSSPSGPLRQRAPNFSLERTLAAEMAVPGSEFEGHKRISEQPLPNKTISPPPAPAPAAAPLPCGPTETIPSFLLTRAGRDQAICELQEEVSRLRLRLEDSLHQPLQGSPTRPASAFDRPARTRGRPADSPATWGSHYGSKSTERLPGEPRGEEQIVPPGRQRARSSSVPREVLRLSLSSESELPSLPLFSEKSKTTKDSPQAARDGKRGVGSAGWPDRVTFRGQYTGHEYHVLSPKAVPKGNGTVSCPHCRPIRTQDAGGAVTGDPLGPPPADTLQCPLCGQVGSPPEADGPGSATSGAEKATTRRKASSTPSPKQRSKQAGSSPRPPPGLWYLATAPPAPAPPAFAYISSVPIMPYPPAAVYYAPAGPTSAQPAAKWPPTASPPPARRHRHSIQLDLGDLEELNKALSRAVQAAESVRSTTRQMRSSLSADLRQAHSLRGSCLF

SEQ ID NO: 424 - protein, 234 aa, Homo sapiens
MDPGLQQALNGMAPPGDTAMHVPAGSVASHLGTTSRSYFYLTTATLALCLVFTVATIMVLVVQRTDSIPNSPDNVPLKGGNCSEDLLCILKRAPFKKSWAYLQVAKHLNKTKLSWNKDGILHGVRYQDGNLVIQFPGLYFIICQLQFLVQCPNNSVDLKLELLINKHIKKQALVTVCESGMQTKHVYQNLSQFLLDYLQVNTTISVNVDTFQYIDTSTFPLENVLSIFLYSNSD

SEQ ID NO: 425 - protein, 185 aa, Homo sapiens
MPRLFLFHLLEFCLLLNQFSRAVAAKWKDDVIKLCGRELVRAQIAICGMSTWSKRSLSQEDAPQTPRPVAEIVPSFINKDTETIIIMLEFIANLPPELKAALSERQPSLPELQQYVPALKDSNLSFEEFKKLIRNRQSEAADSNPSELKYLGLDTHSQKKRRPYVALFEKCCLIGCTKRSLAKYC

SEQ ID NO: 426 - protein, 346 aa, Homo sapiens
METQLSNGPTCNNTANGPTTINNNCSSPVDSGNTEDSKTNLIVNYLPQNMTQEELKSLFGSIGEIESCKLVRDKITGQSLGYGFVNYIDPKDAEKAINTLNGLRLQTKTIKVSYARPSSASIRDANLYVSGLPKTMTQKELEQLFSQYGRIITSRILVDQVTGISRGVGFIRFDKRIEAEEAIKGLNGQKPPGATEPITVKFANNPSQKTNQAILSQLYQSPNRRYPGPLAQQAQRFRFSPMTIDGMTSLAGINIPGHPGTGWCIFVYNLAPDADESILWQMFGPFGAVTNVKVIRDFNTNKCKGFGFVTMTNYDEAAMAIASLNGYRLGDRVLQVSFKTNKTHKA

SEQ ID NO: 427 - protein, 2677 aa, Homo sapiens
MSTCCWCTPGGASTIDFLKRYASNTPSGEFQTADEDLCYCLECVAEYHKARDELPFLHEVLWELETLRLINHFEKSMKAEIGDDDELYIVDNNGEMPLFDITGQDFENKLRVPLLEILKYPYLLLHERVNELCVEALCRMEQANCSFQVFDKHPGIYLFLVHPNEMVRRWAILTARNLGKVDRDDYYDLQEVLLCLFKVIELGLLESPDIYTSSVLEKGKLILLPSHMYDTTNYKSYWLGICMLLTILEEQAMDSLLLGSDKQNDFMQSILHTMEREADDDSVDPFWPALHCFMVILDRLGSKVWGQLMDPIVAFQTIINNASYNREIRHIRNSSVRTKLEPESYLDDMVTCSQIVYNYNPEKTKKDSGWRTAICPDYCPNMYEEMETLASVLQSDIGQDMRVHNSTFLWFIPFVQSLMDLKDLGVAYIAQVVNHLYSEVKEVLNQTDAVCDKVTEFFLLILVSVIELHRNKKCLHLLWVSSQQWVEAVVKCAKLPTTAFTRSSEKSSGNCSKGTAMISSLSLHSMPSNSVQLAYVQLIRSLLKEGYQLGQQSLCKRFWDKLNLFLRGNLSLGWQLTSQETHELQSCLKQIIRNIKFKAPPCNTFVDLTSACKISPASYNKEESEQMGKTSRKDMHCLEASSPTFSKEPMKVQDSVLIKADNTIEGDNNEQNYIKDVKLEDHLLAGSCLKQSSKNIFTERAEDQIKISTRKQKSVKEISSYTPKDCTSRNGPERGCDRGIIVSTRLLTDSSTDALEKVSTSNEDFSLKDDALAKTSKRKTKVQKDEICAKLSHVIKKQHRKSTLVDNTINLDENLTVSNIESFYSRKDTGVQKGDGFIHNLSLDPSGVLDDKNGEQKSQNNVLPKEKQLKNEELVIFSFHENNCKIQEFHVDGKELIPFTEMTNASEKKSSPFKDLMTVPESRDEEMSNSTSVIYSNLTREQAPDISPKSDTLTDSQIDRDLHKLSLLAQASVITFPSDSPQNSSQLQRKVKEDKRCFTANQNNVGDTSRGQVIIISDSDDDDDERILSLEKLTKQDKICLEREHPEQHVSTVNSKEEKNPVKEEKTETLFQFEESDSQCFEFESSSEVFSVWQDHPDDNNSVQDGEKKCLAPIANTTNGQGCTDYVSEVVKKGAEGIEEHTRPRSISVEEFCEIEVKKPKRKRSEKPMAEDPVRPSSSVRNEGQSDTNKRDLVGNDFKSIDRRTSTPNSRIQRATTVSQKKSSKLCTCTEPIRKVPVSKTPKKTHSDAKKGQNRSSNYLSCRTTPAIVPPKKFRQCPEPTSTAEKLGLKKGPRKAYELSQRSLDYVAQLRDHGKTVGVVDTRKKTKLISPQNLSVRNNKKLLTSQELQMQRQIRPKSQKNRRRLSDCESTDVKRAGSHTAQNSDIFVPESDRSDYNCTGGTEVLANSNRKQLIKCMPSEPETIKAKHGSPATDDACPLNQCDSVVLNGTVPTNEVIVSTSEDPLGGGDPTARHIEMAALKEGEPDSSSDAEEDNLFLTQNDPEDMDLCSQMENDNYKLIELIHGKDTVEVEEDSVSRPQLESLSGTKCKYKDCLETTKNQGEYCPKHSEVKAADEDVFRKPGLPPPASKPLRPTTKIFSSKSTSRIAGLSKSLETSSALSPSLKNKSKGIQSILKVPQPVPLIAQKPVGEMKNSCNVLHPQSPNNSNRQGCKVPFGESKYFPSSSPVNILLSSQSVSDTFVKEVLKWKYEMFLNFGQCGPPASLCQSISRPVPVRFHNYGDYFNVFFPLMVLNTFETVAQEWLNSPNRENFYQLQVRKFPADYIKYWEFAVYLEECELAKQLYPKENDLVFLAPERINEEKKDTERNDIQDLHEYHSGYVHKFRRTSVMRNGKTECYLSIQTQENFPANLNELVNCIVISSLVTTQRKLKAMSLLGSRNQLARAVLNPNPMDFCTKDLLTTTSERIIAYLRDFNEDQKKAIETAYAMVKHSPSVAKICLIHGPPGTGKSKTIVGLLYRLLTENQRKGHSDENSNAKIKQNRVLVCAPSNAAVDELMKKIILEFKEKCKDKKNPLGNCGDINLVRLGPEKSINSEVLKFSLDSQVNHRMKKELPSHVQAMHKRKEFLDYQLDELSRQRALCRGGREIQRQELDENISKVSKERQELASKIKEVQGRPQKTQSIIILESHIICCTLSTSGGLLLESAFRGQGGVPFSCVIVDEAGQSCEIETLTPLIHRCNKLILVGDPKQLPPTVISMKAQEYGYDQSMMARFCRLLEENVEHNMISRLPILQLTVQYRMHPDICLFPSNYVYNRNLKTNRQTEAIRCSSDWPFQPYLVFDVGDGSERRDNDSYINVQEIKLVMEIIKLIKDKRKDVSFRNIGIITHYKAQKTMIQKDLDKEFDRKGPAEVDTVDAFQGRQKDCVIVTCVRANSIQGSIGFLASLQRLNVTITRAKYSLFILGHLRTLMENQHWNQLIQDAQKRGAIIKTCDKNYRHDAVKILKLKPVLQRSLTHPPTIAPEGSRPQGGLPSSKLDSGFAKTSVAASLYHTPSDSKEITLTVTSKDPERPPVHDQLQDPRLLKRMGIEVKGGIFLWDPQPSSPQHPGATPPTGEPGFPVVHQDLSHIQQPAAVVAALSSHKPPVRGEPPAASPEASTCQSKCDDPEEELCHRREARAFSEGEQEKCGSETHHTRRNSRWDKRTLEQEDSSSKKRKLL

SEQ ID NO: 428 - protein, 466 aa, Homo sapiens
MSTRSVSSSSYRRMFGGPGTASRPSSSRSYVTTSTRTYSLGSALRPSTSRSLYASSPGGVYATRSSAVRLRSSVPGVRLLQDSVDFSLADAINTEFKNTRTNEKVELQELNDRFANYIDKVRFLEQQNKILLAELEQLKGQGKSRLGDLYEEEMRELRRQVDQLTNDKARVEVERDNLAEDIMRLREKLQEEMLQREEAENTLQSFRQDVDNASLARLDLERKVESLQEEIAFLKKLHEEEIQELQAQIQEQHVQIDVDVSKPDLTAALRDVRQQYESVAAKNLQEAEEWYKSKFADLSEAANRNNDALRQAKQESTEYRRQVQSLTCEVDALKGTNESLERQMREMEENFAVEAANYQDTIGRLQDEIQNMKEEMARHLREYQDLLNVKMALDIEIATYRKLLEGEESRISLPLPNFSSLNLRETNLDSLPLVDTHSKRTLLIKTVETRDGQVINETSQHHDDLE

SEQ ID NO: 429 - protein, 497 aa, Homo sapiens
MGLPALLASALCTFVLPLLLFLAAIKLWDLYCVSGRDRSCALPLPPGTMGFPFFGETLQMVLQRRKFLQMKRRKYGFIYKTHLFGRPTVRVMGADNVRRILLGEHRLVSVHWPASVRTILGSGCLSNLHDSSHKQRKKVIMRAFSREALECYVPVITEEVGSSLEQWLSCGERGLLVYPEVKRLMFRIAMRILLGCEPQLAGDGDSEQQLVEAFEEMTRNLFSLPIDVPFSGLYRGMKARNLIHARIEQNIRAKICGLRASEAGQGCKDALQLLIEHSWERGERLDMQALKQSSTELLFGGHETTASAATSLITYLGLYPHVLQKVREELKSKGLLCKSNQDNKLDMEILEQLKYIGCVIKETLRLNPPVPGGFRVALKTFELNGYQIPKGWNVIYSICDTHDVAEIFTNKEEFNPDRFMLPHPEDASRFSFIPFGGGLRSCVGKEFAKILLKIFTVELARHCDWQLLNGPPTMKTSPTVYPVDNLPARFTHFHGEI

SEQ ID NO: 430 - protein, 3354 aa, Homo sapiens
MGRHVATSCHVAWLLVLISGCWGQVNRLPFFTNHFFDTYLLISEDTPVGSSVTQLLAQDMDNDPLVFGVSGEEASRFFAVEPDTGVVWLRQPLDRETKSEFTVEFSVSDHQGVITRKVNIQVGDVNDNAPTFHNQPYSVRIPENTPVGTPIFIVNATDPDLGAGGSVLYSFQPPSQFFAIDSARGIVTVIRELDYETTQAYQLTVNATDQDKTRPLSTLANLAIIITDVQDMDPIFINLPYSTNIYEHSPPGTTVRIITAIDQDKGRPRGIGYTIVSGNTNSIFALDYISGVLTLNGLLDRENPLYSHGFILTVKGTELNDDRTPSDATVTTTFNILVIDINDNAPEFNSSEYSVAITELAQVGFALPLFIQVVDKDENLGLNSMFEVYLVGNNSHHFIISPTSVQGKADIRIRVAIPLDYETVDRYDFDLFANESVPDHVGYAKVKITLINENDNRPIFSQPLYNISLYENVTVGTSVLTVLATDNDAGTFGEVSYFFSDDPDRFSLDKDTGLIMLIARLDYELIQRFTLTIIARDGGGEETTGRVRINVLDVNDNVPTFQKDAYVGALRENEPSVTQLVRLRATDEDSPPNNQITYSIVSASAFGSYFDISLYEGYGVISVSRPLDYEQISNGLIYLTVMAMDAGNPPLNSTVPVTIEVFDENDNPPTFSKPAYFVSVVENIMAGATVLFLNATDLDRSREYGQESIIYSLEGSTQFRINARSGEITTTSLLDRETKSEYILIVRAVDGGVGHNQKTGIATVNITLLDINDNHPTWKDAPYYINLVEMTPPDSDVTTVVAVDPDLGENGTLVYSIQPPNKFYSLNSTTGKIRTTHAMLDRENPDPHEAELMRKIVVSVTDCGRPPLKATSSATVFVNLLDLNDNDPTFQNLPFVAEVLEGIPAGVSIYQVVAIDLDEGLNGLVSYRMPVGMPRMDFLINSSSGVVVTTTELDRERIAEYQLRVVASDAGTPTKSSTSTLTIHVLDVNDETPTFFPAVYNVSVSEDVPREFRVVWLNCTDNDVGLNAELSYFITGGNVDGKFSVGYRDAVVRTVVGLDRETTAAYMLILEAIDNGPVGKRHTGTATVFVTVLDVNDNRPIFLQSSYEASVPEDIPEGHSILQLKATDADEGEFGRVWYRILHGNHGNNFRIHVSNGLLMRGPRPLDRERNSSHVLIVEAYNHDLGPMRSSVRVIVYVEDINDEAPVFTQQQYSRLGLRETAGIGTSVIVVQATDRDSGDGGLVNYRILSGAEGKFEIDESTGLIITVNYLDYETKTSYMMNVSATDQAPPFNQGFCSVYITLLNELDEAVQFSNASYEAAILENLALGTEIVRVQAYSIDNLNQITYRFNAYTSTQAKALFKIDAITGVITVQGLVDREKGDFYTLTVVADDGGPKVDSTVKVYITVLDENDNSPRFDFTSDSAVSIPEDCPVGQRVATVKAWDPDAGSNGQVVFSLASGNIAGAFEIVTTNDSIGEVFVARPLDREELDHYILQVVASDRGTPPRKKDHILQVTILDINDNPPVIESPFGYNVSVNENVGGGTAVVQVRATDRDIGINSVLSYYITEGNKDMAFRMDRISGEIATRPAPPDRERQSFYHLVATVEDEGTPTLSATTHVYVTIVDENDNAPMFQQPHYEVLLDEGPDTLNTSLITIQALDLDEGPNGTVTYAIVAGNIVNTFRIDRHMGVITAAKELDYEISHGRYTLIVTATDQCPILSHRLTSTTTVLVNVNDINDNVPTFPRDYEGPFEVTEGQPGPRVWTFLAHDRDSGPNGQVEYSIMDGDPLGEFVISPVEGVLRVRKDVELDRETIAFYNLTICARDRGMPPLSSTMLVGIRVLDINDNDPVLLNLPMNITISENSPVSSFVAHVLASDADSGCNARLTFNITAGNRERAFFINATTGIVTVNRPLDRERIPEYKLTISVKDNPENPRIARRDYDLLLIFLSDENDNHPLFTKSTYQAEVMENSPAGTPLTVLNGPILALDADQDIYAVVTYQLLGAQSGLFDINSSTGVVTVRSGVIIDREAFSPPILELLLLAEDIGLLNSTAHLLITILDDNDNRPTFSPATLTVHLLENCPPGFSVLQVTATDEDSGLNGELVYRIEAGAQDRFLIHLVTGVIRVGNATIDREEQESYRLTVVATDRGTVPLSGTAIVTILIDDINDSRPEFLNPIQTVSVLESAEPGTVIANITAIDHDLNPKLEYHIVGIVAKDDTDRLVPNQEDAFAVNINTGSVMVKSPMNRELVATYEVTLSVIDNASDLPERSVSVPNAKLTVNVLDVNDNTPQFKPFGITYYMERILEGATPGTTLIAVAAVDPDKGLNGLVTYTLLDLVPPGYVQLEDSSAGKVIANRTVDYEEVHWLNFTVRASDNGSPPRAAEIPVYLEIVDINDNNPIFDQPSYQEAVFEDVPVGTIILTVTATDADSGNFALIEYSLGDGESKFAINPTTGDIYVLSSLDREKKDHYILTALAKDNPGDVASNRRENSVQVVIQVLDVNDCRPQFSKPQFSTSVYENEPAGTSVITMMATDQDEGPNGELTYSLEGPGVEAFHVDMDSGLVTTQRPLQSYEKFSLTVVATDGGEPPLWGTTMLLVEVIDVNDNRPVFVRPPNGTILHIREEIPLRSNVYEVYATDKDEGLNGAVRYSFLKTAGNRDWEFFIIDPISGLIQTAQRLDRESQAVYSLILVASDLGQPVPYETMQPLQVALEDIDDNEPLFVRPPKGSPQYQLLTVPEHSPRGTLVGNVTGAVDADEGPNAIVYYFIAAGNEEKNFHLQPDGCLLVLRDLDREREAIFSFIVKASSNRSWTPPRGPSPTLDLVADLTLQEVRVVLEDINDQPPRFTKAEYTAGVATDAKVGSELIQVLALDADIGNNSLVFYSILAIHYFRALANDSEDVGQVFTMGSMDGILRTFDLFMAYSPGYFVVDIVARDLAGHNDTAIIGIYILRDDQRVKIVINEIPDRVRGFEEEFIHLLSNITGAIVNTDNVQFHVDKKGRVNFAQTELLIHVVNRDTNRILDVDRVIQMIDENKEQLRNLFRNYNVLDVQPAISVRLPDDMSALQMAIIVLAILLFLAAMLFVLMNWYYRTVHKRKLKAIVAGSAGNRGFIDIMDMPNTNKYSFDGANPVWLDPFCRNLELAAQAEHEDDLPENLSEIADLWNSPTRTHGTFGREPAAVKPDDDRYLRAAIQEYDNIAKLGQIIREGPIKGSLLKVVLEDYLRLKKLFAQRMVQKASSCHSSISELIQTELDEEPGDHSPGQGSLRFRHKPPVELKGPDGIHVVHGSTGTLLATDLNSLPEEDQKGLGRSLETLTAAEATAFERNARTESAKSTPLHKLRDVIMETPLEITEL

SEQ ID NO: 431 - protein, 834 aa, Homo sapiens
MEEKTQIKTFLGSKLPKYGTKSVRSTLQPMPNGTPVNLLGTSKNSNVKSYIKNNGSDCPSSHSFNWRKANKYQLCAQGVEEPNNTQNSHDKIIDPEKRVPTQGMFDKNGIKGGLKSVSLFTSKLAKPSTMFVSSTEELNQKSFSGPSNLGKFTKGTLLGRTSYSSINTPKSQLNGFYGNRSAGSMQRPRANSCATRSSSGESLAQSPDSSKSINCEKMVRSQSFSHSIQNSFLPPSSITRSHSFNRAVDLTKPYQNQQLSIRVPLRSSMLTRNSRQPEVLNGNEHLGYGFNRPYAAGGKKLALPNGPGVTSTLGYRMVHPSLLKSSRSPFSGTMTVDGNKNSPADTCVEEDATVLAKDRAANKDQELIENESYRTKNNQTMKHDAKMRYLSDDVDDISLSSLSSSDKNDLSEDFSDDFIDIEDSNRTRITPEEMSLKEEKHENGPPQDMFDSPKENEKAFSKTDEWIDISVSDRSECTKHTSGNNLVSPDTDYRAGSSFELSPSDSSDGTYMWDEEGLEPIGNVHPVGSYESSEMNSIDILNNLESCDLEDDDLMLDVDLPEDAPLENVECDNMNRFDRPDRNVRQPQEGFWKRPPQRWSGQEHYHLSHPDHYHHHGKSDLSRGSPYRESPLGHFESYGGMPFFQAQKMFVDVPENTVILDEMTLRHMVQDCTAVKTQLLKLKRLLHQHDGSGSLHDIQLSLPSSPEPEDGDKVYKNEDLLNEIKQLKDEIKKKDEKIQLLELQLATQHICHQKCKEEKCTYADKYTQTPWRRIPGGYSAPSFSPWQGSFQGIPRTVPPHRRQTSSTTAFQQPSQTHRSHPGKTNKATTYRGPQ

SEQ ID NO: 432 - protein, 325 aa, Homo sapiens
MESKMGELPLDINIQEPRWDQSTFLGRARHFFTVTDPRNLLLSGAQLEASRNIVQNYRAGVVTPGITEDQLWRAKYVYDSAFHPDTGEKVVLIGRMSAQVPMNMTITGCMLTFYRKTPTVVFWQWVNQSFNAIVNYSNRSGDTPITVRQLGTAYVSATTGAVATALGLKSLTKHLPPLVGRFVPFAAVAAANCINIPLMRQRELQVGIPVADEAGQRLGYSVTAAKQGIFQVVISRICMAIPAMAIPPLIMDTLEKKDFLKRRPWLGAPLQVGLVGFCLVFATPLCCALFPQKSSIHISNLEPELRAQIHEQNPSVEVVYYNKGL

SEQ ID NO: 433 - protein, 1037 aa, Homo sapiens
MWRCGGRQGLCVLRRLSGGHAHHRAWRWNSNRACERALQYKLGDKIHGFTVNQVTSVPELFLTAVKLTHDDTGARYLHLAREDTNNLFSVQFRTTPMDSTGVPHILEHTVLCGSQKYPCRDPFFKMLNRSLSTFMNAFTASDYTLYPFSTQNPKDFQNLLSVYLDATFFPCLRELDFWQEGWRLEHENPSDPQTPLVFKGVVFNEMKGAFTDNERIFSQHLQNRLLPDHTYSVVSGGDPLCIPELTWEQLKQFHATHYHPSNARFFTYGNFPLEQHLKQIHEEALSKFQKIEPSTVVPAQTPWDKPREFQITCGPDSFATDPSKQTTISVSFLLPDITDTFEAFTLSLLSSLLTSGPNSPFYKALIESGLGTDFSPDVGYNGYTREAYFSVGLQGIAEKDIETVRSLIDRTIDEVVEKGFEDDRIEALLHKIEIQMKHQSTSFGLMLTSYIASCWNHDGDPVELLKLGNQLAKFRQCLQENPKFLQEKVKQYFKNNQHKLTLSMRPDDKYHEKQAQVEATKLKQKVEALSPGDRQQIYEKGLELRSQQSKPQDASCLPALKVSDIEPTIPVTELDVVLTAGDIPVQYCAQPTNGMVYFRAFSSLNTLPEELRPYVPLFCSVLTKLGCGLLDYREQAQQIELKTGGMSASPHVLPDDSHMDTYEQGVLFSSLCLDRNLPDMMQLWSEIFNNPCFEEEEHFKVLVKMTAQELANGIPDSGHLYASIRAGRTLTPAGDLQETFSGMDQVRLMKRIAEMTDIKPILRKLPRIKKHLLNGDNMRCSVNATPQQMPQTEKAVEDFLRSIGRSKKERRPVRPHTVEKPVPSSSGGDAHVPHGSQVIRKLVMEPTFKPWQMKTHFLMPFPVNYVGECIRTVPYTDPDHASLKILARLMTAKFLHTEIREKGGAYGGGAKLSHNGIFTLYSYRDPNTIETLQSFGKAVDWAKSGKFTQQDIDEAKLSVFSTVDAPVAPSDKGMDHFLYGLSDEMKQAHREQLFAVSHDKLLAVSDRYLGTGKSTHGLAILGPENPKIAKDPSWIIQ

SEQ ID NO: 434 - protein, 368 aa, Homo sapiens
MQPGSSRCEEETPSLLWGLDPVFLAFAKLYIRDILDMKESRQVPGVFLYNGHPIKQVDVLGTVIGVRERDAFYSYGVDDSTGVINCICWKKLNTESVSAAPSAARELSLTSQLKKLQETIEQKTKIEIGDTIRVRGSIRTYREEREIHATTYYKVDDPVWNIQIARMLELPTIYRKVYDQPFHSSALEKEEALSNPGALDLPSLTSLLSEKAKEFLMENRVQSFYQQELEMVESLLSLANQPVIHSASSDQVNFKKDTTSKAIHSIFKNAIQLLQEKGLVFQKDDGFDNLYYVTREDKDLHRKIHRIIQQDCQKPNHMEKGCHFLHILACARLSIRPGLSEAVLQQVLELLEDQSDIVSTMEHYYTAF

SEQ ID NO: 435 - protein, 775 aa, Homo sapiens
MVGPEDAGACSGRNPKLLPVPAPDPVGQDRKVIRATGGFGGGVGAVEPPEEADEEEEADEEEETPPRQLLQRYLAAAGEQLEPGLCYCPLPAGQAGAPPPSAAPRSDACLLGSGSKHRGAEVADGRAPRHEGMTNGDSGFLPGRDCRDLEEARGLARAGGRESRRRRPYGRLRLEGPGDEDADGAGSPSDWASPLEDPLRSCCLVAADAQEPEGAGSDSGDSPASSCSSSEDSEQRGVGAGGPEEGAPPATSAERTNGGAEPRLGFSDIHFNSRNTFQVSRGQSARDHLPPAGPPVPLPAAEQGPAGASARARRSGGFADFFTRNLFPKRTKELKSVVHSAPGWKLFGKVPPRENLQKTSKIIQQEYEARTGRTCKPPPQSSRRKNFEFEPLSTTALILEDRPSNLPAKSVEEALRHRQEYDEMVAEAKKREIKEAHKRKRIMKERFKQEENIASAMVIWINEILPNWEVMRSTRRVRELWWQGLPPSVRGKVWSLAVGNELNITPELYEIFLSRAKERWKSFSETSSENDTEGVSVADREASLELIKLDISRTFPSLYIFQKGGPYHDVLHSILGAYTCYRPDVGYVQGMSFIAAVLILNLEEADAFIAFANLLNKPCQLAFFRVDHSMMLKYFATFEVFFEENLSKLFLHFKSYSLTPDIYLIDWIFTLYSKSLPLDLACRVWDVFCRDGEEFLFRTGLGILRLYEDILLQMDFIHIAQFLTKLPEDITSEKLFSCIAAIQMQNSTKKWTQVFASVMKDIKEGDKNSSPALKS

SEQ ID NO: 436 - protein, 745 aa, Homo sapiens
MGVPFFSSLRCMVDLGPCWAGGLTAEMKLLLALAGLLAILATPQPSEGAAPAVLGEVDTSLVLSSMEEAKQLVDKAYKERRESIKQRLRSGSASPMELLSYFKQPVAATRTAVRAADYLHVALDLLERKLRSLWRRPFNVTDVLTPAQLNVLSKSSGCAYQDVGVTCPEQDKYRTITGMCNNRRSPTLGASNRAFVRWLPAEYEDGFSLPYGWTPGVKRNGFPVALARAVSNEIVRFPTDQLTPDQERSLMFMQWGQLLDHDLDFTPEPAARASFVTGVNCETSCVQQPPCFPLKIPPNDPRIKNQADCIPFFRSCPACPGSNITIRNQINALTSFVDASMVYGSEEPLARNLRNMSNQLGLLAVNQRFQDNGRALLPFDNLHDDPCLLTNRSARIPCFLAGDTRSSEMPELTSMHTLLLREHNRLATELKSLNPRWDGERLYQEARKIVGAMVQIITYRDYLPLVLGPTAMRKYLPTYRSYNDSVDPRIANVFTNAFRYGHTLIQPFMFRLDNRYQPMEPNPRVPLSRVFFASWRVVLEGGIDPILRGLMATPAKLNRQNQIAVDEIRERLFEQVMRIGLDLPALNMQRSRDHGLPGYNAWRRFCGLPQPETVGQLGTVLRNLKLARKLMEQYGTPNNIDIWMGGVSEPLKRKGRVGPLLACIIGTQFRKLRDGDRFWWENEGVFSMQQRQALAQISLPRIICDNTGITTVSKNNIFMSNSYPRDFVNCSTLPALNLASWREAS

SEQ ID NO: 437 - protein, 374 aa, Homo sapiens
MGLPRGSFFWLLLLLTAACSGLLFALYFSAVQRYPGPAAGARDTTSFEAFFQSKASNSWTGKGQACRHLLHLAIQRHPHFRGLFNLSIPVLLWGDLFTPALWDRLSQHKAPYGWRGLSHQVIASTLSLLNGSESAKLFAPPRDTPPKCIRCAVVGNGGILNGSRQGPNIDAHDYVFRLNGAVIKGFERDVGTKTSFYGFTVNTMKNSLVSYWNLGFTSVPQGQDLQYIFIPSDIRDYVMLRSAILGVPVPEGLDKGDRPHAYFGPEASASKFKLLHPDFISYLTERFLKSKLINTHFGDLYMPSTGALMLLTALHTCDQVSAYGFITSNYWKFSDHYFERKMKPLIFYANHDLSLEAALWRDLHKAGILQLYQR

SEQ ID NO: 438 - protein, 715 aa, Homo sapiens
MHLLPALAGVLATLVLAQPCEGTDPASPGAVETSVLRDCIAEAKLLVDAAYNWTQKSIKQRLRSGSASPMDLLSYFKQPVAATRTVVRAADYMHVALGLLEEKLQPQRSGPFNVTDVLTEPQLRLLSQASGCALRDQAERCSDKYRTITGRCNNKRRPLLGASNQALARWLPAEYEDGLSLPFGWTPSRRRNGFLLPLVRAVSNQIVRFPNERLTSDRGRALMFMQWGQFIDHDLDFSPESPARVAFTAGVDCERTCAQLPPCFPIKIPPNDPRIKNQRDCIPFFRSAPSCPQNKNRVRNQINALTSFVDASMVYGSEVSLSLRLRNRTNYLGLLAINQRFQDNGRALLPFDNLHDDPCLLTNRSARIPCFLAGDTRSTETPKLAAMHTLFMREHNRLATELRRLNPRWNGDKLYNEARKIMGAMVQIITYRDFLPLVLGKARARRTLGHYRGYCSNVDPRVANVFTLAFRFGHTMLQPFMFRLDSQYRASAPNSHVPLSSAFFASWRIVYEGGIDPILRGLMATPAKLNRQDAMLVDELRDRLFRQVRRIGLDLAALNMQRSRDHGLPGYNAWRRFCGLSQPRNLAQLSRVLKNQDLARKFLNLYGTPDNIDIWIGAIAEPLLPGARVGPLLACLFENQFRRARDGDRFWWQKRGVFTKRQRKALSRISLSRIICDNTGITTVSRDIFRANIYPRGFVNCSRIPRLNLSAWRGT

SEQ ID NO: 439 - protein, 695 aa, Homo sapiens
MEEKPGQPQPQHHHSHHHPHHHPQQQQQQPHHHHHYYFYNHSHNHHHHHHHQQPHQYLQHGAEGSPKAQPKPLKHEQKHTLQQHQETPKKKTGYGELNGNAGEREISLKNLSSDEATNPISRVLNGNQQVVDTSLKQTVKANTFGKAGIKTKNFIQKNSMDKKNGKSYENKSGENQSVDKSDTIPIPNGVVTNNSGYITNGYMGKGADNDGSGSESGYTTPKKRKARRNSAKGCENLNIVQDKIMQQETSVPTLKQGLETFKPDYSEQKGNRVDGSKPIWKYETGPGGTSRGKPAVGDMLRKSSDSKPGVSSKKFDDRPKGKHASAVASKEDSWTLFKPPPVFPVDNSSAKIVPKISYASKVKENLNKTIQNSSVSPTSSSSSSSSTGETQTQSSSRLSQVPMSALKSVTSANFSNGPVLAGTDGNVYPPGGQPLLTTAANTLTPISSGTDSVLQDMSLTSAAVEQIKTSLFIYPSNMQTMLLSTAQVDLPSQTDQQNLGDIFQNQWGLSFINEPSAGPETVTGKSSEHKVMEVTFQGEYPATLVSQGAEIIPSGTEHPVFPKAYELEKRTSPQVLGSILKSGTTSESGALSLEPSHIGDLQKADTSSQGALVFLSKDYEIESQNPLASPTNTLLGSAKEQRYQRGLERNDSWGSFDLRAAIVYHTKEMESIWNLQKQDPKRIITYNEAMDSPDQ

SEQ ID NO: 440 - protein, 196 aa, Homo sapiens [sequence omitted]

SEQ ID NO: 441 - protein, 405 aa, Homo sapiens
MEASFVQTTMALGLSSKKASSRNVAVERKNLITVCRFSVKTLLEKYTAEPIDDSSEEFVNFAAILEQILSHRFKACAPAGPVSWFSSDGQRGFWDYIRLACSKVPNNCVSSIENMENISTARAKGRAWIRVALMEKRMSEYITTALRDTRTTRRFYDSGAIMLRDEATILTGMLIGLSAIDFSFCLKGEVLDGKTPVVIDYTPYLKFTQSYDYLTDEEERHSAESSTSEDNSPEHPYLPLVTDEDSWYSKWHKMEQKFRIVYAQKGYLEELVRLRESQLKDLEAENRRLQLQLEEAAAQNQREKRELEGVILELQEQLTGLIPSDHAPLAQGSKELTTPLVNQWPSLGTLNGAEGASNSKLYRRHSFMSTEPLSAEASLSSDSQRLGEGTRDEEPWGPIGSSEPN

SEQ ID NO: 442 - protein, 449 aa, Homo sapiens
MTSFYSTSSCPLGCTMAPGARNVFVSPIDVGCQPVAEANAASMCLLANVAHANRVRVGSTPLGRPSLCLPPTSHTACPLPGTCHIPGNIGICGAYGKNTLNGHEKETMKFLNDRLANYLEKVRQLEQENAELETTLLERSKCHESTVCPDYQSYFRTIEELQQKILCSKAENARLIVQIDNAKLAADDFRIKLESERSLHQLVEADKCGTQKLLDDATLAKADLEAQQESLKEEQLSLKSNHEQEVKILRSQLGEKFRIELDIEPTIDLNRVLGEMRAQYEAMVETNHQDVEQWFQAQSEGISLQAMSCSEELQCCQSEILELRCTVNALEVERQAQHTLKDCLQNSLCEAEDRYGTELAQMQSLISNLEEQLSEIRADLERQNQEYQVLLDVKARLENEIATYRNLLESEDCKLPCNPCSTPASCTSCPSCGPVTGGSPSGHGASMGR

SEQ ID NO: 443 - protein, 525 aa, Homo sapiens
MRRRRRRDGFYPAPDFRDREAEDMAGVFDIDLDQPEDAGSEDELEEGGQLNESMDHGGVGPYELGMEHCEKFEISETSVNRGPEKIRPECFELLRVLGKGGYGKVFQVRKVTGANTGKIFAMKVLKKAMIVRNAKDTAHTKAERNILEEVKHPFIVDLIYAFQTGGKLYLILEYLSGGELFMQLEREGIFMEDTACFYLAEISMALGHLHQKGIIYRDLKPENIMLNHQGHVKLTDFGLCKESIHDGTVTHTFCGTIEYMAPEILMRSGHNRAVDWWSLGALMYDMLTGAPPFTGENRKKTIDKILKCKLNLPPYLTQEARDLLKKLLKRNAASRLGAGPGDAGEVQAHPFFRHINWEELLARKVEPPFKPLLQSEEDVSQFDSKFTRQTPVDSPDDSTLSESANQVFLGFTYVAPSVLESVKEKFSFEPKIRSPRRFIGSPRTPVSPVKFSPGDFWGRGASASTANPQTPVEYPMETSGIEQMDVTMSGEASAPLPIRQPNSGPYKKQAFPMISKRPEHLRMNL

SEQ ID NO: 444 - protein, 1380 aa, Homo sapiens
MASGRDERPPWRLGRLLLLMCLLLLGSSARAAHIKKAEATTTTTSAGAEAAEGQFDRYYHEEELESALREAAAAGLPGLARLFSIGRSVEGRPLWVLRLTAGLGSLIPEGDAGPDAAGPDAAGPLLPGRPQVKLVGNMHGDETVSRQVLIYLARELAAGYRRGDPRLVRLLNTTDVYLLPSLNPDGFERAREGDCGFGDGGPSGASGRDNSRGRDLNRSFPDQFSTGEPPALDEVPEVRALIEWIRRNKFVLSGNLHGGSVVASYPFDDSPEHKATGIYSKTSDDEVFKYLAKAYASNHPIMKTGEPHCPGDEDETFKDGITNGAHWYDVEGGMQDYNYVWANCFEITLELSCCKYPPASQLRQEWENNRESLITLIEKVHIGVKGFVKDSITGSGLENATISVAGINHNITTGRFGDFYRLLVPGTYNLTVVLTGYMPLTVTNVVVKEGPATEVDFSLRPTVTSVIPDTTEAVSTASTVAIPNILSGTSSSYQPIQPKDFHHHHFPDMEIFLRRFANEYPNITRLYSLGKSVESRELYVMEISDNPGVHEPGEPEFKYIGNMHGNEVVGRELLLNLIEYLCKNFGTDPEVTDLVHNTRIHLMPSMNPDGYEKSQEGDSISVIGRNNSNNFDLNRNFPDQFVQITDPTQPETIAVMSWMKSYPFVLSANLHGGSLVVNYPFDDDEQGLATYSKSPDDAVFQQIALSYSKENSQMFQGRPCKNMYPNEYFPHGITNGASWYNVPGGMQDWNYLQTNCFEVTIELGCVKYPLEKELPNFWEQNRRSLIQFMKQVHQGVRGFVLDATDGRGILNATISVAEINHPVTTYKTGDYWRLLVPGTYKITASARGYNPVTKNVTVKSEGAIQVNFTLVRSSTDSNNESKKGKGASSSTNDASDPTTKEFETLIKDLSAENGLESLMLRSSSNLALALYRYHSYKDLSEFLRGLVMNYPHITNLTNLGQSTEYRHIWSLEISNKPNVSEPEEPKIRFVAGIHGNAPVGTELLLALAEFLCLNYKKNPAVTQLVDRTRIVIVPSLNPDGRERAQEKDCTSKIGQTNARGKDLDTDFTNNASQPETKAIIENLIQKQDFSLSVALDGGSMLVTYPYDKPVQTVENKETLKHLASLYANNHPSMHMGQPSCPNKSDENIPGGVMRGAEWHSHLGSMKDYSVTYGHCPEITVYTSCCYFPSAARLPSLWADNKRSLLSMLVEVHKGVHGFVKDKTGKPISKAVIVLNEGIKVQTKEGGYFHVLLAPGVHNIIAIADGYQQQHSQVFVHHDAASSVVIVFDTDNRIFGLPRELVVTVSGATMSALILTACIIWCICSIKSNRHKDGFHRLRQHHDEYEDEIRMMSTGSKKSLLSHEFQDETDTEEETLYSSKH

SEQ ID NO: 445 - protein, 662 aa, Homo sapiens
MRGAGPSPRQSPRTLRPDPGPAMSFFRRKVKGKEQEKTSDVKSIKASISVHSPQKSTKNHALLEAAGPSHVAINAISANMDSFSSSRTATLKKQPSHMEAAHFGDLGRSCLDYQTQETKSSLSKTLEQVLHDTIVLPYFIQFMELRRMEHLVKFWLEAESFHSTTWSRIRAHSLNTVKQSSLAEPVSPSKKHETTASFLTDSLDKRLEDSGSAQLFMTHSEGIDLNNRTNSTQNHLLLSQECDSAHSLRLEMARAGTHQVSMETQESSSTLTVASRNSPASPLKELSGKLMKSIEQDAVNTFTKYISPDAAKPIPITEAMRNDIIARICGEDGQVDPNCFVLAQSIVFSAMEQEHFSEFLRSHHFCKYQIEVLTSGTVYLADILFCESALFYFSEYMEKEDAVNILQFWLAADNFQSQLAAKKGQYDGQEAQNDAMILYDKYFSLQATHPLGFDDVVRLEIESNICREGGPLPNCFTTPLRQAWTTMEKVFLPGFLSSNLYYKYLNDLIHSVRGDEFLGGNVSLTAPGSVGPPDESHPGSSDSSASQSSVKKASIKILKNFDEAIIVDAASLDPESLYQRTYAGKMTFGRVSDLGQFIRESEPEPDVRKSKGSMFSQAMKKWVQGNTDEAQEELAWKIAKMIVSDIMQQAQYDQPLEKSTKL

SEQ ID NO: 446 - protein, 453 aa, Homo sapiens
MSKISEAVKRARAAFSSGRTRPLQFRIQQLEALQRLIQEQEQELVGALAADLHKNEWNAYYEEVVYVLEEIEYMIQKLPEWAADEPVEKTPQTQQDELYIHSEPLGVVLVIGTWNYPFNLTIQPMVGAIAAGNSVVLKPSELSENMASLLATIIPQYLDKDLYPVINGGVPETTELLKERFDHILYTGSTGVGKIIMTAAAKHLTPVTLELGGKSPCYVDKNCDLDVACRRIAWGKFMNSGQTCVAPDYILCDPSIQNQIVEKLKKSLKEFYGEDAKKSRDYGRIISARHFQRVMGLIEGQKVAYGGTGDAATRYIAPTILTDVDPQSPVMQEEIFGPVLPIVCVRSLEEAIQFINQREKPLALYMFSSNDKVIKKMIAETSSGGVAANDVIVHITLHSLPFGGVGNSGMGSYHGKKSFETFSHRRSCLVRPLMNDEGLKVRYPPSPAKMTQH

SEQ ID NO: 447 - protein, 456 aa, Homo sapiens
MSPGNRMPMAGLQVGPPAGSPFGAAAPLRPGMPPTMMDPFRKRLLVPQAQPPMPAQRRGLKRRKMADKVLPQRIRELVPESQAYMDLLAFERKLDQTIARKRMEIQEAIKKPLTQKRKLRIYISNTFSPSKAEGDSAGTAGTPGGTPAGDKVASWELRVEGKLLDDPSKQKRKFSSFFKSLVIELDKELYGPDNHLVEWHRMPTTQETDGFQVKRPGDLNVKCTLLLMLDHQPPQYKLDPRLARLLGVHTQTRAAIMQALWLYIKHNQLQDGHEREYINCNRYFRQIFSCGRLRFSEIPMKLAGLLQHPDPIVINHVISVDPNDQKKTACYDIDVEVDDPLKAQMSNFLASTTNQQEIASLDVKIHETIESINQLKTQRDFMLSFSTDPQDFIQEWLRSQRRDLKIITDVIGNPEEERRAAFYHQPWAQEAVGRHIFAKVQQRRQELEQVLGIRLT

SEQ ID NO: 448 - protein, 614 aa, Homo sapiens
MSGYSSDRDRGRDRGFGAPRFGGSRAGPLSGKKFGNPGEKLVKKKWNLDELPKFEKNFYQEHPDLARRTAQEVETYRRSKEITVRGHNCPKPVLNFYEANFPANVMDVIARQNFTEPTAIQAQGWPVALSGLDMVGVAQTGSGKTLSYLLPAIVHINHQPFLERGDGPICLVLAPTRELAQQVQQVAAEYCRACRLKSTCIYGGAPKGPQIRDLERGVEICIATPGRLIDFLECGKTNLRRTTYLVLDEADRMLDMGFEPQIRKIVDQIRPDRQTLMWSATWPKEVRQLAEDFLKDYIHINIGALELSANHNILQIVDVCHDVEKDEKLIRLMEEIMSEKENKTIVFVETKRRCDELTRKMRRDGWPAMGIHGDKSQQERDWVLNEFKHGKAPILIATDVASRGLDVEDVKFVINYDYPNSSEDYIHRIGRTARSTKTGTAYTFFTPNNIKQVSDLISVLREANQAINPKLLQLVEDRGSGRSRGRGGMKDDRRDRYSAGKRGGFNTFRDRENYDRGYSSLLKRDFGAKTQNGVYSAANYTNGSFGSNFVSAGIQTSFRTGNPTGTYQNGYDSTQQYGSNVPNMHNGMNQQAYAYPATAAAPMIGYPMPTGYSQ

SEQ ID NO: 449 - protein, 448 aa, Homo sapiens
MTSSCCVTNNLQASLKSCPRPASVCSSGVNCRPELCLGYVCQPMACLPSVCLPTTFRPASCLSKTYLSSSCQAASGISGSMGPGSWYSEGAFNGNEKETMQFLNDRLASYLTRVRQLEQENAELESRIQEASHSQVLTMTPDYQSHFRTIEELQQKILCTKAENARMVVNIDNAKLAADDFRAKYEAELAMRQLVEADINGLRRILDDLTLCKADLEAQVESLKEELMCLKKNHEEEVGSLRCQLGDRLNIEVDAAPPVDLTRVLEEMRCQYEAMVEANRRDVEEWFNMQMEELNQQVATSSEQLQNYQSDIIDLRRTVNTLEIELQAQHSLRDSLENTLTESEARYSSQLAQMQCMITNVEAQLAEIRADLERQNQEYQVLLDVRARLEGEINTYRSLLENEDCKLPCNPCSTPSCTTCVPSPCVPRTVCVPRTVGMPCSPCPQGRY

SEQ ID NO: 450 - protein, 837 aa, Homo sapiens
MAEPSQAPTPAPAAQPRPLQSPAPAPTPTPAPSPASAPIPTPTPAPAPAPAAAPAGSTGTGGPGVGSGGAGSGGDPARPGLSQQQRASQRKAQVRGLPRAKKLEKLGVFSACKANETCKCNGWKNPKPPTAPRMDLQQPAANLSELCRSCEHPLADHVSHLENVSEDEINRLLGMVVDVENLFMSVHKEEDTDTKQVYFYLFKLLRKCILQMTRPVVEGSLGSPPFEKPNIEQGVLNFVQYKFSHLAPRERQTMFELSKMFLLCLNYWKLETPAQFRQRSQAEDVATYKVNYTRWLCYCHVPQSCDSLPRYETTHVFGRSLLRSIFTVTRRQLLEKFRVEKDKLVPEKRTLILTHFPKFLSMLEEEIYGANSPIWESGFTMPPSEGTQLVPRPASVSAAVVPSTPIFSPSMGGGSNSSLSLDSAGAEPMPGEKRTLPENLTLEDAKRLRVMGDIPMELVNEVMLTITDPAAMLGPETSLLSANAARDETARLEERRGIIEFHVIGNSLTPKANRRVLLWLVGLQNVFSHQLPRMPKEYIARLVFDPKHKTLALIKDGRVIGGICFRMFPTQGFTEIVFCAVTSNEQVKGYGTHLMNHLKEYHIKHNILYFLTYADEYAIGYFKKQGFSKDIKVPKSRYLGYIKDYEGATLMECELNPRIPYTELSHIIKKQKEIIKKLIERKQAQIRKVYPGLSCFKEGVRQIPVESVPGIRETGWKPLGKEKGKELKDPDQLYTTLKNLLAQIKSHPSAWPFMEPVKKSEAPDYYEVIRFPIDLKTMTERLRSRYYVTRKLFVADLQRVIANCREYNPPDSEYCRCASALEKFFYFKLKEGGLIDK

SEQ ID NO: 451 - protein, 366 aa, Homo sapiens
MAELQQLQEFEIPTGREALRGNHSALLRVADYCEDNYVQATDKRKALEETMAFTTQALASVAYQVGNLAGHTLRMLDLQGAALRQVEARVSTLGQMVNMHMEKVARREIGTLATVQRLPPGQKVIAPENLPPLTPYCRRPLNFGCLDDIGHGIKDLSTQLSRTGTLSRKSIKAPATPASATLGRPPRIPEPVHLPVVPDGRLSAASSAFSLASAGSAEGVGGAPTPKGQAAPPAPPLPSSLDPPPPPAAVEVFQRPPTLEELSPPPPDEELPLPLDLPPPPPLDGDELGLPPPPPGFGPDEPSWVPASYLEKVVTLYPYTSQKDNELSFSEGTVICVTRRYSDGWCEGVSSEGTGFFPGNYVEPSC

SEQ ID NO: 452 - protein, 1464 aa, Homo sapiens
MFSFVDLRLLLLLAATALLTHGQEEGQVEGQDEDIPPITCVQNGLRYHDRDVWKPEPCRICVCDNGKVLCDDVICDETKNCPGAEVPEGECCPVCPDGSESPTDQETTGVEGPKGDTGPRGPRGPAGPPGRDGIPGQPGLPGPPGPPGPPGPPGLGGNFAPQLSYGYDEKSTGGISVPGPMGPSGPRGLPGPPGAPGPQGFQGPPGEPGEPGASGPMGPRGPPGPPGKNGDDGEAGKPGRPGERGPPGPQGARGLPGTAGLPGMKGHRGFSGLDGAKGDAGPAGPKGEPGSPGENGAPGQMGPRGLPGERGRPGAPGPAGARGNDGATGAAGPPGPTGPAGPPGFPGAVGAKGEAGPQGPRGSEGPQGVRGEPGPPGPAGAAGPAGNPGADGQPGAKGANGAPGIAGAPGFPGARGPSGPQGPGGPPGPKGNSGEPGAPGSKGDTGAKGEPGPVGVQGPPGPAGEEGKRGARGEPGPTGLPGPPGERGGPGSRGFPGADGVAGPKGPAGERGSPGPAGPKGSPGEAGRPGEAGLPGAKGLTGSPGSPGPDGKTGPPGPAGQDGRPGPPGPPGARGQAGVMGFPGPKGAAGEPGKAGERGVPGPPGAVGPAGKDGEAGAQGPPGPAGPAGERGEQGPAGSPGFQGLPGPAGPPGEAGKPGEQGVPGDLGAPGPSGARGERGFPGERGVQGPPGPAGPRGANGAPGNDGAKGDAGAPGAPGSQGAPGLQGMPGERGAAGLPGPKGDRGDAGPKGADGSPGKDGVRGLTGPIGPPGPAGAPGDKGESGPSGPAGPTGARGAPGDRGEPGPPGPAGFAGPPGADGQPGAKGEPGDAGAKGDAGPPGPAGPAGPPGPIGNVGAPGAKGARGSAGPPGATGFPGAAGRVGPPGPSGNAGPPGPPGPAGKEGGKGPRGETGPAGRPGEVGPPGPPGPAGEKGSPGADGPAGAPGTPGPQGIAGQRGVVGLPGQRGERGFPGLPGPSGEPGKQGPSGASGERGPPGPMGPPGLAGPPGESGREGAPGAEGSPGRDGSPGAKGDRGETGPAGPPGAPGAPGAPGPVGPAGKSGDRGETGPAGPAGPVGPVGARGPAGPQGPRGDKGETGEQGDRGIKGHRGFSGLQGPPGPPGSPGEQGPSGASGPAGPRGPPGSAGAPGKDGLNGLPGPIGPPGPRGRTGDAGPVGPPGPPGPPGPPGPPSAGFDFSFLPQPPQEKAHDGGRYYRADDANVVRDRDLEVDTTLKSLSQQIENIRSPEGSRKNPARTCRDLKMCHSDWKSGEYWIDPNQGCNLDAIKVFCNMETGETCVYPTQPSVAQKNWYISKNPKDKRHVWFGESMTDGFQFEYGGQGSDPADVAIQLTFLRLMSTEASQNITYHCKNSVAYMDQQTGNLKKALLLQGSNEIEIRAEGNSRFTYSVTVDGCTSHTGAWGKTVIEYKTTKTSRLPIIDVAPLDVGAPDQEFGFDVGPVCFL

SEQ ID NO: 453 - protein, 1123 aa, Homo sapiens
MNSPNESADGMSGREPSLEILPRTSLHSIPVTVEVKPVLPRAMPSSMGGGGGGSPSPVELRGALVGSVDPTLREQQLQQELLALKQQQQLQKQLLFAEFQKQHDHLTRQHEVQLQKHLKQQQEMLAAKQQQEMLAAKRQQELEQQRQREQQRQEELEKQRLEQQLLILRNKEKSKESAIASTEVKLRLQEFLLSKSKEPTPGGLNHSLPQHPKCWGAHHASLDQSSPPQSGPPGTPPSYKLPLPGPYDSRDDFPLRKTASEPNLKVRSRLKQKVAERRSSPLLRRKDGTVISTFKKRAVEITGAGPGASSVCNSAPGSGPSSPNSSHSTIAENGFTGSVPNIPTEMLPQHRALPLDSSPNQFSLYTSPSLPNISLGLQATVTVTNSHLTASPKLSTQQEAERQALQSLRQGGTLTGKFMSTSSIPGCLLGVALEGDGSPHGHASLLQHVLLLEQARQQSTLIAVPLHGQSPLVTGERVATSMRTVGKLPRHRPLSRTQSSPLPQSPQALQQLVMQQQHQQFLEKQKQQQLQLGKILTKTGELPRQPTTHPEETEEELTEQQEVLLGEGALTMPREGSTESESTQEDLEEEDEEDDGEEEEDCIQVKDEEGESGAEEGPDLEEPGAGYKKLFSDAQPLQPLQVYQAPLSLATVPHQALGRTQSSPAAPGGMKSPPDQPVKHLFTTGVVYDTFMLKHQCMCGNTHVHPEHAGRIQSIWSRLQETGLLSKCERIRGRKATLDEIQTVHSEYHTLLYGTSPLNRQKLDSKKLLGPISQKMYAVLPCGGIGVDSDTVWNEMHSSSAVRMAVGCLLELAFKVAAGELKNGFAIIRPPGHHAEESTAMGFCFFNSVAITAKLLQQKLNVGKVLIVDWDIHHGNGTQQAFYNDPSVLYISLHRYDNGNFFPGSGAPEEVGGGPGVGYNVNVAWTGGVDPPIGDVEYLTAFRTVVMPIAHEFSPDVVLVSAGFDAVEGHLSPLGGYSVTARCFGHLTRQLMTLAGGRVVLALEGGHDLTAICDASEACVSALLSVELQPLDEAVLQQKPNINAVATLEKVIEIQSKHWSCVQKFAAGLGRSLREAQAGETEEAETVSAMALLSVGAEQAQAAAAREHSPRPAEEPMEQEPAL

SEQ ID NO: 454 - protein, 295 aa, Homo sapiens
MEKMSRPLPLNPTFIPPPYGVLRSLLENPLKLPLHHEDAFSKDKDKEKKLDDESNSPTVPQSAFLGPTLWDKTLPYDGDTFQLEYMDLEEFLSENGIPPSPSQHDHSPHPPGLQPASSAAPSVMDLSSRASAPLHPGIPSPNCMQSPIRPGQLLPANRNTPSPIDPDTIQVPVGYEPDPADLALSSIPGQEMFDPRKRKFSEEELKPQPMIKKARKVFIPDDLKDDKYWARRRKNNMAAKRSRDARRLKENQIAIRASFLEKENSALRQEVADLRKELGKCKNILAKYEARHGPL

SEQ ID NO: 455 - protein, 200 aa, Homo sapiens
MGNSKSGALSKEILEELQLNTKFSEEELCSWYQSFLKDCPTGRITQQQFQSIYAKFFPDTDPKAYAQHVFRSFDSNLDGTLDFKEYVIALHMTTAGKTNQKLEWAFSLYDVDGNGTISKNEVLEIVMAIFKMITPEDVKLLPDDENTPEKRAEKIWKYFGKNDDDKLTEKEFIEGTLANKEILRLIQFEPQKVKEKMKNA

SEQ ID NO: 456 - protein, 1939 aa, Homo sapiens
MSSDSEMAIFGEAAPFLRKSERERIEAQNKPFDAKTSVFVVDPKESFVKATVQSREGGKVTAKTEAGATVTVKDDQVFPMNPPKYDKIEDMAMMTHLHEPAVLYNLKERYAAWMIYTYSGLFCVTVNPYKWLPVYNAEVVTAYRGKKRQEAPPHIFSISDNAYQFMLTDRENQSILITGESGAGKTVNTKRVIQYFATIAVTGEKKKEEVTSGKMQGTLEDQIISANPLLEAFGNAKTVRNDNSSRFGKFIRIHFGTTGKLASADIETYLLEKSRVTFQLKAERSYHIFYQIMSNKKPDLIEMLLITTNPYDYAFVSQGEITVPSIDDQEELMATDSAIEILGFTSDERVSIYKLTGAVMHYGNMKFKQKQREEQAEPDGTEVADKAAYLQNLNSADLLKALCYPRVKVGNEYVTKGQTVQQVYNAVGALAKAVYDKMFLWMVTRINQQLDTKQPRQYFIGVLDIAGFEIFDFNSLEQLCINFTNEKLQQFFNHHMFVLEQEEYKKEGIEWTFIDFGMDLAACIELIEKPMGIFSILEEECMFPKATDTSFKNKLYEQHLGKSNNFQKPKPAKGKPEAHFSLIHYAGTVDYNIAGWLDKNKDPLNETVVGLYQKSAMKTLALLFVGATGAEAEAGGGKKGGKKKGSSFQTVSALFRENLNKLMTNLRSTHPHFVRCIIPNETKTPGAMEHELVLHQLRCNGVLEGIRICRKGFPSRILYADFKQRYKVLNASAIPEGQFIDSKKASEKLLGSIDIDHTQYKFGHTKVFFKAGLLGLLEEMRDEKLAQLITRTQAMCRGFLARVEYQKMVERRESIFCIQYNVRAFMNVKHWPWMKLYFKIKPLLKSAETEKEMANMKEEFEKTKEELAKTEAKRKELEEKMVTLMQEKNDLQLQVQAEADSLADAEERCDQLIKTKIQLEAKIKEVTERAEDEEEINAELTAKKRKLEDECSELKKDIDDLELTLAKVEKEKHATENKVKNLTEEMAGLDETIAKLTKEKKALQEAHQQTLDDLQAEEDKVNTLTKAKIKLEQQVDDLEGSLEQEKKIRMDLERAKRKLEGDLKLAQESTMDIENDKQQLDEKLKKKEFEMSGLQSKIEDEQALGMQLQKKIKELQARIEELEEEIEAERASRAKAEKQRSDLSRELEEISERLEEAGGATSAQIEMNKKREAEFQKMRRDLEEATLQHEATAATLRKKHADSVAELGEQIDNLQRVKQKLEKEKSEMKMEIDDLASNMETVSKAKGNLEKMCRALEDQLSEIKTKEEEQQRLINDLTAQRARLQTESGEYSRQLDEKDTLVSQLSRGKQAFTQQIEELKRQLEEEIKAKSALAHALQSSRHDCDLLREQYEEEQEAKAELQRAMSKANSEVAQWRTKYETDAIQRTEELEEAKKKLAQRLQDAEEHVEAVNAKCASLEKTKQRLQNEVEDLMIDVERTNAACAALDKKQRNFDKILAEWKQKCEETHAELEASQKESRSLSTELFKIKNAYEESLDQLETLKRENKNLQQEISDLTEQIAEGGKRIHELEKIKKQVEQEKSELQAALEEAEASLEHEEGKILRIQLELNQVKSEVDRKIAEKDEEIDQMKRNHIRIVESMQSTLDAEIRSRNDAIRLKKKMEGDLNEMEIQLNHANRMAAEALRNYRNTQAILKDTQLHLDDALRSQEDLKEQLAMVERRANLLQAEIEELRATLEQTERSRKIAEQELLDASERVQLLHTQNTSLINTKKKLETDISQIQGEMEDIIQEARNAEEKAKKAITDAAMMAEELKKEQDTSAHLERMKKNLEQTVKDLQHRLDEAEQLALKGGKKQIQKLEARVRELEGEVESEQKRNVEAVKGLRKHERKVKELTYQTEEDRKNILRLQDLVDKLQAKVKSYKRQAEEAEEQSNVNLSKFRRIQHELEEAEERADIAESQVNKLRVKSREVHTKIISEE

SEQ ID NO: 457 - protein, 478 aa, Homo sapiens
MAPLRPLLILALLAWVALADQESCKGRCTEGFNVDKKCQCDELCSYYQSCCTDYTAECKPQVTRGDVFTMPEDEYTVYDDGEEKNNATVHEQVGGPSLTSDLQAQSKGNPEQTPVLKPEEEAPAPEVGASKPEGIDSRPETLHPGRPQPPAEEELCSGKPFDAFTDLKNGSLFAFRGQYCYELDEKAVRPGYPKLIRDVWGIEGPIDAAFTRINCQGKTYLFKGSQYWRFEDGVLDPDYPRNISDGFDGIPDNVDAALALPAHSYSGRERVYFFKGKQYWEYQFQHQPSQEECEGSSLSAVFEHFAMMQRDSWEDIFELLFWGRTSAGTRQPQFISRDWHGVPGQVDAAMAGRIYISGMAPRPSLAKKQRFRHRNRKGYRSQRGHSRGRNQNSRRPSRATWLSLFSSEESNLGANNYDDYRMDWLVPATCEPIQSVFFFSGDKYYRVNLRTRRVDTVDPPYPRSIAQYWLGCPAPGHL

SEQ ID NO: 458 - protein, 648 aa, Homo sapiens
MVSLPPPQSDVTLPGPTRLEGERQGDLMQAPGLPGSPAPQSKHAGFSCSSFVSDGPPERTPSLPPHSPRIASPGPEQVQGHCPAGPGPGPFRLSPSDKYPGFGFEEAAASSPGRFLKGSHAPFHPYKRPFHEDVFPEAETTLALKGHSFKTPGPLEAFEEIPVDVAEAEAFLPGFSAEAWCNGLPYPSQEHGPQVLGSEVKVKPPVLESGAGMFCYQPPLQHMYCSSQPPFHQYSPGGGSYPIPYLGSSHYQYQRMAPQASTDGHQPLFPKPIYSYSILIFMALKNSKTGSLPVSEIYNFMTEHFPYFKTAPDGWKNSVRHNLSLNKCFEKVENKSGSSSRKGCLWALNPAKIDKMQEELQKWKRKDPIAVRKSMAKPEELDSLIGDKREKLGSPLLGCPPPGLSGSGPIRPLAPPAGLSPPLHSLHPAPGPIPGKNPLQDLLMGHTPSCYGQTYLHLSPGLAPPGPPQPLFPQPDGHLELRAQPGTPQDSPLPAHTPPSHSAKLLAEPSPARTMHDTLLPDGDLGTDLDAINPSLTDFDFQGNLWEQLKDDSLALDPLVLVTSSPTSSSMPPPQPPPHCFPPGPCLTETGSGAGDLAAPGSGGSGALGDLHLTTLYSAFMELEPTPPTAPAGPSVYLSPSSKPVALA

SEQ ID NO: 459 - protein, 317 aa, Homo sapiens
MKTALILLSILGMACAFSMKNLHRRVKIEDSEENGVFKYRPRYYLYKHAYFYPHLKRFPVQGSSDSSEENGDDSSEEEEEEEETSNEGENNEESNEDEDSEAENTTLSATTLGYGEDATPGTGYTGLAAIQLPKKAGDITNKATKEKESDEEEEEEEEGNENEESEAEVDENEQGINGTSTNSTEAENGNGSSGGDNGEEGEEESVTGANAEDTTETGRQGKGTSKTTTSPNGGFEPTTPPQVYRTTSPPFGKTTTVEYEGEYEYTGANEYDNGYEIYESENGEPRGDNYRAYEDEYSYFKGQGYDGYDGQNYYHHQ

SEQ ID NO: 460 - protein, 842 aa, Homo sapiens
MKRGRLPSSSEDSDDNGSLSTTWSQNSRSQHRRSSCSRHEDRKPSEVFRTDLITAMKLHDSYQLNPDEYYVLADPWRQEWEKGVQVPVSPGTIPQPVARVVSEEKSLMFIRPKKYIVSSGSEPPELGYVDIRTLADSVCRYDLNDMDAAWLELTNEEFKEMGMPELDEYTMERVLEEFEQRCYDNMNHAIETEEGLGIEYDEDVVCDVCQSPDGEDGNEMVFCDKCNICVHQACYGILKVPEGSWLCRTCALGVQPKCLLCPKKGGAMKPTRSGTKWVHVSCALWIPEVSIGSPEKMEPITKVSHIPSSRWALVCSLCNEKFGASIQCSVKNCRTAFHVTCAFDRGLEMKTILAENDEVKFKSYCPKHSSHRKPEESLGKGAAQENGAPECSPRNPLEPFASLEQNREEAHRVSVRKQKLQQLEDEFYTFVNLLDVARALRLPEEVVDFLYQYWKLKRKVNFNKPLITPKKDEEDNLAKREQDVLFRRLQLFTHLRQDLERVRNLTYMVTRREKIKRSVCKVQEQIFNLYTKLLEQERVSGVPSSCSSSSLENMLLFNSPSVGPDAPKIEDLKWHSAFFRKQMGTSLVHSLKKPHKRDPLQNSPGSEGKTLLKQPDLCGRREGMVVPESFLGLEKTFAEARLISAQQKNGVVMPDHGKRRDNRFHCDLIKGDLKDKSFKQSHKPLRSTDVSQRHLDNTRAATSPGVGQSAPGTRKEIVPKCNGSLIKVNYNQTAVKVPTTPASPVKNWGGFRIPKKGERQQQGEAHDGACHQHSDYPYLGLGRVPAKERAKSKLKSDNENDGYVPDVEMSDSESEASEKKCIHTSSTISRRTDIIRRSILAS

SEQ ID NO: 461 - protein, 469 aa, Homo sapiens
MSALTPPTDMPTPTTDKITQAAMETIYLCKFRVSMDGEWLCLRELDDISLTPDPEPTHEDPNYLMANERMNLMNMAKLSIKGLIESALNLGRTLDSDYAPLQQFFVVMEHCLKHGLKAKKTFLGQNKSFWGPLELVEKLVPEAAEITASVKDLPGLKTPVGRGRAWLRLALMQKKLSEYMKALINKKELLSEFYEPNALMMEEEGAIIAGLLVGLNVIDANFCMKGEDLDSQVGVIDFSMYLKDGNSSKGTEGDGQITAILDQKNYVEELNRHLNATVNNLQAKVDALEKSNTKLTEELAVANNRIITLQEEMERVKEESSYILESNRKGPKQDRTAEGQALSEARKHLKEETQLRLDVEKELEMQISMRQEMELAMKMLEKDVCEKQDALVSLRQQLDDLRALKHELAFKLQSSDLGVKQKSELNSRLEEKTNQMAATIKQLEQSEKDLVKQAKTLNSAANKLIPKHH

SEQ ID NO: 462 - protein, 599 aa, Homo sapiens
MKLLKLTGFIFFLFFLTESLTLPTQPRDIENFNSTQKFIEDNIEYITIIAFAQYVQEATFEEMEKLVKDMVEYKDRCMADKTLPECSKLPNNVLQEKICAMEGLPQKHNFSHCCSKVDAQRRLCFFYNKKSDVGFLPPFPTLDPEEKCQAYESNRESLLNHFLYEVARRNPFVFAPTLLTVAVHFEEVAKSCCEEQNKVNCLQTRAIPVTQYLKAFSSYQKHVCGALLKFGTKVVHFIYIAILSQKFPKIEFKELISLVEDVSSNYDGCCEGDVVQCIRDTSKVMNHICSKQDSISSKIKECCEKKIPERGQCIINSNKDDRPKDLSLREGKFTDSENVCQERDADPDTFFAKFTFEYSRRHPDLSIPELLRIVQIYKDLLRNCCNTENPPGCYRYAEDKFNETTEKSLKMVQQECKHFQNLGKDGLKYHYLIRLTKIAPQLSTEELVSLGEKMVTAFTTCCTLSEEFACVDNLADLVFGELCGVNENRTINPAVDHCCKTNFAFRRPCFESLKADKTYVPPPFSQDLFTFHADMCQSQNEELQRKTDRFLVNLVKLKHELTDEELQSLFTNFANVVDKCCKAESPEVCFNEESPKIGN

SEQ ID NO: 463 - protein, 622 aa, Homo sapiens
MKWVESIFLIFLLNFTESRTLHRNEYGIASILDSYQCTAEISLADLATIFFAQFVQEATYKEVSKMVKDALTAIEKPTGDEQSSGCLENQLPAFLEELCHEKEILEKYGHSDCCSQSEEGRHNCFLAHKKPTPASIPLFQVPEPVTSCEAYEEDRETFMNKFIYEIARRHPFLYAPTILLWAARYDKIIPSCCKAENAVECFQTKAATVTKELRESSLLNQHACAVMKNFGTRTFQAITVTKLSQKFTKVNFTEIQKLVLDVAHVHEHCCRGDVLDCLQDGEKIMSYICSQQDTLSNKITECCKLTTLERGQCIIHAENDEKPEGLSPNLNRFLGDRDFNQFSSGEKNIFLASFVHEYSRRHPQLAVSVILRVAKGYQELLEKCFQTENPLECQDKGEEELQKYIQESQALAKRSCGLFQKLGEYYLQNAFLVAYTKKAPQLTSSELMAITRKMAATAATCCQLSEDKLLACGEGAADIIIGHLCIRHEMTPVNPGVGQCCTSSYANRRPCFSSLVVDETYVPPAFSDDKFIFHKDLCQAQGVALQTMKQEFLINLVKQKPQITEEQLEAVIADFSGLLEKCCQGQEQEVCFAEEGKRRQNESFIRCELFSLILTDLTLFVN

SEQ ID NO: 464 - protein, 314 aa, Homo sapiens
MYKMEYSYLNSSAYESCMAGMDTSSLASAYADFSSCSQASGFQYNPIRTTFGATSGCPSLTPGSCSLGTLRDHQSSPYAAVPYKLFTDHGGLNEKRKQRRIRTTFTSAQLKELERVFAETHYPDIYTREELALKIDLTEARVQVWFQNRRAKFRKQERAAAAAAAAAKNGSSGKKSDSSRDDESKEAKSTDPDSTGGPGPNPNPTPSCGANGGGGGGPSPAGAPGAAGPGGPGGEPGKGGAAAAAAAAAAAAAAAAAAAAGGLAAAGGPGQGWAPGPGPITSIPDSLGGPFASVLSSLQRPNGAKAALVKSSMF

SEQ ID NO: 465 - protein, 328 aa, Homo sapiens
MANSASPEQNQNHCSAINNSIPLMQGNLPTLTLSGKIRVTVTFFLFLLSATFNASFLLKLQKWTQKKEKGKKLSRMKLLLKHLTLANLLETLIVMPLDGMWNITVQWYAGELLCKVLSYLKLFSMYAPAFMMVVISLDRSLAITRPLALKSNSKVGQSMVGLAWILSSVFAGPQLYIFRMIHLADSSGQTKVFSQCVTHCSFSQWWHQAFYNFFTFSCLFIIPLFIMLICNAKIIFTLTRVLHQDPHELQLNQSKNNIPRARLKTLKMTVAFATSFTVCWTPYYVLGIWYWFDPEMLNRLSDPVNHFFFLFAFLNPCFDPLIYGYFSL

SEQ ID NO: 466 - protein, 699 aa, Homo sapiens
MPSLWREILLESLLGCVSWSLYHDLGPMIYYFPLQTLELTGLEGFSIAFLSPIFLTITPFWKLVNKKWMLTLLRIITIGSIASFQAPNAKLRLMVLALGVSSSLIVQAVTWWSGSHLQRYLRIWGFILGQIVLVVLRIWYTSLNPIWSYQMSNKVILTLSAIATLDRIGTDGDCSKPEEKKTGEVATGMASRPNWLLAGAAFGSLVFLTHWVFGEVSLVSRWAVSGHPHPGPDPNPFGGAVLLCLASGLMLPSCLWFRGTGLIWWVTGTASAAGLLYLHTWAAAVSGCVFAIFTASMWPQTLGHLINSGTNPGKTMTIAMIFYLLEIFFCAWCTAFKFVPGGVYARERSDVLLGTMMLIIGLNMLFGPKKNLDLLLQTKNSSKVLFRKSEKYMKLFLWLLVGVGLLGLGLRHKAYERKLGKVAPTKEVSAAIWPFRFGYDNEGWSSLERSAHLLNETGADFITILESDASKPYMGNNDLTMWLGEKLGFYTDFGPSTRYHTWGIMALSRYPIVKSEHHLLPSPEGEIAPAITLTVNISGKLVDFVVTHFGNHEDDLDRKLQAIAVSKLLKSSSNQVIFLGYITSAPGSRDYLQLTEHGNVKDIDSTDHDRWCEYIMYRGLIRLGYARISHAELSDSEIQMAKFRIPDDPTNYRDNQKVVIDHREVSEKIHFNPRFGSYKEGHNYENNHHFHMNTPKYFL

SEQ ID NO: 467 - protein, 134 aa, Homo sapiens
MKSLTWILGLWALAACFTPGESQRGPRGPYPPGPLAPPPPPCFPFGTGFVPPPHPPPYGPGRFPPPLSPPYGPGRIPPSPPPPYGPGRIQSHSLPPPYGPGYPQPPSQPRPYPPGPPFFPVNSPTDPALPTPAP

SEQ ID NO: 468 - protein, 969 aa, Homo sapiens
MAEDDPYLGRPEQMFHLDPSLTHTIFNPEVFQPQMALPTADGPYLQILEQPKQRGFRFRYVCEGPSHGGLPGASSEKNKKSYPQVKICNYVGPAKVIVQLVTNGKNIHLHAHSLVGKHCEDGICTVTAGPKDMVVGFANLGILHVTKKKVFETLEARMTEACIRGYNPGLLVHPDLAYLQAEGGGDRQLGDREKELIRQAALQQTKEMDLSVVRLMFTAFLPDSTGSFTRRLEPVVSDAIYDSKAPNASNLKIVRMDRTAGCVTGGEEIYLLCDKVQKDDIQIRFYEEEENGGVWEGFGDFSPTDVHRQFAIVFKTPKYKDINITKPASVFVQLRRKSDLETSEPKPFLYYPEIKDKEEVQRKRQKLMPNFSDSFGGGSGAGAGGGGMFGSGGGGGGTGSTGPGYSFPHYGFPTYGGITFHPGTTKSNAGMKHGTMDTESKKDPEGCDKSDDKNTVNLFGKVIETTEQDQEPSEATVGNGEVTLTYATGTKEESAGVQDNLFLEKAMQLAKRHANALFDYAVTGDVKMLLAVQRHLTAVQDENGDSVLHLAIIHLHSQLVRDLLEVTSGLISDDIINMRNDLYQTPLHLAVITKQEDVVEDLLRAGADLSLLDRLGNSVLHLAAKEGHDKVLSILLKHKKAALLLDHPNGDGLNAIHLAMMSNSLPCLLLLVAAGADVNAQEQKSGRTALHLAVEHDNISLAGCLLLEGDAHVDSTTYDGTTPLHIAAGRGSTRLAALLKAAGADPLVENFEPLYDLDDSWENAGEDEGVVPGTTPLDMATSWQVFDILNGKPYEPEFTSDDLLAQGDMKQLAEDVKLQLYKLLEIPDPDKNWATLAQKLGLGILNNAFRLSPAPSKTLMDNYEVSGGTVRELVEALRQMGYTEAIEVIQAASSPVKTTSQAHSLPLSPASTRQQIDELRDSDSVCDSGVETSFRKLSFTESLTSGASLLTLNKMPHDYGQEGPLEGKI

SEQ ID NO: 469 - protein, 153 aa, Homo sapiens
MYRMQLLSCIALSLALVTNSAPTSSSTKKTQLQLEHLLLDLQMILNGINNYKNPKLTRMLTFKFYMPKKATELKHLQCLEEELKPLEEVLNLAQSKNFHLRPRDLISNINVIVLELKGSETTFMCEYADETATIVEFLNRWITFCQSIISTLT

SEQ ID NO: 470 - protein, 890 aa, Homo sapiens
MDSNTAPLGPSCPQPPPAPQPQARSRLNATASLEQERSERPRAPGPQAGPGPGVRDAAAPAEPQAQHTRSRERADGTGPTKGDMEIPFEEVLERAKAGDPKAQTEVGKHYLQLAGDTDEELNSCTAVDWLVLAAKQGRREAVKLLRRCLADRRGITSENEREVRQLSSETDLERAVRKAALVMYWKLNPKKKKQVAVAELLENVGQVNEHDGGAQPGPVPKSLQKQRRMLERLVSSESKNYIALDDFVEITKKYAKGVIPSSLFLQDDEDDDELAGKSPEDLPLRLKVVKYPLHAIMEIKEYLIDMASRAGMHWLSTIIPTHHINALIFFFIVSNLTIDFFAFFIPLVIFYLSFISMVICTLKVFQDSKAWENFRTLTDLLLRFEPNLDVEQAEVNFGWNHLEPYAHFLLSVFFVIFSFPIASKDCIPCSELAVITGFFTVTSYLSLSTHAEPYTRRALATEVTAGLLSLLPSMPLNWPYLKVLGQTFITVPVGHLVVLNVSVPCLLYVYLLYLFFRMAQLRNFKGTYCYLVPYLVCFMWCELSVVILLESTGLGLLRASIGYFLFLFALPILVAGLALVGVLQFARWFTSLELTKIAVTVAVCSVPLLLRWWTKASFSVVGMVKSLTRSSMVKLILVWLTAIVLFCWFYVYRSEGMKVYNSTLTWQQYGALCGPRAWKETNMARTQILCSHLEGHRVTWTGRFKYVRVTDIDNSAESAINMLPFFIGDWMRCLYGEAYPACSPGNTSTAEEELCRLKLLAKHPCHIKKFDRYKFEITVGMPFSSGADGSRSREEDDVTKDIVLRASSEFKSVLLSLRQGSLIEFSTILEGRLGSKWPVFELKAISCLNCMAQLSPTRRHVKIEHDWRSTVHGAVKFAFDFFFFPFLSAA

SEQ ID NO: 471 - protein, 428 aa, Homo sapiens
MNRQGNRKTTKEGSNDLKFQNFSLPKNRSWPRINSATGQYQRMNKPLLDWERNFAAVLDGAKGHSDDDYDDPELRMEETWQSIKILPARPIKESEYADTHYFKVAMDTPLPLDTRTSISIGQPTWNTQTRLERVDKPISKDVRSQNIKGDASVRKNKIPLPPPRPLITLPKKYQPLPPEPESSRPPLSQRHTFPEVQRMPSQISLRDLSEVLEAEKVPHNQRKPESTHLLENQNTQEIPLAISSSSFTTSNHSVQNRDHRGGMQPCSPQRCQPPASCSPHENILPYKYTSWRPPFPKRSDRKDVQHNEWYIGEYSRQAVEEAFMKENKDGSFLVRDCSTKSKEEPYVLAVFYENKVYNVKIRFLERNQQFALGTGLRGDEKFDSVEDIIEHYKNFPIILIDGKDKTGVHRKQCHLTQPLPLTRHLLPL

SEQ ID NO: 472 - protein, 482 aa, Homo sapiens
MLFEGKVNPQTQSLLAECGEWTRRSLHLRVLGRQLILPTDKGVQHFQGSTPASAVHRPPLSACGHSSNIRELCISGSQIVPAALSASALPGPDDTGVADLTARSSLEEEVYHVDGKIEEYFAFDRKEDDDECLEQKPAQPGRKWRKLGLPPVSPRDCVKDAVAAEVFDHVWTNMVELLEELIRKHWETTLTEGKKQRETLKVAGNRFPHVLVPHAHADGASGPPSGHAEAHGISLASRLNPPQIHHFSSSFYSDMNGVMTIQAKPLQRRPAYFADRTQNEKEDKASGGGAGALSSAPHRLGRASDTHGLSPSAKKTPVPWRLPSLASDSQRLKTPNIYSDEVLRGTKLPTGVDHMASPLVQTSRSRFPPLVTETRGQNTAVPGCRLVSYRGRHLQNRVLSAMPDGTERSRLRERTATLERLSRPSTTHTFRQSDTPRKSSLTQMEFAAHTWTGQSILTGSQYVPKSFQRTTLTFKRRFQVTS

SEQ ID NO: 473 - protein, 463 aa, Homo sapiens
MGAGPSLLLAALLLLLSGDGAVRCDTPANCTYLDLLGTWVFQVGSSGSQRDVNCSVMGPQEKKVVVYLQKLDTAYDDLGNSGHFTIIYNQGFEIVLNDYKWFAFFKYKEEGSKVTTYCNETMTGWVHDVLGRNWACFTGKKVGTASENVYVNIAHLKNSQEKYSNRLYKYDHNFVKAINAIQKSWTATTYMEYETLTLGDMIRRSGGHSRKIPRPKPAPLTAEIQQKILHLPTSWDWRNVHGINFVSPVRNQASCGSCYSFASMGMLEARIRILTNNSQTPILSPQEVVSCSQYAQGCEGGFPYLIAGKYAQDFGLVEEACFPYTGTDSPCKMKEDCFRYYSSEYHYVGGFYGGCNEALMKLELVHHGPMAVAFEVYDDFLHYKKGIYHHTGLRDPFNPFELTNHAVLLVGYGTDSASGMDYWIVKNSWGTGWGENGYFRIRRGTDECAIESIAVAATPIPKL

SEQ ID NO: 474 - protein, 778 aa, Homo sapiens
MSKRKLIPKLSIQSPVLHTNLNVQSTHPPLKKEDLHRISKDSLESDSESLTQEIMCHSEFDDRIRGNGMEPDSLDEEESPRWGSLHEMEEEASGKAAQMAREQNHHTWDQGANNRQQPIEDKYSDLRYDPNWKSKKEEGQLLSVEALPESTDSSLENLPLAPLYPSQETSMELSGGKGEQKESPQSAASLLGSEFLSPNYEHGARRSKPFSELSDSDLEEKSSSLSPYVKSSSSHNEVFLPGSRGPRRRKSKQHFVEKNKLTLGLPTPKTDSYLQLHNKKRGESHPEQISYPVRVTDKTSIQNAKEMENAAIDPEDKWHQRAQQLKNYQEHWSQYESTKSSNVPRGQPSDMVNDHQPSRRPAKLKIRKQCKHQNGLKSSTTEEVTASQGNQNNPPRQQQNQNKPLDTSTKPESIVIMHASNNDVQASRALRSHNLKETSNTFAPPKQAFDKVLSKNSTGCDSGLNVNKERGHKDQEEKRFSYQQLHTLSDMDLNNLNELSKRHVLLSQKGSQFVYHINTHGSTKNKKQLKQPYTETKYRNLEMLWKFHSSSDSQTVRASPDSWLTQIMEQHQQALVQLTDVQPSEGALSSVTLPPILSRVESESQLSSERSQRNQVKISRSNSEGYLFQLEKGKKHKKRSSSKNTKLKGYQKRDVKLGGLGPDFESIRDKTQKLIQQKEYAKQVKEYNMKTLSILSKPQTEKTQKKSAIPRQKALEYAKTIPKPKPSNLTHQASKEQKNPTYAGKEESLPEISLLEILQNRHEREKQAVAAFKVLHIV

SEQ ID NO: 475 - protein, 646 aa, Homo sapiens
MSKGPAVGIDLGTTYSCVGVFQHGKVEIIANDQGNRTTPSYVAFTDTERLIGDAAKNQVAMNPTNTVFDAKRLIGRRFDDAVVQSDMKHWPFMVVNDAGRPKVQVEYKGETKSFYPEEVSSMVLTKMKEIAEAYLGKTVTNAVVTVPAYFNDSQRQATKDAGTIAGLNVLRIINEPTAAAIAYGLDKKVGAERNVLIFDLGGGTFDVSILTIEDGIFEVKSTAGDTHLGGEDFDNRMVNHFIAEFKRKHKKDISENKRAVRRLRTACERAKRTLSSSTQASIEIDSLYEGIDFYTSITRARFEELNADLFRGTLDPVEKALRDAKLDKSQIHDIVLVGGSTRIPKIQKLLQDFFNGKELNKSINPDEAVAYGAAVQAAILSGDKSENVQDLLLLDVTPLSLGIETAGGVMTVLIKRNTTIPTKQTQTFTTYSDNQPGVLIQVYEGERAMTKDNNLLGKFELTGIPPAPRGVPQIEVTFDIDANGILNVSAVDKSTGKENKITITNDKGRLSKEDIERMVQEAEKYKAEDEKQRDKVSSKNSLESYAFNMKATVEDEKLQGKINDEDKQKILDKCNEIINWLDKNQTAEKEEFEHQQKELEKVCNPIITKLYQSAGGMPGGMPGGFPGGGAPPSGGASSGPTIEEVD

SEQ ID NO: 476 - protein, 619 aa, Homo sapiens
MLLASAVVVWEWLNEHGRWRPYSPAVSHHIEAVVRAGPRAGGSVVLGQVDSRLAPYIIDLQSMNQFRQDTGTLRPVRRNYYDPSSAPGKGVVWEWENDNGSWTPYDMEVGITIQHAYEKQHPWIDLTSIGFSYVIDFNTMGQINRQTQRQRRVRRRLDLIYPMVTGTLPKAQSWPVSPGPATSPPMSPCSCPQCVLVMSVKAAVVNGSTGPLQLPVTRKNMPPPGVVKLPPLPGSGAKPLDSTGTIRGPLKTAPSQVIRRQASSMPTGTTMGSPASPPGPNSKTGRVALATLNRTNLQRLAIAQSRVLIASGVPTVPVKNLNGSSPVNPALAGITGILMSAAGLPVCLTRPPKLVLHPPPVSKSEIKSIPGVSNTSRKTTKKQAKKGKTPEEVLKKYLQKVRHPPDEDCTICMERLTAPSGYKGPQPTVKPDLVGKLSRCGHVYHIYCLVAMYNNGNKDGSLQCPTCKTIYGVKTGTQPPGKMEYHLIPHSLPGHPDCKTIRIIYSIPPGIQGPEHPNPGKSFSARGFPRHCYLPDSEKGRKVLKLLLVAWDRRLIFAIGTSSTTGESDTVIWNEVHHKTEFGSNLTGHGYPDANYLDNVLAELAAQGISEDSTAQEKD

SEQ ID NO: 477 - protein, 481 aa, Homo sapiens
MAYNDTDRNQTEKLLKRVRELEQEVQRLKKEQAKNKEDSNIRENSAGAGKTKRAFDFSAHGRRHVALRIAYMGWGYQGFASQENTNNTIEEKLFEALTKTRLVESRQTSNYHRCGRTDKGVSAFGQVISLDLRSQFPRGRDSEDFNVKEEANAAAEEIRYTHILNRVLPPDIRILAWAPVEPSFSARFSCLERTYRYFFPRADLDIVTMDYAAQKYVGTHDFRNLCKMDVANGVINFQRTILSAQVQLVGQSPGEGRWQEPFQLCQFEVTGQAFLYHQVRCMMAILFLIGQGMEKPEIIDELLNIEKNPQKPQYSMAVEFPLVLYDCKFENVKWIYDQEAQEFNITHLQQLWANHAVKTHMLYSMLQGLDTVPVPCGIGPKMDGMTEWGNVKPSVIKQTSAFVEGVKMRTYKPLMDRPKCQGLESRIQHFVRRGRIEHPHLFHEEETKAKRDCNDTLEEENTNLETPTKRVCVDTEIKSII

SEQ ID NO: 478 - protein, 329 aa, Homo sapiens
MVSKSRWKLLAMLALVLVVMVWYSISREDSFYFPIPEKKEPCLQGEAESKASKLFGNYSRDQPIFLRLEDYFWVKTPSAYELPYGTKGSEDLLLRVLAITSSSIPKNIQSLRCRRCVVVGNGHRLRNSSLGDAINKYDVVIRLNNAPVAGYEGDVGSKTTMRLFYPESAHFDPKVENNPDTLLVLVAFKAMDFHWIETILSDKKRVRKGFWKQPPLIWDVNPKQIRILNPFFMEIAADKLLSLPMQQPRKIKQKPTTGLLAITLALHLCDLVHIAGFGYPDAYNKKQTIHYYEQITLKSMAGSGHNVSQEALAIKRMLEMGAIKNLTSF

SEQ ID NO: 479 - protein, 548 aa, Homo sapiens
MATGANATPLDFPSKKRKRSRWNQDTMEQKTVIPGMPTVIPPGLTREQERAYIVQLQIEDLTRKLRTGDLGIPPNPEDRSPSPEPIYNSEGKRLNTREFRTRKKLEEERHNLITEMVALNPDFKPPADYKPPATRVSDKVMIPQDEYPEINFVGLLIGPRGNTLKNIEKECNAKIMIRGKGSVKEGKVGRKDGQMLPGEDEPLHALVTANTMENVKKAVEQIRNILKQGIETPEDQNDLRKMQLRELARLNGTLREDDNRILRPWQSSETRSITNTTVCTKCGGAGHIASDCKFQRPGDPQSAQDKARMDKEYLSLMAELGEAPVPASVGSTSGPATTPLASAPRPAAPANNPPPPSLMSTTQSRPPWMNSGPSESRPYHGMHGGGPGGPGGGPHSFPHPLPSLTGGHGGHPMQHNPNGPPPPWMQPPPPPMNQGPHPPGHHGPPPMDQYLGSTPVGSGVYRLHQGKGMMPPPPMGMMPPPPPPPSGQPPPPPSGPLPPWQQQQQQPPPPPPPSSSMASSTPLPWQQRSLPAAAMARAMRVRTFRAHW

SEQ ID NO: 480 - protein, 295 aa, Homo sapiens
MEHQLLCCEVETIRRAYPDANLLNDRVLRAMLKAEETCAPSVSYFKCVQKEVLPSMRKIVATWMLEVCEEQKCEEEVFPLAMNYLDRFLSLEPVKKSRLQLLGATCMFVASKMKETIPLTAEKLCIYTDNSIRPEELLQMELLLVNKLKWNLAAMTPHDFIEHFLSKMPEAEENKQIIRKHAQTFVALCATDVKFISNPPSMVAAGSVVAAVQGLNLRSPNNFLSYYRLTRFLSRVIKCDPDCLRACQEQIEALLESSLRQAQQNMDPKAAEEEEEEEEEVDLACTPTDVRDVDI

SEQ ID NO: 481 - protein, 426 aa, Homo sapiens
MAIAQLATEYVFSDFLLKEPTEPKFKGLRLELAVDKMVTCIAVGLPLLLISLAFAQEISIGTQISCFSPSSFSWRQAAFVDSYCWAAVQQKNSLQSESGNLPLWLHKFFPYILLLFAILLYLPPLFWRFAAAPHICSDLKFIMEELDKVYNRAIKAAKSARDLDMRDGACSVPGVTENLGQSLWEVSESHFKYPIVEQYLKTKKNSNNLIIKYISCRLLTLIIILLACIYLGYYFSLSSLSDEFVCSIKSGILRNDSTVPDQFQCKLIAVGIFQLLSVINLVVYVLLAPVVVYTLFVPFRQKTDVLKVYEILPTFDVLHFKSEGYNDLSLYNLFLEENISEVKSYKCLKVLENIKSSGQGIDPMLLLTNLGMIKMDVVDGKTPMSAEMREEQGNQTAELQGMNIDSETKANNGEKNARQRLLDSSC

SEQ ID NO: 482 - protein, 366 aa, Homo sapiens
MASMAAVLTWALALLSAFSATQARKGFWDYFSQTSGDKGRVEQIHQQKMAREPATLKDSLEQDLNNMNKFLEKLRPLSGSEAPRLPQDPVGMRRQLQEELEEVKARLQPYMAEAHELVGWNLEGLRQQLKPYTMDLMEQVALRVQELQEQLRVVGEDTKAQLLGGVDEAWALLQGLQSRVVHHTGRFKELFHPYAESLVSGIGRHVQELHRSVAPHAPASPARLSRCVQVLSRKLTLKAKALHARIQQNLDQLREELSRAFAGTGTEEGAGPDPQMLSEEVRQRLQAFRQDTYLQIAAFTRAIDQETEEVQQQLAPPPPGHSAFAPEFQQTDSGKVLSKLQARLDDLWEDITHSLHDQGHSHLGDP

SEQ ID NO: 483 - protein, 99 aa, Homo sapiens
MQPRVLLVVALLALLASARASEAEDASLLSFMQGYMKHATKTAKDALSSVQESQVAQQARGWVTDGFSSLKDYWSTVKDKFSEFWDLDPEVRPTSAVAA

SEQ ID NO: 484 - protein, 578 aa, Homo sapiens
MLPCLVVLLAALLSLRLGSDAHGTELPSPPSVWFEAEFFHHILHWTPIPNQSESTCYEVALLRYGIESWNSISNCSQTLSYDLTAVTLDLYHSNGYRARVRAVDGSRHSNWTVTNTRFSVDEVTLTVGSVNLEIHNGFILGKIQLPRPKMAPANDTYESIFSHFREYEIAIRKVPGNFTFTHKKVKHENFSLLTSGEVGEFCVQVKPSVASRSNKGMWSKEECISLTRQYFTVTNVIIFFAFVLLLSGALAYCLALQLYVRRRKKLPSVLLFKKPSPFIFISQRPSPETQDTIHPLDEEAFLKVSPELKNLDLHGSTDSGFGSTKPSLQTEEPQFLLPDPHPQADRTLGNREPPVLGDSCSSGSSNSTDSGICLQEPSLSPSTGPTWEQQVGSNSRGQDDSGIDLVQNSEGRAGDTQGGSALGHHSPPEPEVPGEEDPAAVAFQGYLRQTRCAEEKATKTGCLEEESPLTDGLGPKFGRCLVDEAGLHPPALAKGYLKQDPLEMTLASSGAPTGQWNQPTEEWSLLALSSCSDLGISDWSFAHDLAPLGCVAAPGGLLGSFNSDLVTLPLISSLQSSE

SEQ ID NO: 485 - protein, 607 aa, Homo sapiens
MVCTRKTKTLVSTCVILSGMTNIICLLYVGWVTNYIASVYVRGQEPAPDKKLEEDKGDTLKIIERLDHLENVIKQHIQEAPAKPEEAEAEPFTDSSLFAHWGQELSPEGRRVALKQFQYYGYNAYLSDRLPLDRPLPDLRPSGCRNLSFPDSLPEVSIVFIFVNEALSVLLRSIHSAMERTPPHLLKEIILVDDNSSNEELKEKLTEYVDKVNSQKPGFIKVVRHSKQEGLIRSRVSGWRAATAPVVALFDAHVEFNVGWAEPVLTRIKENRKRIISPSFDNIKYDNFEIEEYPLAAQGFDWELWCRYLNPPKAWWKLENSTAPIRSPALIGCFIVDRQYFQEIGLLDEGMEVYGGENVELGIRVWQCGGSVEVLPCSRIAHIERAHKPYTEDLTAHVRRNALRVAEVWMDEFKSHVYMAWNIPQEDSGIDIGDITARKALRKQLQCKTFRWYLVSVYPEMRMYSDIIAYGVLQNSLKTDLCLDQGPDTENVPIMYICHGMTPQNVYYTSSQQIHVGILSPTVDDDDNRCLVDVNSRPRLIECSYAKAKRMKLHWQFSQGGPIQNRKSKRCLELQENSDLEFGFQLVLQKCSGQHWSITNVLRSLAS

SEQ ID NO: 486 - protein, 501 aa, Homo sapiens
MAASWRLGCDPRLLRYLVGFPGRRSVGLVKGALGWSVSRGANWRWFHSTQWLRGDPIKILMPSLSPTMEEGNIVKWLKKEGEAVSAGDALCEIETDKAVVTLDASDDGILAKIVVEEGSKNIRLGSLIGLIVEEGEDWKHVEIPKDVGPPPPVSKPSEPRPSPEPQISIPVKKEHIPGTLRFRLSPAARNILEKHSLDASQGTATGPRGIFTKEDALKLVQLKQTGKITESRPTPAPTATPTAPSPLQATAGPSYPRPVIPPVSTPGQPNAVGTFTEIPASNIRRVIAKRLTESKSTVPHAYATADCDLGAVLKVRQDLVKDDIKVSVNDFIIKAAAVTLKQMPDVNVSWDGEGPKQLPFIDISVAVATDKGLLTPIIKDAAAKGIQEIADSVKALSKKARDGKLLPEEYQGGSFSISNLGMFGIDEFTAVINPPQACILAVGRFRPVLKLTEDEEGNAKLQQRQLITVTMSSDSRVVDDELATRFLKSFKANLENPIRLA

SEQ ID NO: 487 - protein, 981 aa, Homo sapiens
MATAAETSASEPEAESKAGPKADGEEDEVKAARTRRKVLSRAVAAATYKTMGPAWDQQEEGVSESDGDEYAMASSAESSPGEYEWEYDEEEEKNQLEIERLEEQLSINVYDYNCHVDLIRLLRLEGELTKVRMARQKMSEIFPLTEELWLEWLHDEISMAQDGLDREHVYDLFEKAVKDYICPNIWLEYGQYSVGGIGQKGGLEKVRSVFERALSSVGLHMTKGLALWEAYREFESAIVEAARPVAGFLSPFDREQTFDSQLEKVHSLFRRQLAIPLYDMEATFAEYEEWSEDPIPESVIQNYNKALQQLEKYKPYEEALLQAEAPRLAEYQAYIDFEMKIGDPARIQLIFERALVENCLVPDLWIRYSQYLDRQLKVKDLVLSVHNRAIRNCPWTVALWSRYLLAMERHGVDHQVISVTFEKALNAGFIQATDYVEIWQAYLDYLRRRVDFKQDSSKELEELRAAFTRALEYLKQEVEERFNESGDPSCVIMQNWARIEARLCNNMQKARELWDSIMTRGNAKYANMWLEYYNLERAHGDTQHCRKALHRAVQCTSDYPEHVCEVLLTMERTEGSLEDWDIAVQKTETRLARVNEQRMKAAEKEAALVQQEEEKAEQRKRARAEKKALKKKKKIRGPEKRGADEDDEKEWGDDEEEQPSKRRRVENSIPAAGETQNVEVAAGPAGKCAAVDVEPPSKQKEKAASLKRDMPKVLHDSSKDSITVFVSNLPYSMQEPDTKLRPLFEACGEVVQIRPIFSNRGDFRGYCYVEFKEEKSALQALEMDRKSVEGRPMFVSPCVDKSKNPDFKVFRYSTSLEKHKLFISGLPFSCTKEELEEICKAHGTVKDLRLVTNRAGKPKGLAYVEYENESQASQAVMKMDGMTIKENIIKVAISNPPQRKVPEKPETRKAPGGPMLLPQTYGARGKGRTQLSLLPRALQRPSAAAPQAENGPAAAPAVAAPAATEAPKMSNADFAKLFLRK

SEQ ID NO: 488 - protein, 947 aa, Homo sapiens
MATRVRTASIWVPPLQERNSSWDRIRKLQGQESILGQGTPGLQPLPGTPRQKQKSRRIEKVLEWLFISQEQPKITKSWGPLSFMDVFVDFTWEEWQLLDPAQKCLYRSVMLENYSNLVSLGYQHTKPDIIFKLEQGEELCMVQAQVPNQTCPNTVWKIDDLMDWHQENKDKLGSTAKSFECTTFGKLCLLSTKYLSRQKPHKCGTHGKSLKYIDFTSDYARNNPNGFQVHGKSFFHSKHEQTVIGIKYCESIESGKTVNKKSQLMCQQMYMGEKPFGCSCCEKAFSSKSYLLVHQQTHAEEKPYGCNECGKDFSSKSYLIVHQRIHTGEKLHECSECRKTFSFHSQLVIHQRIHTGENPYECCECGKVFSRKDQLVSHQKTHSGQKPYVCNECGKAFGLKSQLIIHERIHTGEKPYECNECQKAFNTKSNLMVHQRTHTGEKPYVCSDCGKAFTFKSQLIVHQGIHTGVKPYGCIQCGKGFSLKSQLIVHQRSHTGMKPYVCNECGKAFRSKSYLIIHTRTHTGEKLHECNNCGKAFSFKSQLIIHQRIHTGENPYECHECGKAFSRKYQLISHQRTHAGEKPYECTDCGKAFGLKSQLIIHQRTHTGEKPFECSECQKAFNTKSNLIVHQRTHTGEKPYSCNECGKAFTFKSQLIVHKGVHTGVKPYGCSQCAKTFSLKSQLIVHQRSHTGVKPYGCSECGKAFRSKSYLIIHMRTHTGEKPHECRECGKSFSFNSQLIVHQRIHTGENPYECSECGKAFNRKDQLISHQRTHAGEKPYGCSECGKAFSSKSYLIIHMRTHSGEKPYECNECGKAFIWKSLLIVHERTHAGVNPYKCSQCEKSFSGKLRLLVHQRMHTREKPYECSECGKAFIRNSQLIVHQRTHSGEKPYGCNECGKTFSQKSILSAHQRTHTGEKPCKCTECGKAFCWKSQLIMHQRTHVDDKH

SEQ ID NO: 489 - protein, 591 aa, Homo sapiens
MDDLDALLADLESTTSHISKRPVFLSEETPYSYPTGNHTYQEIAVPPPVPPPPSSEALNGTILDPLDQWQPSSSRFIHQQPQSSSPVYGSSAKTSSVSNPQDSVGSPCSRVGEEEHVYSFPNKQKSAEPSPTVMSTSLGSNLSELDRLLLELNAVQHNPPGFPADEANSSPPLPGALSPLYGVPETNSPLGGKAGPLTKEKPKRNGGRGLEDVRPSVESLLDELESSVPSPVPAITVNQGEMSSPQRVTSTQQQTRISASSATRELDELMASLSDFKIQGLEQRADGERCWAAGWPRDGGRSSPGGQDEGGFMAQGKTGSSSPPGGPPKPGSQLDSMLGSLQSDLNKLGVATVAKGVCGACKKPIAGQVVTAMGKTWHPEHFVCTHCQEEIGSRNFFERDGQPYCEKDYHNLFSPRCYYCNGPILDKVVTALDRTWHPEHFFCAQCGAFFGPEGFHEKDGKAYCRKDYFDMFAPKCGGCARAILENYISALNTLWHPECFVCRECFTPFVNGSFFEHDGQPYCEVHYHERRGSLCSGCQKPITGRCITAMAKKFHPEHFVCAFCLKQLNKGTFKEQNDKPYCQNCFLKLFC

SEQ ID NO: 490 - protein, 362 aa, Homo sapiens
MFSSVAHLARANPFNTPHLQLVHDGLGDLRSSSPGPTGQPRRPRNLAAAAVEEQYSCDYGSGRFFILCGLGGIISCGTTHTALVPLDLVKCRMQVDPQKYKGIFNGFSVTLKEDGVRGLAKGWAPTFLGYSMQGLCKFGFYEVFKVLYSNMLGEENTYLWRTSLYLAASASAEFFADIALAPMEAAKVRIQTQPGYANTLRDAAPKMYKEEGLKAFYKGVAPLWMRQIPYTMMKFACFERTVEALYKFVVPKPRSECSKPEQLVVTFVAGYIAGVFCAIVSHPADSVVSVLNKEKGSSASLVLKRLGFKGVWKGLFARIIMIGTLTALQWFIYDSVKVYFRLPRPPPPEMPESLKKKLGLTQ

SEQ ID NO: 491 - protein, 1005 aa, Homo sapiens
MMSDASDMLAAALEQMDGIIAGSKALEYSNGIFDCQSPTSPFMGSLRALHLVEDLRGLLEMMETDEKEGLRCQIPDSTAETLVEWLQSQMTNGHLPGNGDVYQERLARLENDKESLVLQVSVLTDQVEAQGEKIRDLEFCLEEHREKVNATEEMLQQELLSRTSLETQKLDLMAEISNLKLKLTAVEKDRLDYEDKFRDTEGLIQEINDLRLKVSEMDSERLQYEKKLKSTKDELASLKEQLEEKESEVKRLQEKLVCKMKGEGVEIVDRDENFKKKLKEKNIEVQKMKKAVESLMAANEEKDRKIEDLRQCLNRYKKMQDTVVLAQGKKGKDGEYEELLNSSSISSLLDAQGFSDLEKSPSPTPVMGSPSCDPFNTSVPEEFHTTILQVSIPSLLPATVSMETSEKSKLTPKPETSFEENDGNIILGATVDTQLCDKLLTSSLQKSSSLGNLKKETSDGEKETIQKTSEDRAPAESRPFGTLPPRPPGQDTSMDDNPFGTRKVRSSFGRGFFKIKSNKRTASAPNLDRKRSASAPTLAETEKETAEHLDLAGASSRPKDSQRNSPFQIPPPSPDSKKKSRGIMKLFGKLRRSQSTTFNPDDMSEPEFKRGGTRATAGPRLGWSRDLGQSNSDLDMPFAKWTKEQVCNWLMEQGLGSYLNSGKHWIASGQTLLQASQQDLEKELGIKHSLHRKKLQLALQALGSEEETNHGKLDFNWVTRWLDDIGLPQYKTQFDEGRVDGRMLHYMTVDDLLSLKVVSVLHHLSIKRAIQVLRINNFEPNCLRRRPSDENTIAPSEVQKWTNHRVMEWLRSVDLAEYAPNLRGSGVHGGLMVLEPRFNVETMAQLLNIPPNKTLLRRHLATHFNLLIGAEAQHQKRDAMELPDYVLLTATAKVKPKKLAFSNFGNLRKKKQEDGEEYVCPMELGQASGSASKKGFKPGLDMRLYEEDDLDRLEQMEDSEGTVRQIGAFSEGINNLTHMLKEDDMFKDFAARSPSASITDEDSNV

SEQ ID NO: 492 - protein, 199 aa, Homo sapiens
MSSENCFVAENSSLHPESGQENDATSPHFSTRHEGSFQVPVLCAVMNVVFITILIIALIALSVGQYNCPGQYTFSMPSDSHVSSCSEDWVGYQRKCYFISTVKRSWTSAQNACSEHGATLAVIDSEKDMNFLKRYAGREEHWVGLKKEPGHPWKWSNGKEFNNWFNVTGSDKCVFLKNTEVSSMECEKNLYWICNKPYK

SEQ ID NO: 493 - protein, 801 aa, Homo sapiens
MHHRMNEMNLSPVGMEQLTSSSVSNALPVSGSHLGLAASPTHSAIPAPGLPVAIPNLGPSLSSLPSALSLMLPMGIGDRGVMCGLPERNYTLPPPPYPHLESSYFRTILPGILSYLADRPPPQYIHPNSINVDGNTALSITNNPSALDPYQSNGNVGLEPGIVSIDSRSVNTHGAQSLHPSDGHEVALDTAITMENVSRVTSPISTDGMAEELTMDGVAGEHSQIPNGSRSHEPLSVDSVSNNLAADAVGHGGVIPMHGNGLELPVVMETDHIASRVNGMSDSALSDSIHTVAMSTNSVSVALSTSHNLASLESVSLHEVGLSLEPVAVSSITQEVAMGTGHVDVSSDSLSFVSPSLQMEDSNSNKENMATLFTIWCTLCDRAYPSDCPEHGPVTFVPDTPIESRARLSLPKQLVLRQSIVGAEVGVWTGETIPVRTCFGPLIGQQSHSMEVAEWTDKAVNHIWKIYHNGVLEFCIITTDENECNWMMFVRKARNREEQNLVAYPHDGKIFFCTSQDIPPENELLFYYSRDYAQQIGVPEHPDVHLCNCGKECNSYTEFKAHLTSHIHNHLPTQGHSGSHGPSHSKERKWKCSMCPQAFISPSKLHVHFMGHMGMKPHKCDFCSKAFSDPSNLRTHLKIHTGQKNYRCTLCDKSFTQKAHLESHMVIHTGEKNLKCDYCDKLFMRRQDLKQHVLIHTQERQIKCPKCDKLFLRTNHLKKHLNSHEGKRDYVCEKCTKAYLTKYHLTRHLKTCKGPTSSSSAPEEEEEDDSEEEDLADSVGTEDCRINSAVYSADESLSAHK

SEQ ID NO: 494 - protein, 347 aa, Homo sapiens
MRVVVIGAGVIGLSTALCIHERYHSVLQPLDIKVYADRFTPLTTTDVAAGLWQPYLSDPNNPQEADWSQQTFDYLLSHVHSPNAENLGLFLISGYNLFHEAIPDPSWKDTVLGFRKLTPRELDMFPDYGYGWFHTSLILEGKNYLQWLTERLTERGVKFFQRKVESFEEVAREGADVIVNCTGVWAGALQRDPLLQPGRGQIMKVDAPWMKHFILTHDPERGIYNSPYIIPGTQTVTLGGIFQLGNWSELNNIQDHNTIWEGCCRLEPTLKNARIIGERTGFRPVRPQIRLEREQLRTGPSNTEVIHNYGHGGYGLTIHWGCALEAAKLFGRILEEKKLSRMPPSHL

SEQ ID NO: 495 - protein, 292 aa, Homo sapiens
MLGAWAVEGTAVALLRLLLLLLPPAIRGPGLGVAGVAGAAGAGLPESVIWAVNAGGEAHVDVHGIHFRKDPLEGRVGRASDYGMKLPILRSNPEDQILYQTERYNEETFGYEVPIKEEGDYVLVLKFAEVYFAQSQQKVFDVRLNGHVVVKDLDIFDRVGHSTAHDEIIPMSIRKGKLSVQGEVSTFTGKLYIEFVKGYYDNPKVCALYIMAGTVDDVPKLQPHPGLEKKEEEEEEEEYDEGSNLKKQTNKNRVQSGPRTPNPYASDNSSLMFPILVAFGVFIPTLFCLCRL

SEQ ID NO: 496 - protein, 396 aa, Homo sapiens
MLSEVLLVSAPGKVILHGEHAVVHGKVALAVSLNLRTFLRLQPHSNGKVDLSLPNIGIKRAWDVARLQSLDTSFLEQGDVTTPTSEQVEKLKEVAGLPDDCAVTERLAVLAFLYLYLSICRKQRALPSLDIVVWSELPPGAGLGSSAAYSVCLAAALLTVCEEIPNPLKDGDCVNRWTKEDLELINKWAFQGERMIHGNPSGVDNAVSTWGGALRYHQGKISSLKRSPALQILLTNTKVPRNTRALVAGVRNRLLKFPEIVAPLLTSIDAISLECERVLGEMGEAPAPEQYLVLEELIDMNQHHLNALGVGHASLDQLCQVTRARGLHSKLTGAGGGGCGITLLKPGLEQPEVEATKQALTSCGFDCLETSIGAPGVSIHSATSLDSRVQQALDGL

SEQ ID NO: 497 - protein, 523 aa, Homo sapiens
MSFHKEDGVNSLCQKALHIVTELCFAGQVEWEKCSGIFPRDRGSQGGSSTDISVSLLAVVVSFCGLALLVVSLFVFWKLCWPCWKSKPVTSNITTLPQSISSAPTEVFETEEKKEIKENEKPAVKAIEPAIKISHTSPDIPAEVQTALKEHLIKHARVQRQITEPTSSTRHSSFRRHLPRQMQVSSVDFSMGTEPVLQRGETTTSIGRIKPELYKQKSVDSEGNQNEDVKICGKLNFTLQYDYENELLVVKIIKALDLPAKDFTGTSDPYVKMYLLPDRKKKFQTRVHRKTLNPLFDETFQFPVAYDQLSNRKLHFSVYDFDRFSRHDMIGEVILDNLFEVSDLSREATVWKDIHCATTESIDLGEIMFSLCYLPTAGRMTLTVIKCRNLKAMDITGSSDPYVKVSLMCEGRRLKKRKTTTKKNTLNPVYNEAIIFDIPPENVDQVSLSIAVMDYDRVGHNEVIGVCRTGLDAEGLGRDHWNEMLAYHRKPITHWHPLLELPGRATSFDSQGSCPSPKPPSTP

SEQ ID NO: 498 - protein, 242 aa, Homo sapiens
MMMDLFETGSYFFYLDGENVTLQPLEVAEGSPLYPGSDGTLSPCQDQMPPEAGSDSSGEEHVLAPPGLQPPHCPGQCLIWACKTCKRKSAPTDRRKAATLRERRRLKKINEAFEALKRRTVANPNQRLPKVEILRSAISYIERLQDLLHRLDQQEKMQELGVDPFSYRPKQENLEGADFLRTCSSQWPSVSDHSRGLVITAKEGGASIDSSASSSLRCLSSIVDSISSEERKLPCVEEVVEK

SEQ ID NO: 499 - protein, 255 aa, Homo sapiens
MDVMDGCQFSPSEYFYDGSCIPSPEGEFGDEFVPRVAAFGAHKAELQGSDEDEHVRAPTGHHQAGHCLMWACKACKRKSTTMDRRKAATMRERRRLKKVNQAFETLKRCTTTNPNQRLPKVEILRNAIRYIESLQELLREQVENYYSLPGQSCSEPTSPTSNCSDGMPECNSPVWSRKSSTFDSIYCPDVSNVYATDKNSLSSLDCLSNIVDRITSSEQPGLPLQDLASLSPVASTDSQPATPGASSSRLIYHVL

SEQ ID NO: 500 - protein, 1106 aa, Homo sapiens
MFNSMTPPPISSYGEPCCLRPLPSQGAPSVGTEGLSGPPFCHQANLMSGPHSYGPARETNSCTEGPLFSSPRSAVKLTKKRALSISPLSDASLDLQTVIRTSPSSLVAFINSRCTSPGGSYGHLSIGTMSPSLGFPAQMNHQKGPSPSFGVQPCGPHDSARGGMIPHPQSRGPFPTCQLKSELDMLVGKCREEPLEGDMSSPNSTGIQDPLLGMLDGREDLEREEKREPESVYETDCRWDGCSQEFDSQEQLVHHINSEHIHGERKEFVCHWGGCSRELRPFKAQYMLVVHMRRHTGEKPHKCTFEGCRKSYSRLENLKTHLRSHTGEKPYMCEHEGCSKAFSNASDRAKHQNRTHSNEKPYVCKLPGCTKRYTDPSSLRKHVKTVHGPDAHVTKRHRGDGPLPRAPSISTVEPKREREGGPIREESRLTVPEGAMKPQPSPGAQSSCSSDHSPAGSAANTDSGVEMTGNAGGSTEDLSSLDEGPCIAGTGLSTLRRLENLRLDQLHQLRPIGTRGLKLPSLSHTGTTVSRRVGPPVSLERRSSSSSSISSAYTVSRRSSLASPFPPGSPPENGASSLPGLMPAQHYLLRARYASARGGGTSPTAASSLDRIGGLPMPPWRSRAEYPGYNPNAGVTRRASDPAQAADRPAPARVQRFKSLGCVHTPPTVAGGGQNFDPYLPTSVYSPQPPSITENAAMDARGLQEEPEVGTSMVGSGLNPYMDFPPTDTLGYGGPEGAAAEPYGARGPGSLPLGPGPPTNYGPNPCPQQASYPDPTQETWGEFPSHSGLYPGPKALGGTYSQCPRLEHYGQVQVKPEQGCPVGSDSTGLAPCLNAHPSEGPPHPQPLFSHYPQPSPPQYLQSGPYTQPPPDYLPSEPRPCLDFDSPTHSTGQLKAQLVCNYVQSQQELLWEGGGREDAPAQEPSYQSPKFLGGSQVSPSRAKAPVNTYGPGFGPNLPNHKSGSYPTPSPCHENFVVGANRASHRAAAPPRLLPPLPTCYGPLKVGGTNPSCGHPEVGRLGGGPALYPPPEGQVCNPLDSLDLDNTQLDFVAILDEPQGLSPPPSHDQRGSSGHTPPPSGPPNMAVGNMSVLLRSLPGETEFLNSSA

SEQ ID NO: 501 - protein, 208 aa, Homo sapiens
MALGQKLFITMSRGAGRLQGTLWALVFLGILVGMVVPSPAGTRANNTLLDSRGWGTLLSRSRAGLAGEIAGVNWESGYLVGIKRQRRLYCNVGIGFHLQVLPDGRISGTHEENPYSLLEISTVERGVVSLFGVRSALFVAMNSKGRLYATPSFQEECKFRETLLPNNYNAYESDLYQGTYIALSKYGRVKRGSKVSPIMTVTHFLPRI

SEQ ID NO: 502 - protein, 853 aa, Homo sapiens
MSEKVDWLQSQNGVCKVDVYSPGDNQAQDWKMDTSTDPVRVLSWLRRDLEKSTAEFQDVRFKPGESFGGETSNSGDPHKGFSVDYYNTTTKGTPERLHFEMTHKEIPCQGPRAQLGNGSSVDEVSFYANRLTNLVIAMARKEINEKIDGSENKCVYQSLYMGNEPTPTKSLSKIASELVNETVSACSRNAAPDKAPGSGDRVSGSSQSPPNLKYKSTLKIKESTKERQGPDDKPPSKKSFFYKEVFESRNGDYAREGGRFFPRERKRFRGQERPDDFTASVSEGIMTYANSVVSDMMVSIMKTLKIQVKDTTIATILLKKVLLKHAKEVVSDLIDSFLRNLHSVTGTLMTDTQFVSAVKRTVFSHGSQKATDIMDAMLRKLYNVMFAKKVPEHVRKAQDKAESYSLISMKGMGDPKNRNVNFAMKSETKLREKMYSEPKSEEETCAKTLGEHIIKEGLTLWHKTQQKECKSLGFQHAAFEAPNTQRKPASDISFEYPEDIGNLSLPPYPPEKPENFMYDSDSWAEDLIVSALLLIQYHLAQGGRRDARSFVEAAGTTNFPANEPPVAPDESCLKSAPIVGDQEQAEKKDLRSVFFNFIRNLLSETIFKRDQSPEPKVPEQPVKEDRKLCERPLASSPPRLYEDDETPGALSGLTKMAVSQIDGHMSGQMVEHLMNSVMKLCVIIAKSCDASLAELGDDKSGDASRLTSAFPDSLYECLPAKGTGSAEAVLQNAYQAIHNEMRGTSGQPPEGCAAPTVIVSNHNLTDTVQNKQLQAVLQWVAASELNVPILYFAGDDEGIQEKLLQLSAAAVDKGCSVGEVLQSVLRYEKERQLNEAVGNVTPLQLLDWLMVNL

SEQ ID NO: 503 - protein, 198 aa, Homo sapiens
MSNVRVSNGSPSLERMDARQAEHPKPSACRNLFGPVDHEELTRDLEKHCRDMEEASQRKWNFDFQNHKPLEGKYEWQEVEKGSLPEFYYRPPRPPKGACKVPAQESQDVSGSRPAAPLIGAPANSEDTHLVDPKTDPSDSQTGLAEQCAGIRKRPATDDSSTQNKRANRTEENVSDGSPNAGSVEQTPKKPGLRRRQT

SEQ ID NO: 504 - protein, 345 aa, Homo sapiens
MYKDCIESTGDYFLLCDAEGPWGIILESLAILGIVVTILLLLAFLFLMRKIQDCSQWNVLPTQLLFLLSVLGLFGLAFAFIIELNQQTAPVRYFLFGVLFALCFSCLLAHASNLVKLVRGCVSFSWTTILCIAIGCSLLQIIIATEYVTLIMTRGMMFVNMTPCQLNVDFVVLLVYVLFLMALTFFVSKATFCGPCENWKQHGRLIFITVLFSIIIWVVWISMLLRGNPQFQRQPQWDDPVVCIALVTNAWVFLLLYIVPELCILYRSCRQECPLQGNACPVTAYQHSFQVENQELSRARDSDGAEEDVALTSYGTPIQPQTVDPTQECFIPQAKLSPQQDAGGV

SEQ ID NO: 505 - protein, 669 aa, Homo sapiens
MEGNKLEEQDSSPPQSTPGLMKGNKREEQGLGPEPAAPQQPTAEEEALIEFHRSYRELFEFFCNNTTIHGAIRLVCSQHNRMKTAFWAVLWLCTFGMMYWQFGLLFGEYFSYPVSLNINLNSDKLVFPAVTICTLNPYRYPEIKEELEELDRITEQTLFDLYKYSSFTTLVAGSRSRRDLRGTLPHPLQRLRVPPPPHGARRARSVASSLRDNNPQVDWKDWKIGFQLCNQNKSDCFYQTYSSGVDAVREWYRFHYINILSRLPETLPSLEEDTLGNFIFACRFNQVSCNQANYSHFHHPMYGNCYTFNDKNNSNLWMSSMPGINNGLSLMLRAEQNDFIPLLSTVTGARVMVHGQDEPAFMDDGGFNLRPGVETSISMRKETLDRLGGDYGDCTKNGSDVPVENLYPSKYTQQVCIHSCFQESMIKECGCAYIFYPRPQNVEYCDYRKHSSWGYCYYKLQVDFSSDHLGCFTKCRKPCSVTSYQLSAGYSRWPSVTSQEWVFQMLSRQNNYTVNNKRNGVAKVNIFFKELNYKTNSESPSVTMVTLLSNLGSQWSLWFGSSVLSVVEMAELVFDLLVIMFLMLLRRFRSRYWSPGRGGRGAQEVASTLASSPPSHFCPHPMSLSLSQPGPAPSPALTAPPPAYATLGPRPSPGGSAGASSSTCPLGGP

SEQ ID NO: 506 - protein, 1087 aa, Homo sapiens
MDLYSTPAAALDRFVARRLQPRKEFVEKARRALGALAAALRERGGRLGAAAPRVLKTVKGGSSGRGTALKGGCDSELVIFLDCFKSYVDQRARRAEILSEMRASLESWWQNPVPGLRLTFPEQSVPGALQFRLTSVDLEDWMDVSLVPAFNVLGQAGSGVKPKPQVYSTLLNSGCQGGEHAACFTELRRNFVNIRPAKLKNLILLVKHWYHQVCLQGLWKETLPPVYALELLTIFAWEQGCKKDAFSLAEGLRTVLGLIQQHQHLCVFWTVNYGFEDPAVGQFLQRQLKRPRPVILDPADPTWDLGNGAAWHWDLLAQEAASCYDHPCFLRGMGDPVQSWKGPGLPRAGCSGLGHPIQLDPNQKTPENSKSLNAVYPRAGSKPPSCPAPGPTGAASIVPSVPGMALDLSQIPTKELDRFIQDHLKPSPQFQEQVKKAIDIILRCLHENCVHKASRVSKGGSFGRGTDLRDGCDVELIIFLNCFTDYKDQGPRRAEILDEMRAQLESWWQDQVPSLSLQFPEQNVPEALQFQLVSTALKSWTDVSLLPAFDAVGQLSSGTKPNPQVYSRLLTSGCQEGEHKACFAELRRNFMNIRPVKLKNLILLVKHWYRQVAAQNKGKGPAPASLPPAYALELLTIFAWEQGCRQDCFNMAQGFRTVLGLVQQHQQLCVYWTVNYSTEDPAMRMHLLGQLRKPRPLVLDPADPTWNVGHGSWELLAQEAAALGMQACFLSRDGTSVQPWDVMPALLYQTPAGDLDKFISEFLQPNRQFLAQVNKAVDTICSFLKENCFRNSPIKVIKVVKGGSSAKGTALRGRSDADLVVFLSCFSQFTEQGNKRAEIISEIRAQLEACQQERQFEVKFEVSKWENPRVLSFSLTSQTMLDQSVDFDVLPAFDALGQLVSGSRPSSQVYVDLIHSYSNAGEYSTCFTELQRDFIISRPTKLKSLIRLVKHWYQQCTKISKGRGSLPPQHGLELLTVYAWEQGGKDSQFNMAEGFRTVLELVTQYRQLCIYWTINYNAKDKTVGDFLKQQLQKPRPIILDPADPTGNLGHNARWDLLAKEAAACTSALCCMGRNGIPIQPWPVKAAV

SEQ ID NO: 507 - protein, 314 aa, Homo sapiens
MGPLINRCKKILLPTTVPPATMRIWLLGGLLPFLLLLSGLQRPTEGSEVAIKIDFDFAPGSFDDQYQGCSKQVMEKLTQGDYFTKDIEAQKNYFRMWQKAHLAWLNQGKVLPQNMTTTHAVAILFYTLNSNVHSDFTRAMASVARTPQQYERSFHFKYLHYYLTSAIQLLRKDSIMENGTLCYEVHYRTKDVHFNAYTGATIRFGQFLSTSLLKEEAQEFGNQTLFTIFTCLGAPVQYFSLKKEVLIPPYELFKVINMSYHPRGDWLQLRSTGNLSTYNCQLLKASSKKCIPDPIAIASLSFLTSVIIFSKSRV

SEQ ID NO: 508 - protein, 369 aa, Homo sapiens
MRACISLVLAVLCGLAWAEDHKESEPLPQLEEETEEALASNLYSAPTSCQGRCYEAFDKHHQCHCNARCQEFGNCCKDFESLCSDHEVSHSSDAITKEEIQSISEKIYRADTNKAQKEDIVLNSQNCISPSETRNQVDRCPKPLFTYVNEKLFSKPTYAAFINLLNNYQRATGHGEHFSAQELAEQDAFLREIMKTAVMKELYSFLHHQNRYGSEQEFVDDLKNMWFGLYSRGNEEGDSSGFEHVFSGEVKKGKVTGFHNWIRFYLEEKEGLVDYYSHIYDGPWDSYPDVLAMQFNWDGYYKEVGSAFIGSSPEFEFALYSLCFIARPGKVCQLSLGGYPLAVRTYTWDKSTYGNGKKYIATAYIVSST

SEQ ID NO: 509 - protein, 581 aa, Homo sapiens
MQRPGPRLWLVLQVMGSCAAISSMDMERPGDGKCQPIEIPMCKDIGYNMTRMPNLMGHENQREAAIQLHEFAPLVEYGCHGHLRFFLCSLYAPMCTEQVSTPIPACRVMCEQARLKCSPIMEQFNFKWPDSLDCRKLPNKNDPNYLCMEAPNNGSDEPTRGSGLFPPLFRPQRPHSAQEHPLKDGGPGRGGCDNPGKFHHVEKSASCAPLCTPGVDVYWSREDKRFAVVWLAIWAVLCFFSSAFTVLTFLIDPARFRYPERPIIFLSMCYCVYSVGYLIRLFAGAESIACDRDSGQLYVIQEGLESTGCTLVFLVLYYFGMASSLWWVVLTLTWFLAAGKKWGHEAIEANSSYFHLAAWAIPAVKTILILVMRRVAGDELTGVCYVGSMDVNALTGFVLIPLACYLVIGTSFILSGFVALFHIRRVMKTGGENTDKLEKLMVRIGLFSVLYTVPATCVIACYFYERLNMDYWKILAAQHKCKMNNQTKTLDCLMAASIPAVEIFMVKIFMLLVVGITSGMWIWTSKTLQSWQQVCSRRLKKKSRRKPASVITSGGIYKKAQHPQKTHHGKYEIPAQSPTCV

SEQ ID NO: 510 - protein, 925 aa, Homo sapiens
MDRSGFGEISSPVIREAEVTRTARKQSAQKRVLLQASQDENFGNTTPRNQVIPRTPSSFRQPFTPTSRSLLRQPDISCILGTGGKSPRLTQSSGFFGNLSMVTNLDDSNWAAAFSSQRSGLFTNTEPHSITEDVTISAVMLREDDPGEAASMSMFSDFLQSFLKHSSSTVFDLVEEYENICGSQVNILSKIVSRATPGLQKFSKTASMLWLLQQEMVTWRLLASLYRDRIQSALEEESVFAVTAVNASEKTVVEALFQRDSLVRQSQLVVDWLESIAKDEIGEFSDNIEFYAKSVYWENTLHTLKQRQLTSYVGSVRPLVTELDPDAPIRQKMPLDDLDREDEVRLLKYLFTLIRAGMTEEAQRLCKRCGQAWRAATLEGWKLYHDPNVNGGTELEPVEGNPYRRIWKISCWRMAEDELFNRYERAIYAALSGNLKQLLPVCDTWEDTVWAYFRVMVDSLVEQEIQTSVATLDETEELPREYLGANWTLEKVFEELQATDKKRVLEENQEHYHIVQKFLILGDIDGLMDEFSKWLSKSRNNLPGHLLRFMTHLILFFRTLGLQTKEEVSIEVLKTYIQLLIREKHTNLIAFYTCHLPQDLAVAQYALFLESVTEFEQRHHCLELAKEADLDVATITKTVVENIRKKDNGEFSHHDLAPALDTGTTEEDRLKIDVIDWLVFDPAQRAEALKQGNAIMRKFLASKKHEAAKEVFVKIPQDSIAEIYNQCEEQGMESPLPAEDDNAIREHLCIRAYLEAHETFNEWFKHMNSVPQKPALIPQPTFTEKVAHEHKEKKYEMDFGIWKGHLDALTADVKEKMYNVLLFVDGGWMVDVREDAKEDHERTHQMVLLRKLCLPMLCFLLHTILHSTGQYQECLQLADMVSSERHKLYLVFSKEELRKLLQKLRESSLMLLDQGLDPLGYEIQL

SEQ ID NO: 511 - protein, 1207 aa, Homo sapiens
MDLHMMNCELLATCSALGYLEGDTYHKEPDCLESVKDLIRYLRHEDETRDVRQQLGAAQILQSDLLPILTQHHQDKPLFDAVIRLMVNLTQPALLCFGNLPKEPSFRHHFLQVLTYLQAYKEAFASEKAFGVLSETLYELLQLGWEERQEEDNLLIERILLLVRNILHVPADLDQEKIDDDASAHDQLLWAIHLSGLDDLLLFLASSSAEEQWSLHVLEIVSLMFRDQNPEQLAGVGQGRLAQERSADFAELEVLRQREMAEKKTRALQRGNRHSRFGGSYIVQGLKSIGERDLIFHKGLHNLRNYSSDLGKQPKKVPKRRQAARELSIQRRSALNVRLFLRDFCSEFLENCYNRLMGSVKDHLLREKAQQHDETYYMWALAFFMAFNRAASFRPGLVSETLSVRTFHFIEQNLTNYYEMMLTDRKEAASWARRMHLALKAYQELLATVNEMDISPDEAVRESSRIIKNNIFYVMEYRELFLALFRKFDERCQPRSFLRDLVETTHLFLKMLERFCRSRGNLVVQNKQKKRRKKKKKVLDQAIVSGNVPSSPEEVEAVWPALAEQLQCCAQNSELSMDSVVPFDAASEVPVEEQRAEAMVRIQDCLLAGQAPQALTLLRSAREVWPEGDVFGSQDISPEEEIQLLKQILSAPLPRQQGPEERGAEEEEEEEEEEEEELQVVQVSEKEFNFLDYLKRFACSTVVRAYVLLLRSYQQNSAHTNHCIVKMLHRLAHDLKMEALLFQLSVFCLFNRLLSDPAAGAYKELVTFAKYILGKFFALAAVNQKAFVELLFWKNTAVVREMTEGYGSLDDRSSSRRAPTWSPEEEAHLRELYLANKDVEGQDVVEAILAHLNTVPRTRKQIIHHLVQMGLADSVKDFQRKGTHIVLWTGDQELELQRLFEEFRDSDDVLGHIMKNITAKRSRARIVDKLLALGLVAERRELYKKRQKKLASSILPNGAESLKDFCQEDLEEEENLPEEDSEEEEEGGSEAEQVQGSLVLSNENLGQSLHQEGFSIPLLWLQNCLIRAADDREEDGCSQAVPLVPLTEENEEAMENEQFQQLLRKLGVRPPASGQETFWRIPAKLSPTQLRRAAASLSQPEEEQKLQPELQPKVPGEQGSDEEHCKEHRAQALRALLLAHKKKAGLASPEEEDAVGKEPLKAAPKKRQLLDSDEEQEEDEGRNRAPELGAPGIQKKKRYQIEDDEDD

SEQ ID NO: 512 - protein, 340 aa, Homo sapiens [sequence omitted]

SEQ ID NO: 513 - protein, 858 aa, Homo sapiens
MAELSEEALLSVLPTIRVPKAGDRVHKDECAFSFDTPESEGGLYICMNTFLGFGKQYVERHFNKTGQRVYLHLRRTRRPKEEDPATGTGDPPRKKPTRLAIGVEGGFDLSEEKFELDEDVKIVILPDYLEIARDGLGGLPDIVRDRVTSAVEALLSADSASRKQEVQAWDGEVRQVSKHAFSLKQLDNPARIPPCGWKCSKCDMRENLWLNLTDGSILCGRRYFDGSGGNNHAVEHYRETGYPLAVKLGTITPDGADVYSYDEDDMVLDPSLAEHLSHFGIDMLKMQKTDKTMTELEIDMNQRIGEWELIQESGVPLKPLFGPGYTGIRNLGNSCYLNSVVQVLFSIPDFQRKYVDKLEKIFQNAPTDPTQDFSTQVAKLGHGLLSGEYSKPVPESGDGERVPEQKEVQDGIAPRMFKALIGKGHPEFSTNRQQDAQEFFLHLINMVERNCRSSENPNEVFRFLVEEKIKCLATEKVKYTQRVDYIMQLPVPMDAALNKEELLEYEEKKRQAEEEKMALPELVRAQVPFSSCLEAYGAPEQVDDFWSTALQAKSVAVKTTRFASFPDYLVIQIKKFTFGLDWVPKKLDVSIEMPEELDISQLRGTGLQPGEEELPDIAPPLVTPDEPKGSLGFYGNEDEDSFCSPHFSSPTSPMLDESVIIQLVEMGFPMDACRKAVYYTGNSGAEAAMNWVMSHMDDPDFANPLILPGSSGPGSTSAAADPPPEDCVTTIVSMGFSRDQALKALRATNNSLERAVDWIFSHIDDLDAEAAMDISEGRSAADSISESVPVGPKVRDGPGKYQLFAFISHMGTSTMCGHYVCHIKKEGRWVIYNDQKVCASEKPPKDLGYIYFYQRVAS

SEQ ID NO: 514 - protein, 236 aa, Homo sapiens
MTSEKGPSTGDPTLRRRIEPWEFDVFYDPRELRKEACLLYEIKWGMSRKIWRSSGKNTTNHVEVNFIKKFTSERDFHPSMSCSITWFLSWSPCWECSQAIREFLSRHPGVTLVIYVARLFWHMDQQNRQGLRDLVNSGVTIQIMRASEYYHCWRNFVNYPPGDEAHWPQYPPLWMMLYALELHCIILSLPPCLKISRRWQNHLTFFRLHLQNCHYQTIPPHILLATGLIHPSVAWR

SEQ ID NO: 515 - protein, 305 aa, Homo sapiens
MSVDPACPQSLPCFEASDCKESSPMPVICGPEENYPSLQMSSAEMPHTETVSPLPSSMDLLIQDSPDSSTSPKGKQPTSAEKSVAKKEDKVPVKKQKTRTVFSSTQLCVLNDRFQRQKYLSLQQMQELSNILNLSYKQVKTWFQNQRMKSKRWQKNNWPKNSNGVTQKASAPTYPSLYSSYHQGCLVNPTGNLPMWSNQTWNNSTWSNQTQNIQSWSNHSWNTQTWCTQSWNNQAWNSPFYNCGEESLQSCMQFQPNSPASDLEAALEAAGEGLNVIQQTTRYFSTPQTMDLFLNYSMNMQPEDV

SEQ ID NO: 516 - protein, 434 aa, Homo sapiens
MDSVEKGAATSVSNPRGRPSRGRPPKLQRNSRGGQGRGVEKPPHLAALILARGGSKGIPLKNIKHLAGVPLIGWVLRAALDSGAFQSVWVSTDHDEIENVAKQFGAQVHRRSSEVSKDSSTSLDAIIEFLNYHNEVDIVGNIQATSPCLHPTDLQKVAEMIREEGYDSVFSVVRRHQFRWSEIQKGVREVTEPLNLNPAKRPRRQDWDGELYENGSFYFAKRHLIEMGYLQGGKMAYYEMRAEHSVDIDVDIDWPIAEQRVLRYGYFGKEKLKEIKLLVCNIDGCLTNGHIYVSGDQKEIISYDVKDAIGISLLKKSGIEVRLISERACSKQTLSSLKLDCKMEVSVSDKLAVVDEWRKEMGLCWKEVAYLGNEVSDEECLKRVGLSGAPADACSTAQKAVGYICKCNGGRGAIREFAEHICLLMEKVNNSCQK

SEQ ID NO: 517 - protein, 792 aa, Homo sapiens
MAAPSLLNWRRVSSFTGPVPRARHGHRAVAIRELMIIFGGGNEGIADELHVYNTATNQWFLPAVRGDIPPGCAAHGFVCDGTRILVFGGMVEYGRYSNELYELQASRWLWKKVKPHPPPSGLPPCPRLGHSFSLYGNKCYLFGGLANESEDSNNNVPRYLNDFYELELQHGSGVVGWSIPVTKGVVPSPRESHTAVIYCKKDSGSPKMYVFGGMCGARLDDLWQLDLETMSWSKPETKGTVPLPRSLHTASVIGNKMYIFGGWVPHKGENTETSPHDCEWRCTSSFSYLNLDTTEWTTLVSDSQEDKKNSRPRPRAGHCAVAIGTRLYFWSGRDGYKKALNSQVCCKDLWYLDTEKPPAPSQVQLIKATTNSFHVKWDEVSTVEGYLLQLSTDLPYQAASSDSSAAPNMQGVRMDPHRQGSNNIVPNSINDTINSTKTEQPATKETSMKNKPDFKALTDSNAILYPSLASNASNHNSHVVDMLRKNEGPHTSANVGVLSSCLDVRTVIPETSVSSTVSSTQTMVTQQTIKTESSSTNGAVVKDETSLTTFSTKSEVDETYALPATKISRVETHATATPFSKETPSNPVATVKAGERQWCDVGIFKNNTALVSQFYLLPKGKQSISKVGNADVPDYSLLKKQDLVPGTGYRFRVAAINGCGIGPFSKISEFKTCIPGFPGAPSAVRISKNVEGIHLSWEPPTSPSGNILEYSAYLAIRTAQIQDNPSQLVFMRIYCGLKTSCIVTAGQLANAHIDYTSRPAIVFRISAKNEKGYGPATQVRWLQGNNKKAPLN

SEQ ID NO: 518 - protein, 641 aa, Homo sapiens
MNWAAFGGSEFFIPEGIQIDSRCPLSRNITEWYHYYGIAVKESSQYYDVMYSKKGAAWVSETGKKEVSKQTVAYSPRSKLGTLLPEFPNVKDLNLPASLPEEKVSTFIMMYRTHCQRILDTVIRANFDEVQSFLLHFWQGMPPHMLPVLGSSTVVNIVGVCDSILYKAISGVLMPTVLQALPDSLTQVIRKFAKQLDEWLKVALHDLPENLRNIKFELSRRFSQILRRQTSLNHLCQASRTVIHSADITFQMLEDWRNVDLNSITKQTLYTMEDSRDEHRKLITQLYQEFDHLLEEQSPIESYIEWLDTMVDRCVVKVAAKRQGSLKKVAQQFLLMWSCFGTRVIRDMTLHSAPSFGSFHLIHLMFDDYVLYLLESLHCQERANELMRAMKGEGSTAEVREEIILTEAAAPTPSPVPSFSPAKSATSVEVPPPSSPVSNPSPEYTGLSTTGAMQSYTWSLTYTVTTAAGSPAENSQQLPCMRNTHVPSSSVTHRIPVYPHREEHGYTGSYNYGSYGNQHPHPMQSQYPALPHDTAISGPLHYAPYHRSSAQYPFNSPTSRMEPCLMSSTPRLHPTPVTPRWPEVPSANTCYTSPSVHSARYGNSSDMYTPLTTRRNSEYEHMQHFPGFAYINGEASTGWAK

SEQ ID NO: 519 - protein, 318 aa, Homo sapiens
MEQYTANSNSSTEQIVVQAGQIQQQVQGQPLMVQVSGGQLITSTGQPIMVQAVPGGQGQTIMQVPVSGTQGLQQIQLVPPGQIQIQGGQAVQVQGQQGQTQQIIIQQPQTAVTAGQTQTQQQIAVQGQQVAQTAEGQTIVYQPVNADGTILQQVTVPVSGMITIPAASLAGAQIVQTGANTNTTSSGQGTVTVTLPVAGNVVNSGGMVMMVPGAGSVPAIQRIPLPGAEMLEEEPLYVNAKQYHRILKRRQARAKLEAEGKIPKERRKYLHESRHRHAMARKRGEGGRFFSPKEKDSPHMQDPNQADEEAMTQIIRVS

SEQ ID NO: 520 - protein, 869 aa, Homo sapiens
MGRSNSRSHSSRSKSRSQSSSRSRSRSHSRKKRYRSRSRTYSRSRSRDRMYSRDYRRDYRNNRGMRRPYGYRGRGRGYYQGGGGRYHRGGYRPVWNRRHSRSPRRGRSRSRSPKRRSVSSQRSRSRSRRSYRSSRSPRSSSSRSSSPYSKSPVSKRRGSQEKQTKKAEGEPQEESPLKSKSQEEPKDTFEHDPSESIDEFNKSSATSGDIWPGLSAYDNSPRSPHSPSPIATPPSQSSSCSDAPMLSTVHSAKNTPSQHSHSIQHSPERSGSGSVGNGSSRYSPSQNSPIHHIPSRRSPAKTIAPQNAPRDESRGRSSFYPDGGDQETAKTGKFLKRFTDEESRVFLLDRGNTRDKEASKEKGSEKGRAEGEWEDQEALDYFSDKESGKQKFNDSEGDDTEETEDYRQFRKSVLADQGKSFATASHRNTEEEGLKYKSKVSLKGNRESDGFREEKNYKLKETGYVVERPSTTKDKHKEEDKNSERITVKKETQSPEQVKSEKLKDLFDYSPPLHKNLDAREKSTFREESPLRIKMIASDSHRPEVKLKMAPVPLDDSNRPASLTKDRLLASTLVHSVKKEQEFRSIFDHIKLPQASKSTSESFIQHIVSLVHHVKEQYFKSAAMTLNERFTSYQKATEEHSTRQKSPEIHRRIDISPSTLRKHTRLAGEERVFKEENQKGDKKLRCDSADLRHDIDRRRKERSKERGDSKGSRESSGSRKQEKTPKDYKEYKSYKDDSKHKREQDHSRSSSSSASPSSPSSREEKESKKEREEEFKTHHEMKEYSGFAGVSRPRGTFHDDRDDGVDYWAKRGRGRGTFQRGRGRFNFKKSGSSPKWTHDKYQGDGIVEDEEETMENNEEKKDRRKEEKE

SEQ ID NO: 521 - protein, 482 aa, Homo sapiens
MGCVQCKDKEATKLTEERDGSLNQSSGYRYGTDPTPQHYPSFGVTSIPNYNNFHAAGGQGLTVFGGVNSSSHTGTLRTRGGTGVTLFVALYDYEARTEDDLSFHKGEKFQILNSSEGDWWEARSLTTGETGYIPSNYVAPVDSIQAEEWYFGKLGRKDAERQLLSFGNPRGTFLIRESETTKGAYSLSIRDWDDMKGDHVKHYKIRKLDNGGYYITTRAQFETLQQLVQHYSGTWNGNTKVAIKTLKPGTMSPESFLEEAQIMKKLKHDKLVQLYAVVSEEPIYIVTEYMNKGSLLDFLKDGEGRALKLPNLVDMAAQVAAGMAYIERMNYIHRDLRSANILVGNGLICKIADFGLARLIEDNEYTARQGAKFPIKWTAPEAALYGRFTIKSDVWSFGILLTELVTKGRVPYPGMNNREVLEQVERGYRMPCPQDCPISLHELMIHCWKKDPEERPTFEYLQSFLEDYFTATEPQYQPGENL

SEQ ID NO: 522 - protein, 716 aa, Homo sapiens
MEDSTSPKQEKENQEELGETRRPWEGKTAASPQYSEPESSEPLEAKQGPETGRQSRSSRPWSPQSRAKTPLGGPAGPETSSPAPVSPREPSSSPSPLAPARQDLAAPPQSDRTTSVIPEAGTPYPDPLEQSSDKRESTPHHTSQSEGNTFQQSQQPKPHLCGRRDVSYNNAKQKELRFDVFQEEDSNSDYDLQQPAPGGSEVAPSMLEITIQNAKAYLLKTSSNSGFNLYDHLSNMLTKILNERPENAVDIFENISQDVKMAHFSKKFDALQNENELLPTYEIAEKQKALFLQGHLEGVDQELEDEIAENALPNVMESAFYFEQAGVGLGTDETYRIFLALKQLTDTHPIQRCRFWGKILGLEMNYIVAEVEFREGEDEEEVEEEDVAEERDNGESEAHEDEEDELPKSFYKAPQAIPKEESRTGANKYVYFVCNEPGRPWVKLPPVIPAQIVIARKIKKFFTGRLDAPIISYPPFPGNESNYLRAQIARISAGTHVSPLGFYQFGEEEGEEEEEAEGGRNSFEENPDFEGIQVIDLVESLSNWVHHVQHILSQGRCNWFNSIQKNEEEEEEEDEEKDDSDYIEQEVGLPLLTPISEDLEIQNIPPWTTRLSSNLIPQYAIAVLQSNLWPGAYAFSNGKKFENFYIGWGHKYSPDNYTPPVPPPVYQEYPSGPEITEMDDPSVEEEQAFRAAQEAVLLAAENEESEEDEDEEDDYD

SEQ ID NO: 523 - protein, 827 aa, Homo sapiens
MVVQKPHGTMEYTAGNQDTLNSIALKFNITPNKLVELNKLFTHTIVPGQVLFVPDANSPSSTLRLSSSSPGATVSPSSSDAEYDKLPDADLARKALKPIERVLSSTSEEDEPGVVKFLKMNCRYFTDGKGVVGGVMIVTPNNIMFDPHKSDPLVIENGCEEYGLICPMEEVVSIALYNDISHMKIKDALPSPGEWEDLASEKDINPFSKFKSINKEKRQQNGEKIMTSDSRPIVPLEKSTGHTPTKPSGSSVSEKLKKLDSSRETSHGSPTVTKLSKEPSDTSSAFESTAKENFLGEDDDFVDLEELSSQTGGGMHKKDTLKECLSLDPEERKKAESQINNSAVEMQVQSALAFLGTENDVELKGALDLETCEKQDIMPEVDKQSGSPESRVENTLNIHEDLDKVKLIEYYLTKNKEGPQVSENLQKTELSDGKSIEPGGIDITLSSSLSQAGDPITEGNKEPDKTWVKKGEPLPVKLNSSTEANVIKEALDSSLESTLDNSCQGAQMDNKSEVQLWLLKRIQVPIEDILPSKEEKSKTPPMFLCIKVGKPMRKSFATHTAAMVQQYGKRRKQPEYWFAVPRERVDHLYTFFVQWSPDVYGKDAKEQGFVVVEKEELNMIDNFFSEPTTKSWEIITVEEAKRRKSTCSYYEDEDEEVLPVLRPHSALLENMHIEQLARRLPARVQGYPWRLAYSTLEHGTSLKTLYRKSASLDSPVLLVIKDMDNQIFGAYATHPFKFSDHYYGTGETFLYTFSPHFKVFKWSGENSYFINGDISSLELGGGGGRFGLWLDADLYHGRSNSCSTFNNDILSKKEDFIVQDLEVWAFD

SEQ ID NO: 524 - protein, 244 aa, Homo sapiens
MAAAASPAFLLCLPLLHLLSGWSRAGWVDTHCLCYDFIITPKSRPEPQWCEVQGLVDERPFLHYDCVNHKAKAFASLGKKVNVTKTWEEQTETLRDVVDFLKGQLLDIQVENLIPIEPLTLQARMSCEHEAHGHGRGSWQFLFNGQKFLLFDSNNRKWTALHPGAKKMTEKWEKNRDVTMFFQKISLGDCKMWLEEFLMYWEQMLDPTKPPSLAPGTTQPKAMATTLSPWSLLIIFLCFILAGR

SEQ ID NO: 525 - protein, 710 aa, Homo sapiens
MGGKQRDEDDEAYGKPVKYDPSFRGPIKNRSCTDVICCVLFLLFILGYIVVGIVAWLYGDPRQVLYPRNSTGAYCGMGENKDKPYLLYFNIFSCILSSNIISVAENGLQCPTPQVCVSSCPEDPWTVGKNEFSQTVGEVFYTKNRNFCLPGVPWNMTVITSLQQELCPSFLLPSAPALGRCFPWTNVTPPALPGITNDTTIQQGISGLIDSLNARDISVKIFEDFAQSWYWILVALGVALVLSLLFILLLRLVAGPLVLVLILGVLGVLAYGIYYCWEEYRVLRDKGASISQLGFTTNLSAYQSVQETWLAALIVLAVLEAILLLMLIFLRQRIRIAIALLKEASKAVGQMMSTMFYPLVTFVLLLICIAYWAMTALYLATSGQPQYVLWASNISSPGCEKVPINTSCNPTAHLVNSSCPGLMCVFQGYSSKGLIQRSVFNLQIYGVLGLFWTLNWVLALGQCVLAGAFASFYWAFHKPQDIPTFPLISAFIRTLRYHTGSLAFGALILTLVQIARVILEYIDHKLRGVQNPVARCIMCCFKCCLWCLEKFIKFLNRNAYIMIAIYGKNFCVSAKNAFMLLMRNIVRVVVLDKVTDLLLFFGKLLVVGGVGVLSFFFFSGRIPGLGKDFKSPHLNYYWLPIMTSILGAYVIASGFFSVFGMCVDTLFLCFLEDLERNNGSLDRPYYMSKSLLKILGKKNEAPPDNKKRKK

SEQ ID NO: 526 - protein, 447 aa, Homo sapiens
MSRRPCSCALRPPRCSCSASPSAVTAAGRPRPSDSCKEESSTLSVKMKCDFNCNHVHSGLKLVKPDDIGRLVSYTPAYLEGSCKDCIKDYERLSCIGSPIVSPRIVQLETESKRLHNKENQHVQQTLNSTNEIEALETSRLYEDSGYSSFSLQSGLSEHEEGSLLEENFGDSLQSCLLQIQSPDQYPNKNLLPVLHFEKVVCSTLKKNAKRNPKVDREMLKEIIARGNFRLQNIIGRKMGLECVDILSELFRRGLRHVLATILAQLSDMDLINVSKVSTTWKKILEDDKGAFQLYSKAIQRVTENNNKFSPHASTREYVMFRTPLASVQKSAAQTSLKKDAQTKLSNQGDQKGSTYSRHNEFSEVAKTLKKNESLKACIRCNSPAKYDCYLQRATCKREGCGFDYCTKCLCNYHTTKDCSDGKLLKASCKIGPLPGTKKSKKNLRRL

SEQ ID NO: 527 - protein, 446 aa, Homo sapiens
MDSSAAPTNASNCTDALAYSSCSPAPSPGSWVNLSHLDGNLSDPCGPNRTDLGGRDSLCPPTGSPSMITAITIMALYSIVCVVGLFGNFLVMYVIVRYTKMKTATNIYIFNLALADALATSTLPFQSVNYLMGTWPFGTILCKIVISIDYYNMFTSIFTLCTMSVDRYIAVCHPVKALDFRTPRNAKIINVCNWILSSAIGLPVMFMATTKYRQGSIDCTLTFSHPTWYWENLLKICVFIFAFIMPVLIITVCYGLMILRLKSVRMLSGSKEKDRNLRRITRMVLVVVAVFIVCWTPIHIYVIIKALVTIPETTFQTVSWHFCIALGYTNSCLNPVLYAFLDENFKRCFREFCIPTSSNIEQQNSTRIRQNTRDHPSTANTVDRTNHQCLPIPSLSCWALEQGCLVVYPGPLQGPLVRYDLPAILHSSCLRGNTAPSPSGGAFLLS

SEQ ID NO: 528 - protein, 542 aa, Homo sapiens
MPLRDETLREVWASDSGHEEESLSPEAPRRPKQRPAPAQRLRKKRTEAPESPCPTGSKPRKPGAGRTGRPREEPSPDPAQARAPQTVYARFLRDPEAKKRDPRETFLVARAPDAEDEEEEEEEDEEDEEEEAEEKKEKILLPPKKPLREKSSADLKERRAKAQGPRGDLGSPDPPPKPLRVRNKEAPAGEGTKMRKTKKKGSGEADKDPSGSPASARKSPAAMFLVGEGSPDKKALKKKGTPKGARKEEEEEEEAATVIKKSNQKGKAKGKGKKKAKEERAPSPPVEVDEPREFVLRPAPQGRTVRCRLTRDKKGMDRGMYPSYFLHLDTEKKVFLLAGRKRKRSKTANYLISIDPTNLSRGGENFIGKLRSNLLGNRFTVFDNGQNPQRGYSTNVASLRQELAAVIYETNVLGFRGPRRMTVIIPGMSAENERVPIRPRNASDGLLVRWQNKTLESLIELHNKPPVWNDDSGSYTLNFQGRVTQASVKNFQIVHADDPDYIVLQFGRVAEDAFTLDYRYPLCALQAFAIALSSFDGKLACE

SEQ ID NO: 529 - protein, 360 aa, Homo sapiens
MSQERPTFYRQELNKTIWEVPERYQNLSPVGSGAYGSVCAAFDTKTGLRVAVKKLSRPFQSIIHAKRTYRELRLLKHMKHENVIGLLDVFTPARSLEEFNDVYLVTHLMGADLNNIVKCQKLTDDHVQFLIYQILRGLKYIHSADIIHRDLKPSNLAVNEDCELKILDFGLARHTDDEMTGYVATRWYRAPEIMLNWMHYNQTVDIWSVGCIMAELLTGRTLFPGTDHIDQLKLILRLVGTPGAELLKKISSESARNYIQSLTQMPKMNFANVFIGANPLAVDLLEKMLVLDSDKRITAAQALAHAYFAQYHDPDDEPVADPYDQSFESRDLLIDEWKSLTYDEVISFVPPPLDQEEMES

SEQ ID NO: 530 - protein, 360 aa, Homo sapiens
MSQERPTFYRQELNKTIWEVPERYQNLSPVGSGAYGSVCAAFDTKTGLRVAVKKLSRPFQSIIHAKRTYRELRLLKHMKHENVIGLLDVFTPARSLEEFNDVYLVTHLMGADLNNIVKCQKLTDDHVQFLIYQILRGLKYIHSADIIHRDLKPSNLAVNEDCELKILDFGLARHTDDEMTGYVATRWYRAPEIMLNWMHYNQTVDIWSVGCIMAELLTGRTLFPGTDHINQLQQIMRLTGTPPAYLINRMPSHEARNYIQSLTQMPKMNFANVFIGANPLAVDLLEKMLVLDSDKRITAAQALAHAYFAQYHDPDDEPVADPYDQSFESRDLLIDEWKSLTYDEVISFVPPPLDQEEMES

SEQ ID NO: 531 - protein, 410 aa, Homo sapiens [sequence omitted]

SEQ ID NO: 532 - protein, 465 aa, Homo sapiens
MAMTGSTPCSSMSNHTKERVTMTKVTLENFYSNLIAQHEEREMRQKKLEKVMEEEGLKDEEKRLRRSAHARKETEFLRLKRTRLGLEDFESLKVIGRGAFGEVRLVQKKDTGHVYAMKILRKADMLEKEQVGHIRAERDILVEADSLWVVKMFYSFQDKLNLYLIMEFLPGGDMMTLLMKKDTLTEEETQFYIAETVLAIDSIHQLGFIHRDIKPDNLLLDSKGHVKLSDFGLCTGLKKAHRTEFYRNLNHSLPSDFTFQNMNSKRKAETWKRNRRQLAFSTVGTPDYIAPEVFMQTGYNKLCDWWSLGVIMYEMLIGYPPFCSETPQETYKKVMNWKETLTFPPEVPISEKAKDLILRFCCEWEHRIGAPGVEEIKSNSFFEGVDWEHIRERPAAISIEIKSIDDTSNFDEFPESDILKPTVATSNHPETDYKNKDWVFINYTYKRFEGLTARGAIPSYMKAAK

SEQ ID NO: 533 - protein, 621 aa, Homo sapiens
MSPVFPMLTVLTMFYYICLRRRARTATRGEMMNTHRAIESNSQTSPLNAEVVQYAKEVVDFSSHYGSENSMSYTMWNLAGVPNVFPSSGDFTQTAVFRTYGTWWDQCPSASLPFKRTPPNFQSQDYVELTFEQQVYPTAVHVLETYHPGAVIRILACSANPYSPNPPAEVRWEILWSERPTKVNASQARQFKPCIKQINFPTNLIRLEVNSSLLEYYTELDAVVLHGVKDKPVLSLKTSLIDMNDIEDDAYAEKDGCGMDSLNKKFSSAVLGEGPNNGYFDKLPYELIQLILNHLTLPDLCRLAQTCKLLSQHCCDPLQYIHLNLQPYWAKLDDTSLEFLQSRCTLVQWLNLSWTGNRGFISVAGFSRFLKVCGSELVRLELSCSHFLNETCLEVISEMCPNLQALNLSSCDKLPPQAFNHIAKLCSLKRLVLYRTKVEQTALLSILNFCSELQHLSLGSCVMIEDYDVIASMIGAKCKKLRTLDLWRCKNITENGIAELASGCPLLEELDLGWCPTLQSSTGCFTRLAHQLPNLQKLFLTANRSVCDTDIDELACNCTRLQQLDILGTRMVSPASLRKLLESCKDLSLLDVSFCSQIDNRAVLELNASFPKVFIKKSFTQ

SEQ ID NO: 534 - protein, 840 aa, Homo sapiens
MSAFRLWPGLLIMLGSLCHRGSPCGLSTHVEIGHRALEFLQLHNGRVNYRELLLEHQDAYQAGIVFPDCFYPSICKGGKFHDVSESTHWTPFLNASVHYIRENYPLPWEKDTEKLVAFLFGITSHMAADVSWHSLGLEQGFLRTMGAIDFHGSYSEAHSAGDFGGDVLSQFEFNFNYLARRWYVPVKDLLGIYEKLYGRKVITENVIVDCSHIQFLEMYGEMLAVSKLYPTYSTKSPFLVEQFQEYFLGGLDDMAFWSTNIYHLTSFMLENGTSDCNLPENPLFIACGGQQNHTQGSKMQKNDFHRNLTTSLTESVDRNINYTERGVFFSVNSWTPDSMSFIYKALERNIRTMFIGGSQLSQKHVSSPLASYFLSFPYARLGWAMTSADLNQDGHGDLVVGAPGYSRPGHIHIGRVYLIYGNDLGLPPVDLDLDKEAHRILEGFQPSGRFGSALAVLDFNVDGVPDLAVGAPSVGSEQLTYKGAVYVYFGSKQGGMSSSPNITISCQDIYCNLGWTLLAADVNGDSEPDLVIGSPFAPGGGKQKGIVAAFYSGPSLSDKEKLNVEAANWTVRGEEDFSWFGYSLHGVTVDNRTLLLVGSPTWKNASRLGHLLHIRDEKKSLGRVYGYFPPNGQSWFTISGDKAMGKLGTSLSSGHVLMNGTLKQVLLVGAPTYDDVSKVAFLTVTLHQGGATRMYALTSDAQPLLLSTFSGDRRFSRFGGVLHLSDLDDDGLDEIIMAAPLRIADVTSGLIGGEDGRVYVYNGKETTLGDMTGKCKSWITPCPEEKAQYVLISPEASSRFGSSLITVRSKAKNQVVIAAGRSSLGARLSGALHVYSLGSD

SEQ ID NO: 535 - protein, 323 aa, Homo sapiens
MKSALFTRFFILLPWILIVIIMLDVDTRRPVPPLTPRPYFSPYAVGRGGARLPLRRGGPAHGTQKRNQSRPQPQPEPQLPTIYAITPTYSRPVQKAELTRLANTFRQVAQLHWILVEDAAARSELVSRFLARAGLPSTHLHVPTPRRYKRPGLPRATEQRNAGLAWLRQRHQHQRAQPGVLFFADDDNTYSLELFQEMRTTRKVSVWPVGLVGGRRYERPLVENGKVVGWYTGWRADRPFAIDMAGFAVSLQVILSNPKAVFKRRGSQPGMQESDFLKQITTVEELEPKANNCTKVLVWHTRTEKVNLANEPKYHLDTVKIEV

SEQ ID NO: 536 - protein, 907 aa, Homo sapiens
MPTAAAPIISSVQKLVLYETRARYFLVGSNNAETKYRVLKIDRTEPKDLVIIDDRHVYTQQEVRELLGRLDLGNRTKMGQKGSSGLFRAVSAFGVVGFVRFLEGYYIVLITKRRKMADIGGHAIYKVEDTNMIYIPNDSVRVTHPDEARYLRIFQNVDLSSNFYFSYSYDLSHSLQYNLTVLRMPLEMLKSEMTQNRQESFDIFEDEGLITQGGSGVFGICSEPYMKYVWNGELLDIIKSTVHRDWLLYIIHGFCGQSKLLIYGRPVYVTLIARRSSKFAGTRFLKRGANCEGDVANEVETEQILCDASVMSFTAGSYSSYVQVRGSVPLYWSQDISTMMPKPPITLDQADPFAHVAALHFDQMFQRFGSPIIILNLVKEREKRKHERILSEELVAAVTYLNQFLPPEHTIVYIPWDMAKYTKSKLCNVLDRLNVIAESVVKKTGFFVNRPDSYCSILRPDEKWNELGGCVIPTGRLQTGILRTNCVDCLDRTNTAQFMVGKCALAYQLYSLGLIDKPNLQFDTDAVRLFEELYEDHGDTLSLQYGGSQLVHRVKTYRKIAPWTQHSKDIMQTLSRYYSNAFSDADRQDSINLFLGVFHPTEGKPHLWELPTDFYLHHKNTMRLLPTRRSYTYWWTPEVIKHLPLPYDEVICAVNLKKLIVKKFHKYEEEIDIHNEFFRPYELSSFDDTFCLAMTSSARDFMPKTVGIDPSPFTVRKPDETGKSVLGNKSNREEAVLQRKTAASAPPPPSEEAVSSSSEDDSGTDREEEGSVSQRSTPVKMTDAGDSAKVTENVVQPMKELYGINLSDGLSEEDFSIYSRFVQLGQSQHKQDKNSQQPCSRCSDGVIKLTPISAFSQDNIYEVQPPRVDRKSTEIFQAHIQASQGIMQPLGKEDSSMYREYIRNRYL

SEQ ID NO: 537 - protein, 1221 aa, Homo sapiens
MMFRSDRMWSCHWKWKPSPLLFLFALYIMCVPHSVWGCANCRVVLSNPSGTFTSPCYPNDYPNSQACMWTLRAPTGYIIQITFNDFDIEEAPNCIYDSLSLDNGESQTKFCGATAKGLSFNSSANEMHVSFSSDFSIQKKGFNASYIRVAVSLRNQKVILPQTSDAYQVSVAKSISIPELSAFTLCFEATKVGHEDSDWTAFSYSNASFTQLLSFGKAKSGYFLSISDSKCLLNNALPVKEKEDIFAESFEQLCLVWNNSLGSIGVNFKRNYETVPCDSTISKVIPGNGKLLLGSNQNEIVSLKGDIYNFRLWNFTMNAKILSNLSCNVKGNVVDWQNDFWNIPNLALKAESNLSCGSYLIPLPAAELASCADLGTLCQATVNSPSTTPPTVTTNMPVTNRIDKQRNDGIIYRISVVIQNILRHPEVKVQSKVAEWLNSTFQNWNYTVYVVNISFHLSAGEDKIKVKRSLEDEPRLVLWALLVYNATNNTNLEGKIIQQKLLKNNESLDEGLRLHTVNVRQLGHCLAMEEPKGYYWPSIQPSEYVLPCPDKPGFSASRICFYNATNPLVTYWGPVDISNCLKEANEVANQILNLTADGQNLTSANITNIVEQVKRIVNKEENIDITLGSTLMNIFSNILSSSDSDLLESSSEALKTIDELAFKIDLNSTSHVNITTRNLALSVSSLLPGTNAISNFSIGLPSNNESYFQMDFESGQVDPLASVILPPNLLENLSPEDSVLVRRAQFTFFNKTGLFQDVGPQRKTLVSYVMACSIGNITIQNLKDPVQIKIKHTRTQEVHHPICAFWDLNKNKSFGGWNTSGCVAHRDSDASETVCLCNHFTHFGVLMDLPRSASQLDARNTKVLTFISYIGCGISAIFSAATLLTYVAFEKLRRDYPSKILMNLSTALLFLNLLFLLDGWITSFNVDGLCIAVAVLLHFFLLATFTWMGLEAIHMYIALVKVFNTYIRRYILKFCIIGWGLPALVVSVVLASRNNNEVYGKESYGKEKGDEFCWIQDPVIFYVTCAGYFGVMFFLNIAMFIVVMVQICGRNGKRSNRTLREEVLRNLRSVVSLTFLLGMTWGFAFFAWGPLNIPFMYLFSIFNSLQGLFIFIFHCAMKENVQKQWRQHLCCGRFRLADNSDWSKTATNIIKKSSDNLGKSLSSSSIGSNSTYLTSKSKSSSTTYFKRNSHTDNVSYEHSFNKSGSLRQCFHGQVLVKTGPC

SEQ ID NO: 538 - protein, 457 aa, Homo sapiens
MDRSLRNVLVVSFGFLLLFTAYGGLQSLQSSLYSEEGLGVTALSTLYGGMLLSSMFLPPLLIERLGCKGTIILSMCGYVAFSVGNFFASWYTLIPTSILLGLGAAPLWSAQCTYLTITGNTHAEKAGKRGKDMVNQYFGIFFLIFQSSGVWGNLISSLVFGQTPSQETLPEEQLTSCGASDCLMATTTTNSTQRPSQQLVYTLLGIYTGSGVLAVLMIAAFLQPIRDVQRESEGEKKSVPFWSTLLSTFKLYRDKRLCLLILLPLYSGLQQGFLSSEYTRSYVTCTLGIQFVGYVMICFSATDALCSVLYGKVSQYTGRAVLYVLGAVTHVSCMIALLLWRPRADHLAVFFVFSGLWGVADAVWQTQNNALYGVLFEKSKEAAFANYRLWEALGFVIAFGYSMFLCVHVKLYILLGVLSLTMVAYGLVECVESKNPIRPHAPGQVNQAEDEEIQTKM

SEQ ID NO: 539 - protein, 469 aa, Homo sapiens
MAEEREPELYLKWKHCETPGVKTLCNLKHCETPGVKTLCNLKKLLNRLQKDHREDVYLYISGHLNPNKLYQPPETILQHWPNAHRPKGERASEVGEPPAGKVARMKEALAHFTIHTALVPSEAQDTPLFRYLNPQASLSHTSEEDFLPVEAVREGKEEKKGGPPGRGPPGWRRREELRLPDLKVLCYQEAGSRGTRDRHHYVSSYLAGATSADRYRMFLRFQKEVLAKQDLLKNDFTGSKAAAGHERKLQQELQKICTCSPQQFNRLHVFGKVFEDICNSSLIFGDLLKKVKDEYELYMATLLESQPAAQYEALLAQLKALGQRPVKTADMDLAREELRMLVTATKAALEQNDRLRSELEMEVALLQSAKERSESSEKHIIDENRLTLTEKVEKKRCEILSKWDEIQALEKEIKTTLVHTGISDITENRIKSIEHEAIQLETENMILKKKIKGPLEIYQGICKIRGNRR

SEQ ID NO: 540 - protein, 437 aa, Homo sapiens
MPKFKAARGVGGQEKHAPLADQILAGNAVRAGVREKRRGRGTGEAEEEYVGPRLSRRILQQARQQQEELEAEHGTGDKPAAPRERTTRLGPRMPQDGSDDEDEEWPTLEKAATMTAAGHHAEVVVDPEDERAIEMFMNKNPPARRTLADIIMEKLTEKQTEVETVMSEVSGFPMPQLDPRVLEVYRGVREVLSKYRSGKLPKAFKIIPALSNWEQILYVTEPEAWTAAAMYQATRIFASNLKERMAQRFYNLVLLPRVRDDVAEYKRLNFHLYMALKKALFKPGAWFKGILIPLCESGTCTLREAIIVGSIITKCSIPVLHSSAAMLKIAEMEYSGANSIFLRLLLDKKYALPYRVLDALVFHFLGFRTEKRELPVLWHQCLLTLVQRYKADLATDQKEALLELLRLQPHPQLSPEIRRELQSAVPRDVEDVPITVE

SEQ ID NO: 541 - protein, 346 aa, Homo sapiens
MALLKVKFDQKKRVKLAQGLWLMNWFSVLAGIIIFSLGLFLKIELRKRSDVMNNSESHFVPNSLIGMGVLSCVFNSLAGKICYDALDPAKYARWKPWLKPYLAICVLFNIILFLVALCCFLLRGSLENTLGQGLKNGMKYYRDTDTPGRCFMKKTIDMLQIEFKCCGNNGFRDWFEIQWISNRYLDFSSKEVKDRIKSNVDGRYLVDGVPFSCCNPSSPRPCIQYQITNNSAHYSYDHQTEELNLWVRGCRAALLSYYSSLMNSMGVVTLLIWLFEVTITIGLRYLQTSLDGVSNPEESESESQGWLLERSVPETWKAFLESVKKLGKGNQVEAEGADAGQAPEAG

SEQ ID NO: 542 - protein, 816 aa, Homo sapiens
MGAARGSPARPRRLPLLSVLLLPLLGGTQTAIVFIKQPSSQDALQGRRALLRCEVEAPGPVHVYWLLDGAPVQDTERRFAQGSSLSFAAVDRLQDSGTFQCVARDDVTGEEARSANASFNIKWIEAGPVVLKHPASEAEIQPQTQVTLRCHIDGHPRPTYQWFRDGTPLSDGQSNHTVSSKERNLTLRPAGPEHSGLYSCCAHSAFGQACSSQNFTLSIADESFARVVLAPQDVVVARYEEAMFHCQFSAQPPPSLQWLFEDETPITNRSRPPHLRRATVFANGSLLLTQVRPRNAGIYRCIGQGQRGPPIILEATLHLAEIEDMPLFEPRVFTAGSEERVTCLPPKGLPEPSVWWEHAGVRLPTHGRVYQKGHELVLANIAESDAGVYTCHAANLAGQRRQDVNITVATVPSWLKKPQDSQLEEGKPGYLDCLTQATPKPTVVWYRNQMLISEDSRFEVFKNGTLRINSVEVYDGTWYRCMSSTPAGSIEAQARVQVLEKLKFTPPPQPQQCMEFDKEATVPCSATGREKPTIKWERADGSSLPEWVTDNAGTLHFARVTRDDAGNYTCIASNGPQGQIRAHVQLTVAVFITFKVEPERTTVYQGHTALLQCEAQGDPKPLIQWKGKDRILDPTKLGPRMHIFQNGSLVIHDVAPEDSGRYTCIAGNSCNIKHTEAPLYVVDKPVPEESEGPGSPPPYKMIQTIGLSVGAAVAYIIAVLGLMFYCKKRCKAKRLQKQPEGEEPEMECLNGGPLQNGQPSAEIQEEVALTSLGSGPAATNKRHSTSDKMHFPRSSLQPITTLGRPQAVPEDFQEQG

SEQ ID NO: 543 - protein, 1070 aa, Homo sapiens
MGAARGSPARPRRLPLLSVLLLPLLGGTQTAIVFIKQPSSQDALQGRRALLRCEVEAPGPVHVYWLLDGAPVQDTERRFAQGSSLSFAAVDRLQDSGTFQCVARDDVTGEEARSANASFNIKWIEAGPVVLKHPASEAEIQPQTQVTLRCHIDGHPRPTYQWFRDGTPLSDGQSNHTVSSKERNLTLRPAGPEHSGLYSCCAHSAFGQACSSQNFTLSIADESFARVVLAPQDVVVARYEEAMFHCQFSAQPPPSLQWLFEDETPITNRSRPPHLRRATVFANGSLLLTQVRPRNAGIYRCIGQGQRGPPIILEATLHLAEIEDMPLFEPRVFTAGSEERVTCLPPKGLPEPSVWWEHAGVRLPTHGRVYQKGHELVLANIAESDAGVYTCHAANLAGQRRQDVNITVATVPSWLKKPQDSQLEEGKPGYLDCLTQATPKPTVVWYRNQMLISEDSRFEVFKNGTLRINSVEVYDGTWYRCMSSTPAGSIEAQARVQVLEKLKFTPPPQPQQCMEFDKEATVPCSATGREKPTIKWERADGSSLPEWVTDNAGTLHFARVTRDDAGNYTCIASNGPQGQIRAHVQLTVAVFITFKVEPERTTVYQGHTALLQCEAQGDPKPLIQWKGKDRILDPTKLGPRMHIFQNGSLVIHDVAPEDSGRYTCIAGNSCNIKHTEAPLYVVDKPVPEESEGPGSPPPYKMIQTIGLSVGAAVAYIIAVLGLMFYCKKRCKAKRLQKQPEGEEPEMECLNGGPLQNGQPSAEIQEEVALTSLGSGPAATNKRHSTSDKMHFPRSSLQPITTLGKSEFGEVFLAKAQGLEEGVAETLVLVKSLQSKDEQQQLDFRRELEMFGKLNHANVVRLLGLCREAEPHYMVLEYVDLGDLKQFLRISKSKDEKLKSQPLSTKQKVALCTQVALGMEHLSNNRFVHKDLAARNCLVSAQRQVKVSALGLSKDVYNSEYYHFRQAWVPLRWMSPEAILEGDFSTKSDVWAFGVLMWEVFTHGEMPHGGQADDEVLADLQAGKARLPQPEGCPSKLYRLMQRCWALSPKDRPSFSEIASALGDSTVDSKP

SEQ ID NO: 544 - protein, 924 aa, Homo sapiens
MSRSRQPPLVTGISPNEGIPWTKVTIRGENLGTGPTDLIGLTICGHNCLLTAEWMSASKIVCRVGQAKNDKGDIIVTTKSGGRGTSTVSFKLLKPEKIGILDQSAVWVDEMNYYDMRTDRNKGIPPLSLRPANPLGIEIEKSKFSQKDLEMLFHGMSADFTSENFSAAWYLIENHSNTSFEQLKMAVTNLKRQANKKSEGSLAYVKGGLSTFFEAQDALSAIHQKLEADGTEKVEGSMTQKLENVLNRASNTADTLFQEVLGRKDKADSTRNALNVLQRFKFLFNLPLNIERNIQKGDYDVVINDYEKAKSLFGKTEVQVFKKYYAEVETRIEALRELLLDKLLETPSTLHDQKRYIRYLSDLHASGDPAWQCIGAQHKWILQLMHSCKEGYVKDLKGNPGLHSPMLDLDNDTRPSVLGHLSQTASLKRGSSFQSGRDDTWRYKTPHRVAFVEKLTKLVLSQLPNFWKLWISYVNGSLFSETAEKSGQIERSKNVRQRQNDFKKMIQEVMHSLVKLTRGALLPLSIRDGEAKQYGGWEVKCELSGQWLAHAIQTVRLTHESLTALEIPNDLLQTIQDLILDLRVRCVMATLQHTAEEIKRLAEKEDWIVDNEGLTSLPCQFEQCIVCSLQSLKGVLECKPGEASVFQQPKTQEEVCQLSINIMQVFIYCLEQLSTKPDADIDTTHLSVDVSSPDLFGSIHEDFSLTSEQRLLIVLSNCCYLERHTFLNIAEHFEKHNFQGIEKITQVSMASLKELDQRLFENYIELKADPIVGSLEPGIYAGYFDWKDCLPPTGVRNYLKEALVNIIAVHAEVFTISKELVPRVLSKVIEAVSEELSRLMQCVSSFSKNGALQARLEICALRDTVAVYLTPESKSSFKQALEALPQLSSGADKKLLEELLNKFKSSMHLQLTCFQAASSTMMKT

SEQ ID NO: 545 - protein, 361 aa, Homo sapiens
MAMNYNAKDEVDGGPPCAPGGTAKTRRPDNTAFKQQRLPAWQPILTAGTVLPIFFIIGLIFIPIGIGIFVTSNNIREIEIDYTGTEPSSPCNKCLSPDVTPCFCTINFTLEKSFEGNVFMYYGLSNFYQNHRRYVKSRDDSQLNGDSSALLNPSKECEPYRRNEDKPIAPCGAIANSMFNDTLELFLIGNDSYPIPIALKKKGIAWWTDKNVKFRNPPGGDNLEERFKGTTKPVNWLKPVYMLDSDPDNNGFINEDFIVWMRTAALPTFRKLYRLIERKSDLHPTLPAGRYSLNVTYNYPVHYFDGRKRMILSTISWMGGKNPFLGIAYIAVGSISFLLGVVLLVINHKYRNSSNTADITI

SEQ ID NO: 546 - protein, 856 aa, Homo sapiens
MESEDLSGRELTIDSIMNKVRDIKNKFKNEDLTDELSLNKISADTTDNSGTVNQIMMMANNPEDWLSLLLKLEKNSVPLSDALLNKLIGRYSQAIEALPPDKYGQNESFARIQVRFAELKAIQEPDDARDYFQMARANCKKFAFVHISFAQFELSQGNVKKSKQLLQKAVERGAVPLEMLEIALRNLNLQKKQLLSEEEKKNLSASTVLTAQESFSGSLGHLQNRNNSCDSRGQTTKARFLYGENMPPQDAEIGYRNSLRQTNKTKQSCPFGRVPVNLLNSPDCDVKTDDSVVPCFMKRQTSRSECRDLVVPGSKPSGNDSCELRNLKSVQNSHFKEPLVSDEKSSELIITDSITLKNKTESSLLAKLEETKEYQEPEVPESNQKQWQSKRKSECINQNPAASSNHWQIPELARKVNTEKHTTFEQPVFSVSKQSPPISTSKWFDPKSICKTPSSNTLDDYMSCFRTPVVKNDFPPACQLSTPYGQPACFQQQQHQILATPLQNLQVLASSSANECISVKGRIYSILKQIGSGGSSKVFQVLNEKKQIYAIKYVNLEEADNQTLDSYRNEIAYLNKLQQHSDKIIRLYDYEITDQYIYMVMECGNIDLNSWLKKKKSIDPWERKSYWKNMLEAVHTIHQHGIVHSDLKPANFLIVDGMLKLIDFGIANQMQPDTTSVVKDSQVGTVNYMPPEAIKDMSSSRENGKSKSKISPKSDVWSLGCILYYMTYGKTPFQQIINQISKLHAIIDPNHEIEFPDIPEKDLQDVLKCCLKRDPKQRISIPELLAHPYVQIQTHPVNQMAKGTTEEMKYVLGQLVGLNSPNSILKAAKTLYEHYSGGESHNSSSSKTFEKKRGKK

SEQ ID NO: 547 - protein, 354 aa, Homo sapiens
MQGLLFSTLLLAGLAQFCCRVQGTGPLDTTPEGRPGEVSDAPQRKQFCHWPCKCPQQKPRCPPGVSLVRDGCGCCKICAKQPGEICNEADLCDPHKGLYCDYSVDRPRYETGVCAYLVAVGCEFNQVHYHNGQVFQPNPLFSCLCVSGAIGCTPLFIPKLAGSHCSGAKGGKKSDQSNCSLEPLLQQLSTSYKTMPAYRNLPLIWKKKCLVQATKWTPCSRTCGMGISNRVTNENSNCEMRKEKRLCYIQPCDSNILKTIKIPKGKTCQPTFQLSKAEKFVFSGCSSTQSYKPTFCGICLDKRCCIPNKSKMITIQFDCPNEGSFKWKMLWITSCVCQRNCREPGDIFSELKIL

SEQ ID NO: 548 - protein, 1823 aa, Homo sapiens
MALSSAWRSVLPLWLLWSAACSRAASGDDNAFPFDIEGSSAVGRQDPPETSEPRVALGRLPPAAEKCNAGFFHTLSGECVPCDCNGNSNECLDGSGYCVHCQRNTTGEHCEKCLDGYIGDSIRGAPQFCQPCPCPLPHLANFAESCYRKNGAVRCICNENYAGPNCERCAPGYYGNPLLIGSTCKKCDCSGNSDPNLIFEDCDEVTGQCRNCLRNTTGFKCERCAPGYYGDARIAKNCAVCNCGGGPCDSVTGECLEEGFEPPTGMDCPTISCDKCVWDLTDDLRLAALSIEEGKSGVLSVSSGAAAHRHVNEINATIYLLKTKLSERENQYALRKIQINNAENTMKSLLSDVEELVEKENQASRKGQLVQKESMDTINHASQLVEQAHDMRDKIQEINNKMLYYGEEHELSPKEISEKLVLAQKMLEEIRSRQPFFTQRELVDEEADEAYELLSQAESWQRLHNETRTLFPVVLEQLDDYNAKLSDLQEALDQALNYVRDAEDMNRATAARQRDHEKQQERVREQMEVVNMSLSTSADSLTTPRLTLSELDDIIKNASGIYAEIDGAKSELQVKLSNLSNLSHDLVQEAIDHAQDLQQEANELSRKLHSSDMNGLVQKALDASNVYENIVNYVSEANETAEFALNTTDRIYDAVSGIDTQIIYHKDESENLLNQARELQAKAESSSDEAVADTSRRVGGALARKSALKTRLSDAVKQLQAAERGDAQQRLGQSRLITEEANRTTMEVQQATAPMANNLTNWSQNLQHFDSSAYNTAVNSARDAVRNLTEVVPQLLDQLRTVEQKRPASNVSASIQRIRELIAQTRSVASKIQVSMMFDGQSAVEVHSRTSMDDLKAFTSLSLYMKPPVKRPELTETADQFILYLGSKNAKKEYMGLAIKNDNLVYVYNLGTKDVEIPLDSKPVSSWPAYFSIVKIERVGKHGKVFLTVPSLSSTAEEKFIKKGEFSGDDSLLDLDPEDTVFYVGGVPSNFKLPTSLNLPGFVGCLELATLNNDVISLYNFKHIYNMDPSTSVPCARDKLAFTQSRAASYFFDGSGYAVVRDITRRGKFGQVTRFDIEVRTPADNGLILLMVNGSMFFRLEMRNGYLHVFYDFGFSGGPVHLEDTLKKAQINDAKYHEISIIYHNDKKMILVVDRRHVKSMDNEKMKIPFTDIYIGGAPPEILQSRALRAHLPLDINFRGCMKGFQFQKKDFNLLEQTETLGVGYGCPEDSLISRRAYFNGQSFIASIQKISFFDGFEGGFNFRTLQPNGLLFYYASGSDVFSISLDNGTVIMDVKGIKVQSVDKQYNDGLSHFVISSVSPTRYELIVDKSRVGSKNPTKGKIEQTQASEKKFYFGGSPISAQYANFTGCISNAYFTRVDRDVEVEDFQRYTEKVHTSLYECPIESSPLFLLHKKGKNLSKPKASQNKKGGKSKDAPSWDPVALKLPERNTPRNSHCHLSNSPRAIEHAYQYGGTANSRQEFEHLKGDFGAKSQFSIRLRTRSSHGMIFYVSDQEENDFMTLFLAHGRLVYMFNVGHKKLKIRSQEKYNDGLWHDVIFIRERSSGRLVIDGLRVLEESLPPTEATWKIKGPIYLGGVAPGKAVKNVQINSIYSFSGCLSNLQLNGASITSASQTFSVTPCFEGPMETGTYFSTEGGYVVLDESFNIGLKFEIAFEVRPRSSSGTLVHGHSVNGEYLNVHMKNGQVIVKVNNGIRDFSTSVTPKQSLCDGRWHRITVIRDSNVVQLDVDSEVNHVVGPLNPKPIDHREPVFVGGVPESLLTPRLAPSKPFTGCIRHFVIDGHPVSFSKAALVSGAVSINSCPAA

SEQ ID NO: 549 - protein, 477 aa, Homo sapiens
MTSKFLLVSFILAALSLSTTFSLQPDQQKVLLVSFDGFRWDYLYKVPTPHFHYIMKYGVHVKQVTNVFITKTYPNHYTLVTGLFAENHGIVANDMFDPIRNKSFSLDHMNIYDSKFWEEATPIWITNQRAGHTSGAAMWPGTDVKIHKRFPTHYMPYNESVSFEDRVAKIIEWFTSKEPINLGLLYWEDPDDMGHHLGPDSPLMGPVISDIDKKLGYLIQMLKKAKLWNTLNLIITSDHGMTQCSEERLIELDQYLDKDHYTLIDQSPVAAILPKEGKFDEVYEALTHAHPNLTVYKKEDVPERWHYKYNSRIQPIIAVADEGWHILQNKSDDFLLGNHGYDNALADMHPIFLAHGPAFRKNFSKEAMNSTDLYPLLCHLLNITAMPHNGSFWNVQDLLNSAMPRVVPYTQSTILLPGSVKPAEYDQEGSYPYFIGVSLGSIIVIVFFVIFIKHLIHSQIPALQDMHAEIAQPLLQA

SEQ ID NO: 550 - protein, 514 aa, Homo sapiens
MAVWLAQWLGPLLLVSLWGLLAPASLLRRLGEHIQQFQESSAQGLGLSLGPGAAALPKVGWLEQLLDPFNVSDRRSFLQRYWVNDQHWVGQDGPIFLHLGGEGSLGPGSVMRGHPAALAPAWGALVISLEHRFYGLSIPAGGLEMAQLRFLSSRLALADVVSARLALSRLFNISSSSPWICFGGSYAGSLAAWARLKFPHLIFASVASSAPVRAVLDFSEYNDVVSRSLMSTAIGGSLECRAAVSVAFAEVERRLRSGGAAQAALRTELSACGPLGRAENQAELLGALQALVGGVVQYDGQTGAPLSVRQLCGLLLGGGGNRSHSTPYCGLRRAVQIVLHSLGQKCLSFSRAETVAQLRSTEPQLSGVGDRQWLYQTCTEFGFYVTCENPRCPFSQLPALPSQLDLCEQVFGLSALSVAQAVAQTNSYYGGQTPGANKVLFVNGDTDPWHVLSVTQALGSSESTLLIRTGSHCLDMAPERPSDSPSLRLGRQNIFQQLQTWLKLAKESQIKGEV

SEQ ID NO: 551 - protein, 746 aa, Homo sapiens
MAWIRSTCILFFTLLFAHIAAVPIKYLPEENVHDADFGEQKDISEINLAAGLDLFQGDILLQKSRNGLRDPNTRWTFPIPYILADNLGLNAKGAILYAFEMFRLKSCVDFKPYEGESSYIIFQQFDGCWSEVGDQHVGQNISIGQGCAYKAIIEHEILHALGFYHEQSRTDRDDYVNIWWDQILSGYQHNFDTYDDSLITDLNTPYDYESLMHYQPFSFNKNASVPTITAKIPEFNSIIGQRLDFSAIDLERLNRMYNCTTTHTLLDHCTFEKANICGMIQGTRDDTDWAHQDSAQAGEVDHTLLGQCTGAGYFMQFSTSSGSAEEAALLESRILYPKRKQQCLQFFYKMTGSPSDRLVVWVRRDDSTGNVRKLVKVQTFQGDDDHNWKIAHVVLKEEQKFRYLFQGTKGDPQNSTGGIYLDDITLTETPCPTGVWTVRNFSQVLENTSKGDKLQSPRFYNSEGYGFGVTLYPNSRESSGYLRLAFHVCSGENDAILEWPVENRQVIITILDQEPDVRNRMSSSMVFTTSKSHTSPAINDTVIWDRPSRVGTYHTDCNCFRSIDLGWSGFISHQMLKRRSFLKNDDLIIFVDFEDITHLSQTEVPTKGKRLSPQGLILQGQEQQVSEEGSGKAMLEEALPVSLSQGQPSRQKRSVENTGPLEDHNWPQYFRDPCDPNPCQNDGICVNVKGMASCRCISGHAFFYTGERCQAVQVHGSVLGMVIGGTAGVIFLTFSIIAILSQRPRK

SEQ ID NO: 552 - protein, 1042 aa, Homo sapiens
MADAFGDELFSVFEGDSTTAAGTKKDKEKDKGKWKGPPGSADKAGKRFDGKLQSESTNNGKNKRDVDFEGTDEPIFGKKPRIEESITEDLSLADLMPRVKVQSVETVEGCTHEVALPAEEDYLPLKPRVGKAAKEYPFILDAFQREAIQCVDNNQSVLVSAHTSAGKTVCAEYAIALALREKQRVIFTSPIKALSNQKYREMYEEFQDVGLMTGDVTINPTASCLVMTTEILRSMLYRGSEVMREVAWVIFDEIHYMRDSERGVVWEETIILLPDNVHYVFLSATIPNARQFAEWICHLHKQPCHVIYTDYRPTPLQHYIFPAGGDGLHLVVDENGDFREDNFNTAMQVLRDAGDLAKGDQKGRKGGTKGPSNVFKIVKMIMERNFQPVIIFSFSKKDCEAYALQMTKLDFNTDEEKKMVEEVFSNAIDCLSDEDKKLPQVEHVLPLLKRGIGIHHGGLLPILKETIEILFSEGLIKALFATETFAMGINMPARTVLFTNARKFDGKDFRWISSGEYIQMSGRAGRRGMDDRGIVILMVDEKMSPTIGKQLLKGSADPLNSAFHLTYNMVLNLLRVEEINPEYMLEKSFYQFQHYRAIPGVVEKVKNSEEQYNKIVIPNEESVVIYYKIRQQLAKLGKEIEEYIHKPKYCLPFLQPGRLVKVKNEGDDFGWGVVVNFSKKSNVKPNSGELDPLYVVEVLLRCSKESLKNSATEAAKPAKPDEKGEMQVVPVLVHLLSAISSVRLYIPKDLRPVDNRQSVLKSIQEVQKRFPDGIPLLDPIDDMGIQDQGLKKVIQKVEAFEHRMYSHPLHNDPNLETVYTLCEKKAQIAIDIKSAKRELKKARTVLQMDELKCRKRVLRRLGFATSSDVIEMKGRVACEISSADELLLTEMMFNGLFNDLSAEQATALLSCFVFQENSSEMPKLTEQLAGPLRQMQECAKRIAKVSAEAKLEIDEETYLSSFKPHLMDVVYTWATGATFAHICKMTDVFEGSIIRCMRRLEELLRQMCQAAKAIGNTELENKFAEGITKIKRDIVFAASLYL

SEQ ID NO: 553 - protein, 462 aa, Homo sapiens
MSSVKRSLKQEIVTQFHCSAAEGDIAKLTGILSHSPSLLNETSENGWTALMYAARNGHPEIVQFLLEKGCDRSIVNKSRQTALDIAVFWGYKHIANLLATAKGGKKPWFLTNEVEECENYFSKTLLDRKSEKRNNSDWLLAKESHPATVFILFSDLNPLVTLGGNKESFQQPEVRLCQLNYTDIKDYLAQPEKITLIFLGVELEIKDKLLNYAGEVPREEEDGLVAWFALGIDPIAAEEFKQRHENCYFLHPPMPALLQLKEKEAGVVAQARSVLAWHSRYKFCPTCGNATKIEEGGYKRLCLKEDCPSLNGVHNTSYPRVDPVVIMQVIHPDGTKCLLGRQKRFPPGMFTCLAGFIEPGETIEDAVRREVEEESGVKVGHVQYVACQPWPMPSSLMIGCLALAVSTEIKVDKNEIEDARWFTREQVLDVLTKGKQQAFFVPPSRAIAHQLIKHWIRINPNL

SEQ ID NO: 554 - protein, 638 aa, Homo sapiens
MDLWQLLLTLALAGSSDAFSGSEATAAILSRAPWSLQSVNPGLKTNSSKEPKFTKCRSPERETFSCHWTDEVHHGTKNLGPIQLFYTRRNTQEWTQEWKECPDYVSAGENSCYFNSSFTSIWIPYCIKLTSNGGTVDEKCFSVDEIVQPDPPIALNWTLLNVSLTGIHADIQVRWEAPRNADIQKGWMVLEYELQYKEVNETKWKMMDPILTTSVPVYSLKVDKEYEVRVRSKQRNSGNYGEFSEVLYVTLPQMSQFTCEEDFYFPWLLIIIFGIFGLTVMLFVFLFSKQQRIKMLILPPVPVPKIKGIDPDLLKEGKLEEVNTILAIHDSYKPEFHSDDSWVEFIELDIDEPDEKTEESDTDRLLSSDHEKSHSNLGVKDGDSGRTSCCEPDILETDFNANDIHEGTSEVAQPQRLKGEADLLCLDQKNQNNSPYHDACPATQQPSVIQAEKNKPQPLPTEGAESTHQAAHIQLSNPSSLSNIDFYAQVSDITPAGSVVLSPGQKNKAGMSQCDMHPEMVSLCQENFLMDNAYFCEADAKKCIPVAPHIKVESHIQPSLNQEDIYITTESLTTAAGRPGTGEHVPGSEMPVPDYTSIHIVQSPQGLILNATALPLPDKEFLSSCGYVSTDQLNKIMP

SEQ ID NO: 555 - protein, 951 aa, Homo sapiens
MATGTGKHKLLSTGPTEPWSIREKLCLASSVMRSGDQNWVSVSRAIKPFAEPGRPPDWFSQKHCASQYSELLETTETPKRKRGEKGEVVETVEDVIVRKLTAERVEELKKVIKETQERYRRLKRDAELIQAGHMDSRLDELCNDIATKKKLEEEEAEVKRKATDAAYQARQAVKTPPRRLPTVMVRSPIDSASPGGDYPLGDLTPTTMEEATSGVTPGTLPSTPVTSFPGIPDTLPPGSAPLEAPMTPVTDDSPQKKMLGQKATPPPSPLLSELLKKGSLLPTSPRLVNESEMAVASGHLNSTGVLLEVGGVLPMIHGGEIQQTPNTVAASPAASGAPTLSRLLEAGPTQFTTPLASFTTVASEPPVKLVPPPVESVSQATIVMMPALPAPSSAPAVSTTESVAPVSQPDNCVPMEAVGDPHTVTVSMDSSEISMIINSIKEECFRSGVAEAPVGSKAPSIDGKEELDLAEKMDIAVSYTGEELDFETVGDIIAIIEDKVDDHPEVLDVAAVEAALSFCEENDDPQSLPGPWEHPIQQERDKPVPLPAPEMTVKQERLDFEETENKGIHELVDIREPSAEIKVEPAEPEPVISGAEIVAGVVPATSMEPPELRSQDLDEELGSTAAGEIVEADVAIGKGDETPLTNVKTEASPESMLSPSHGSNPIEDPLEAETQHKFEMSDSLKEESGTIFGSQIKDAPGEDEEEDGVSEAASLEEPKEEDQGEGYLSEMDNEPPVSESDDGFSIHNATLQSHTLADSIPSSPASSQFSVCSEDQEAIQAQKIWKKAIMLVWRAAANHRYANVFLQPVTDDIAPGYHSIVQRPMDLSTIKKNIENGLIRSTAEFQRDIMLMFQNAVMYNSSDHDVYHMAVEMQRDVLEQIQQFLATQLIMQTSESGISAKSLRGRDSTRKQDASEKDSVPMGSPAFLLSLFDGGTRGRRCAIEADMKMKK

SEQ ID NO: 556 - protein, 417 aa, Homo sapiens
MRFAWTVLLLGPLQLCALVHCAPPAAGQQQPPREPPAAPGAWRQQIQWENNGQVFSLLSLGSQYQPQRRRDPGAAVPGAANASAQQPRTPILLIRDNRTAAARTRTAGSSGVTAGRPRPTARHWFQAGYSTSRAREAGASRAENQTAPGEVPALSNLRPPSRVDGMVGDDPYNPYKYSDDNPYYNYYDTYERPRPGGRYRPGYGTGYFQYGLPDLVADPYYIQASTYVQKMSMYNLRCAAEENCLASTAYRADVRDYDHRVLLRFPQRVKNQGTSDFLPSRPRYSWEWHSCHQHYHSMDEFSHYDLLDANTQRRVAEGHKASFCLEDTSCDYGYHRRFACTAHTQGLSPGCYDTYGADIDCQWIDITDVKPGNYILKVSVNPSYLVPESDYTNNVVRCDIRYTGHHAYASGCTISPY

SEQ ID NO: 557 - protein, 789 aa, Homo sapiens
MRTYHYIPLFIWTYMFHTVDTILLQEKPNSYLSSKKIAGLTKDDGKMLRRTKRGWMWNQFFLLEEYTGTDTQYVGKLHTDQDKGDGNLKYILTGDGAGSLFVIDENTGDIHAAKKLDREEKSLYILRAKAIDRKTGRQVEPESEFIIKIHDINDNEPKFTKDLYTASVPEMSGVGTSVIQVTATDADDANYGNSAKVVYSILQGQPYFSVDPESGIIKTALPDMSRENREQYQVVIQAKDMGGQMGGLSGTTTVNITLTDVNNNPPRFPQSTYQFNSPESVPLGTHLGRIKANDPDVGENAEMEYSIAEGDGADMFDVITDKDTQEGIITVKQNLDFENQMLYTLRVDASNTHPDPRFLHLGPFKDTAVVKISVEDIDEPPVFTKVSYLIEVDEDVKEGSIIGQVTAYDPDARNNLIKYSVDRHTDMDRIFGIHSENGSIFTLKALDRESSPWHNITVTATEINNPKQSSHIPVFIRILDINDHAPEFAMYYETFVCENAKPGQLIQTVSVMDKDDPPRGHKFFFEPVPEFTLNPNFTIVDNKDNTAGIMTRKDGYSRNKMSTYLLPILIFDNDYPIQSSTGTLTIRVCACDNQGNMQSCTAEALILSAGLSTGALVAILLCVLILLILVVLFAALKRQRKKEPLIISKDDVRDNIVTYNDEGGGEEDTQAFDIGTLRNPEAREDSKLRRDVMPETIFQIRRTVPLWENIDVQDFIHRRLKENDADPSAPPYDSLATYAYEGNDSIADSLSSLESLTADCNQDYDYLSDWGPRFKKLADMYGGDDSDRD

SEQ ID NO: 558 - protein, 303 aa, Homo sapiens
MRAWIFFLLCLAGRALAAPQQEALPDETEVVEETVAEVTEVSVGANPVQVEVGEFDDGAEETEEEVVAENPCQNHHCKHGKVCELDENNTPMCVCQDPTSCPAPIGEFEKVCSNDNKTFDSSCHFFATKCTLEGTKKGHKLHLDYIGPCKYIPPCLDSELTEFPLRMRDWLKNVLVTLYERDEDNNLLTEKQKLRVKKIHENEKRLEAGDHPVELLARDFEKNYNMYIFPVHWQFGQLDQHPIDGYLSHTELAPLRAPLIPMEHCTTRFFETCDLDNDKYIALDEWAGCFGIKQKDIDKDLVI

SEQ ID NO: 559 - protein, 796 aa, Homo sapiens
MEAGGERFLRQRQVLLLFVFLGGSLAGSESRRYSVAEEKEKGFLIANLAKDLGLRVEELAARGAQVVSKGNKQHFQLSHQTGDLLLNEKLDREELCGPTEPCILHFQILLQNPLQFVTNELRIIDVNDHSPVFFENEMHLKILESTLPGTVIPLGNAEDLDVGRNSLQNYTITPNSHFHVLTRSRRDGRKYPELVLDKALDPEEQPELSLTLTALDGGSPPRSGTAQINIQVLDINDNAPEFAQPLYEVAVLENTPVNSVIVTVSASDLDTGSFGTISYAFFHASEEIRKTFQLNPITGDMQLVKYLNFEAINSYEVDIEAKDGGGLSGKSTVIVQVVDVNDNPPELTLSSVNSPIPENSGETVLAVFSVSDLDSGDNGRVMCSIENNLPFFLKPSVENFYTLVSEGALDRETRSEYNITITITDLGTPRLKTKYNITVLVSDVNDNAPAFTQISYTLFVRENNSPALHIGSVSATDRDSGTNAQVTYSLLPPQDPHLPLSSLVSINADNGHLFALRSLDYEALQAFEFRVGATDRGSPALSSEALVRVLVLDANDNSPFVLYPLQNGSAPCTELVPRAAEPGYLVTKVVAVDGDSGQNAWLSYQLLKATEPGLFGVWAHNGEVRTARLLSERDAAKHRLVVLVKDNGEPPRSATATLHVLLVDGFSQPYLPLPEAAPAQAQADLLTVYLVVALASVSSLFLFSVLLFVAVRLCRRSRAASVGRCSVPEGPFPGQMVDVSGTGTLSQSYQYEVCLTGGSGTNEFKFLKPIIPNFVAQGAERVSEANPSFRKSFEFS

SEQ ID NO: 560 - protein, 795 aa, Homo sapiens
METALAKTPQKRQVMFLAILLLLWEAGSEAVRYSIPEETESGYSVANLAKDLGLGVGELATRGARMHYKGNKELLQLDIKTGNLLLYEKLDREVMCGATEPCILHFQLLLENPVQFFQTDLQLTDINDHAPEFPEKEMLLKIPESTQPGTVFPLKIAQDFDIGSNTVQNYTISPNSHFHVATHNRGDGRKYPELVLDKALDREERPELSLTLTALDGGAPPRSGTTTIRIVVLDNNDNAPEFLQSFYEVQVPENSPLNSLVVVVSARDLDAGAYGSVAYALFQGDEVTQPFVIDEKTAEIRLKRALDFEATPYYNVEIVATDGGGLSGKCTVAIEVVDVNDNAPELTMSTLSSPTPENAPETVVAVFSVSDPDSGDNGRMICSIQNDLPFLLKPTLKNFYTLVTQRTLDRESQAEYNITITVTDMGTPRLKTEHNITVLVSDVNDNAPAFTQTSYTLFVRENNSPALHIGSVSATDRDSGTNAQVTYSLLPPQNPHLRLASLVSINADNGHLFALRSLDYEALQAFEFRVGATDRGSPALSSEALVRVLVLDANDNSPFVLYPLQNGSAPCTELVPRAAEPGYLVTKVVAVDGDSGQNAWLSYQLLKATEPGLFSMWAHNGEVRTARLLSERDAAKHRLVVLVKDNGEPPRSATATLHVLLVDGFSQPYLPLPEAAPAQAQADSLTVYLVVALASVSSLFLFSVLLFVAVRLCRRSRAAPVGRCSVPEGPFPGHLVDVSGTGTLSQSYHYEVCLTGDSGAGEFKFLKPIIPNLLPQGAGEEIGKTAAFRNSFGLN

SEQ ID NO: 561 - protein, 794 aa, Homo sapiens
MMQTKVQNKKRQVAFFILLMLWGEVGSESIQYSVLEETESGTFVANLTKDLGLRVGELASRGARVVFKGNRQHLQFDPQTHDLLLNEKLDREELCGSTEPCVLPFQVLLENPLQFFQASLRVRDINDHAPEFPAREMLLKISEITMPGKIFPLKMAHDLDTGSNGLQRYTISSNPHFHVLTRNRSEGRKFPELVLDKPLDREEQPQLRLTLIALDGGSPPRSGTSEIQIQVLDINDNVPEFAQELYEAQVPENNPLGSLVITVSARDLDAGSFGKVSYALFQVDDVNQPFEINAITGEIRLRKALDFEEIQSYDVDVEATDGGGLSGKCSLVVRVLDVNDNAPELTMSFFISLIPENLPEITVAVFSVSDADSGHNQQVICSIENNLPFLLRPSVENFYTLVTEGALDRESRAEYNITITVTDLGTPRLKTQQSITVQVSDVNDNAPAFTQTSYTLFVRENNSPALHIGSVSATDRDSGINAQVTYSLLPPQDPHLPLSSLVSINADNGHLFALRSLDYEALQSFEFRVGATDRGSPALSSEALVRLLVLDANDNSPFVLYPLQNGSAPCTELVPRAAEPGYLVTKVVAVDGDSGQNAWLSYQLLKATELGLFGVWAHNGEVRTARLLSERDAAKHRLVVLVKDNGEPPRSATATLHVLLVDGFSQPYLPLPEAAPAQAQADSLTVYLVVALASVSSLFLFSVLLFVAVRLCRRSRAASVGRYSVPEGPFPGHLVDVSGTGTLSQSYQYKVCLTGGSETNEFKFLKPIMPNFPPQGTEREMEETPTSRNSFPFS

SEQ ID NO: 562 - protein, 793 aa, Homo sapiens
MEARVERAVQKRQVLFLCVFLGMSWAGAEPLRYFVAEETERGTFLTNLAKDLGLGVGELRARGTRIVSDQNMQILLLSSLTGDLLLNEKLDREELCGPREPCVLPFQLLLEKPFQIFRAELWVRDINDHAPVFLDREISLKILESTTPGAAFLLESAQDSDVGTNSLSNYTISPNAYFHINVHDSGEGNIYPELVLNQVLDREEIPEFSLTLTALDGGSPPRSGTALVRILVLDVNDNAPDFVRSLYKVQVPENSPVGSMVVSVSARDLDTGSNGEIAYAFSYATERILKTFQINPTSGSLHLKAQLDYEAIQTYTLTIQAKDGGGLSGKCTVVVDVTDINDNRPELLLSSLTSPIAENSPETVVAVFRIRDRDSGNNGKTVCSIQDDVPFILKPSVENFYTLVTEKPLDRERNTEYNITITVTDLGTPRLKTEHNITVLVSDVNDNAPAFTQTSYTLFVRENNSPALPIGSVSATDRDSGTNAQVIYSLLPSQDPHLPLASLVSINADNGHLFALRSLDYEALQAFEFRVGATDRGSPALSSEALVRVLVLDANDNSPFVLYPLQNSSAPCTEPLPRAAEPGYLVTKVVAVDGDSGQNAWLSYQLLKATEPGLFGVWAHNGEVRTARLLSERDAAKQRLVVLVKDNGEPPRSATATLHVLLVDGFSQPYLRLPEAAPDQANSLTVYLVVALASVSSLFLLSVLLFVAVRLCRRSRAAPVGRCSVPEGPFPRHLVDLSGTGTLSQSYQYEVCLTGGSGTNEFKFLKPIIPNLLPQSTGREVEENRPFQNNLGF

SEQ ID NO: 563 - protein, 787 aa, Homo sapiens
MEPAGERFPEQRQVLILLLLLEVTLAGWEPRRYSVMEETERGSFVANLANDLGLGVGELAERGARVVSEDNEQGLQLDLQTGQLILNEKLDREKLCGPTEPCIMHFQVLLKKPLEVFRAELLVTDINDHSPEFPEREMTLKIPETSSLGTVFPLKKARDLDVGSNNVQNYNISPNSHFHVSTRTRGDGRKYPELVLDTELDREEQAELRLTLTAVDGGSPPRSGTVQILILVLDANDNAPEFVQALYEVQVPENSPVGSLVVKVSARDLDTGTNGEISYSLYYSSQEIDKPFELSSLSGEIRLIKKLDFETMSSYDLDIEASDGGGLSGKCSVSVKVLDVNDNFPELSISSLTSPIPENSPETEVALFRIRDRDSGENGKMICSIQDDVPFKLKPSVENFYRLVTEGALDRETRAEYNITITITDLGTPRLKTEQSITVLVSDVNDNAPAFTQTSYTLFVRENNSPALHIGSVSATDRDSGTNAQVTYSLLPPRDPHLPLTSLVSINTDNGHLFALQSLDYEALQAFEFRVGATDRGFPALSSEALVRVLVLDANDNSPFVLYPLQNGSAPCTELVPRAAEPGYLVTKVVAVDGDSGQNAWLSYQLLKATEPGLFGVWAHNGEVRTARLLSERDVAKHRLVVLVKDNGEPPRSATATLQVLLVDGFSQPYLPLPEAAPAQAQADSLTVYLVVALASVSSLFLFSVFLFVAVRLCRRSRAASVGRCSVPEGPFPGHLVDVSGTGTLSQSYQYEVCLTGGSESNDFKFLKPIFPNIVSQDSRRKSEFLE

SEQ ID NO: 564 - protein, 877 aa, Homo sapiens
MARPRRAREPLLVALLPLAWLAQAGLARAAGSVRLAGGLTLGGLFPVHARGAAGRACGQLKKEQGVHRLEAMLYALDRVNADPELLPGVRLGARLLDTCSRDTYALEQALSFVQALIRGRGDGDEVGVRCPGGVPPLRPAPPERVVAVVGASASSVSIMVANVLRLFAIPQISYASTAPELSDSTRYDFFSRVVPPDSYQAQAMVDIVRALGWNYVSTLASEGNYGESGVEAFVQISREAGGVCIAQSIKIPREPKPGEFSKVIRRLMETPNARGIIIFANEDDIRRVLEAARQANLTGHFLWVGSDSWGAKTSPILSLEDVAVGAITILPKRASIDGFDQYFMTRSLENNRRNIWFAEFWEENFNCKLTSSGTQSDDSTRKCTGEERIGRDSTYEQEGKVQFVIDAVYAIAHALHSMHQALCPGHTGLCPAMEPTDGRMLLQYIRAVRFNGSAGTPVMFNENGDAPGRYDIFQYQATNGSASSGGYQAVGQWAETLRLDVEALQWSGDPHEVPSSLCSLPCGPGERKKMVKGVPCCWHCEACDGYRFQVDEFTCEACPGDMRPTPNHTGCRPTPVVRLSWSSPWAAPPLLLAVLGIVATTTVVATFVRYNNTPIVRASGRELSYVLLTGIFLIYAITFLMVAEPGAAVCAARRLFLGLGTTLSYSALLTKTNRIYRIFEQGKRSVTPPPFISPTSQLVITFSLTSLQVVGMIAWLGARPPHSVIDYEEQRTVDPEQARGVLKCDMSDLSLIGCLGYSLLLMVTCTVYAIKARGVPETFNEAKPIGFTMYTTCIIWLAFVPIFFGTAQSAEKIYIQTTTLTVSLSLSASVSLGMLYVPKTYVILFHPEQNVQKRKRSLKATSTVAAPPKGEDAEAHK

SEQ ID NO: 565 - protein, 347 aa, Homo sapiens
MALMLSLVLSLLKLGSGQWQVFGPDKPVQALVGEDAAFSCFLSPKTNAEAMEVRFFRGQFSSVVHLYRDGKDQPFMQMPQYQGRTKLVKDSIAEGRISLRLENITVLDAGLYGCRISSQSYYQKAIWELQVSALGSVPLISITGYVDRDIQLLCQSSGWFPRPTAKWKGPQGQDLSTDSRTNRDMHGLFDVEISLTVQENAGSISCSMRHAHLSREVESRVQIGDTFFEPISWHLATKVLGILCCGLFFGIVGLKIFFSKFQCKREREAWAGALFMVPAGTGSEMLPHPAASLLLVLASRGPGPKKENPGGTGLEKKARTGRIERRPETRSGGDSGSRDGSPEALRF

SEQ ID NO: 566 - protein, 519 aa, Homo sapiens
MSYPQFGYPYSSAPQFLMATNSLSTCCESGGRTLADSGPAASAQAPVYCPVYESRLLATARHELNSAAALGVYGGPYGGSQGYGNYVTYGSEASAFYSLNSFDSKDGSGSAHGGLAPAAAAYYPYEPALGQYPYDRYGTMDSGTRRKNATRETTSTLKAWLQEHRKNPYPTKGEKIMLAIITKMTLTQVSTWFANARRRLKKENKMTWPPRNKCADEKRPYAEGEEEEGGEEEAREEPLKSSKNAEPVGKEEKELELSDLDDFDPLEAEPPACELKPPFHSLDGGLERVPAAPDGPVKEASGALRMSLAAGGGAALDEDLERARSCLRSAAAGPEPLPGAEGGPQVCEAKLGFVPAGASAGLEAKPRIWSLAHTATAAAAAATSLSQTEFPSCMLKRQGPAAPAAVSSAPATSPSVALPHSGALDRHQDSPVTSLRNWVDGVFHDPILRHSTLNQAWATAKGALLDPGPLGRSLGAGANVLTAPLARAFPPAVPQDAPAAGAARELLALPKAGGKPFCA

SEQ ID NO: 567 - protein, 1025 aa, Homo sapiens
MEPFTNDRLQLPRNMIENSMFEEEPDVVDLAKEPCLHPLEPDEVEYEPRGSRLLVRGLGEHEMEEDEEDYESSAKLLGMSFMNRSSGLRNSATGYRQSPDGACSVPSARTMVVCAFVIVVAVSVIMVIYLLPRCTFTKEGCHKKNQSIGLIQPFATNGKLFPWAQIRLPTAVVPLRYELSLHPNLTSMTFRGSVTISVQALQVTWNIILHSTGHNISRVTFMSAVSSQEKQAEILEYAYHGQIAIVAPEALLAGHNYTLKIEYSANISSSYYGFYGFSYTDESNEKKYFAATQFEPLAARSAFPCFDEPAFKATFIIKIIRDEQYTALSNMPKKSSVVLDDGLVQDEFSESVKMSTYLVAFIVGEMKNLSQDVNGTLVSIYAVPEKIGQVHYALETTVKLLEFFQNYFEIQYPLKKLDLVAIPDFEAGAMENWGLLTFREETLLYDSNTSSMADRKLVTKIIAHELAHQWFGNLVTMKWWNDLWLNEGFATFMEYFSLEKIFKELSSYEDFLDARFKTMKKDSLNSSHPISSSVQSSEQIEEMFDSLSYFKGSSLLLMLKTYLSEDVFQHAVVLYLHNHSYASIQSDDLWDSFNEVTNQTLDVKRMMKTWTLQKGFPLVTVQKKGKELFIQQERFFLNMKPEIQPSDTSYLWHIPLSYVTEGRNYSKYQSVSLLDKKSGVINLTEEVLWVKVNINMNGYYIVHYADDDWEALIHQLKINPYVLSDKDRANLINNIFELAGLGKVPLKRAFDLINYLGNENHTAPITEALFQTDLIYNLLEKLGYMDLASRLVTRVFKLLQNQIQQQTWTDEGTPSMRELRSALLEFACTHNLGNCSTTAMKLFDDWMASNGTQSLPTDVMTTVFKVGAKTDKGWSFLLGKYISIGSEAEKNKILEALASSEDVRKLYWLMKSSLNGDNFRTQKLSFIIRTVGRHFPGHLLAWDFVKENWNKLVQKFPLGSYTIQNIVAGSTYLFSTKTHLSEVQAFFENQSEATFRLRCVQEALEVIQLNIQWMEKNLKSLTWWL

SEQ ID NO: 568 - protein, 514 aa, Homo sapiens
MTLIWRHLLRPLCLVTSAPRILEMHPFLSLGTSRTSVTKLSLHTKPRMPPCDFMPERYQSLGYNRVLEIHKEHLSPVVTAYFQKPLLLHQGHMEWLFDAEGSRYLDFFSGIVTVSVGHCHPKVNAVAQKQLGRLWHTSTVFFHPPMHEYAEKLAALLPEPLKVIFLVNSGSEANELAMLMARAHSNNIDIISFRGAYHGCSPYTLGLTNVGTYKMELPGGTGCQPTMCPDVFRGPWGGSHCRDSPVQTIRKCSCAPDCCQAKDQYIEQFKDTLSTSVAKSIAGFFAEPIQGVNGVVQYPKGFLKEAFELVRARGGVCIADEVQTGFGRLGSHFWGFQTHDVLPDIVTMAKGIGNGFPMAAVITTPEIAKSLAKCLQHFNTFGGNPMACAIGSAVLEVIKEENLQENSQEVGTYMLLKFAKLRDEFEIVGDVRGKGLMIGIEMVQDKISCRPLPREEVNQIHEDCKHMGLLVGRGSIFSQTFRIAPSMCITKPEVDFAVEVFRSALTQHMERRAK

SEQ ID NO: 569 - protein, 376 aa, Homo sapiens
MKENVASATVFTLLLFLNTCLLNGQLPPGKPEIFKCRSPNKETFTCWWRPGTDGGLPTNYSLTYHREGETLMHECPDYITGGPNSCHFGKQYTSMWRTYIMMVNATNQMGSSFSDELYVDVTYIVQPDPPLELAVEVKQPEDRKPYLWIKWSPPTLIDLKTGWFTLLYEIRLKPEKAAEWEIHFAGQQTEFKILSLHPGQKYLVQVRCKPDHGYWSAWSPATFIQIPSDFTMNDTTVWISVAVLSAVICLIIVWAVALKGYSMVTCIFPPVPGPKIKGFDAHLLEKGKSEELLSALGCQDFPPTSDYEDLLVEYLEVDDSEDQHLMSVHSKEHPSQGDPLMLGASHYKNLKSYRPRKISSQGRLAVFTKATLTTVQ

SEQ ID NO: 570 - protein, 359 aa, Homo sapiens
MRSIRKRWTICTISLLLIFYKTKEIARTEEHQETQLIGDGELSLSRSLVNSSDKIIRKAGSSIFQHNVEGWKINSSLVLEIRKNILRFLDAERDVSVVKSSFKPGDVIHYVLDRRRTLNISHDLHSLLPEVSPMKNRRFKTCAVVGNSGILLDSECGKEIDSHNFVIRCNLAPVVEFAADVGTKSDFITMNPSVVQRAFGGFRNESDREKFVHRLSMLNDSVLWIPAFMVKGGEKHVEWVNALILKNKLKVRTAYPSLRLIHAVRGYWLTNKVPIKRPSTGLLMYTLATRFCDEIHLYGFWPFPKDLNGKAVKYHYYDDLKYRYFSNASPHRMPLEFKTLNVLHNRGALKLTTGKCVKQ

SEQ ID NO: 571 - protein, 1184 aa, Homo sapiens
MMQLLQLLLGLLGPGGYLFLLGDCQEVTTLTVKYQVSEEVPSGTVIGKLSQELGREERRRQAGAAFQVLQLPQALPIQVDSEEGLLSTGRRLDREQLCRQWDPCLVSFDVLATGDLALIHVEIQVLDINDHQPRFPKGEQELEISESASLRTRIPLDRALDPDTGPNTLHTYTLSPSEHFALDVIVGPDETKHAELIVVKELDREIHSFFDLVLTAYDNGNPPKSGTSLVKVNVLDSNDNSPAFAESSLALEIQEDAAPGTLLIKLTATDPDQGPNGEVEFFLSKHMPPEVLDTFSIDAKTGQVILRRPLDYEKNPAYEVDVQARDLGPNPIPAHCKVLIKVLDVNDNIPSIHVTWASQPSLVSEALPKDSFIALVMADDLDSGHNGLVHCWLSQELGHFRLKRTNGNTYMLLTNATLDREQWPKYTLTLLAQDQGLQPLSAKKQLSIQISDINDNAPVFEKSRYEVSTRENNLPSLHLITIKAHDADLGINGKVSYRIQDSPVAHLVAIDSNTGEVTAQRSLNYEEMAGFEFQVIAEDSGQPMLASSVSVWVSLLDANDNAPEVVQPVLSDGKASLSVLVNASTGHLLVPIETPNGLGPAGTDTPPLATHSSRPFLLTTIVARDADSGANGEPLYSIRSGNEAHLFILNPHTGQLFVNVTNASSLIGSEWELEIVVEDQGSPPLQTRALLRVMFVTSVDHLRDSARKPGALSMSMLTVICLAVLLGIFGLILALFMSICRTEKKDNRAYNCREAESTYRQQPKRPQKHIQKADIHLVPVLRGQAGEPCEVGQSHKDVDKEAMMEAGWDPCLQAPFHLTPTLYRTLRNQGNQGAPAESREVLQDTVNLLFNHPRQRNASRENLNLPEPQPATGQPRSRPLKVAGSPTGRLAGDQGSEEAPQRPPASSATLRRQRHLNGKVSPEKESGPRQILRSLVRLSVAAFAERNPVEELTVDSPPVQQISQLLSLLHQGQFQPKPNHRGNKYLAKPGGSRSAIPDTDGPSARAGGQTDPEQEEGPLDPEEDLSVKQLLEEELSSLLDPSTGLALDRLSAPDPAWMARLSLPLTTNYRDNVISPDAAATEEPRTFQTFGKAEAPELSPTGTRLASTFVSEMSSLLEMLLEQRSSMPVEAASEALRRLSVCGRTLSLDLATSAASGMKVQGDPGGKTGTEGKSRGSSSSSRCL

SEQ ID NO: 572 - protein, 1391 aa, Homo sapiens
MPSSLLGAAMPASTSAAALQEALENAGRLIDRQLQEDRMYPDLSELLMVSAPNNPTVSGMSDMDYPLQGPGLLSVPNLPEISSIRRVPLPPELVEQFGHMQCNCMMGVFPPISRAWLTIDSDIFMWNYEDGGDLAYFDGLSETILAVGLVKPKAGIFQPHVRHLLVLATPVDIVILGLSYANLQTGSGVLNDSLSGGMQLLPDPLYSLPTDNTYLLTITSTDNGRIFLAGKDGCLYEVAYQAEAGWFSQRCRKINHSKSSLSFLVPSLLQFTFSEDDPILQIAIDNSRNILYTRSEKGVIQVYDLGQDGQGMSRVASVSQNAIVSAAGNIARTIDRSVFKPIVQIAVIENSESLDCQLLAVTHAGVRLYFSTCPFRQPLARPNTLTLVHVRLPPGFSASSTVEKPSKVHRALYSKGILLMAASENEDNDILWCVNHDTFPFQKPMMETQMTAGVDGHSWALSAIDELKVDKIITPLNKDHIPITDSPVVVQQHMLPPKKFVLLSAQGSLMFHKLRPVDQLRHLLVSNVGGDGEEIERFFKLHQEDQACATCLILACSTAACDREVSAWATRAFFRYGGEAQMRFPTTLPPPSNVGPILGSPVYSSSPVPSGSPYPNPSFLGTPSHGIQPPAMSTPVCALGNPATQATNMSCVTGPEIVYSGKHNGICIYFSRIMGNIWDASLVVERIFKSGNREITAIESSVPCQLLESVLQELKGLQEFLDRNSQFAGGPLGNPNTTAKVQQRLIGFMRPENGNPQQMQQELQRKFHEAQLSEKISLQAIQQLVRKSYQALALWKLLCEHQFTIIVAELQKELQEQLKITTFKDLVIRDKELTGALIASLINCYIRDNAAVDGISLHLQDICPLLYSTDDAICSKANELLQRSRQVQNKTEKERMLRESLKEYQKISNQVDLSNVCAQYRQVRFYEGVVELSLTAAEKKDPQGLGLHFYKHGEPEEDIVGLQAFQERLNSYKCITDTLQELVNQSKAAPQSPSVPKKPGPPVLSSDPNMLSNEEAGHHFEQMLKLSQRSKDELFSIALYNWLIQVDLADKLLQVASPFLEPHLVRMAKVDQNRVRYMDLLWRYYEKNRSFSNAARVLSRLADMHSTEISLQQRLEYIARAILSAKSSTAISSIAADGEFLHELEEKMEVARIQLQIQETLQRQYSHHSSVQDAVSQLDSELMDITKLYGEFADPFKLAECKLAIIHCAGYSDPILVQTLWQDIIEKELSDSVTLSSSDRMHALSLKIVLLGKIYAGTPRFFPLDFIVQFLEQQVCTLNWDVGFVIQTMNEIGVPLPRLLEVYDQLFKSRDPFWNRMKKPLHLLDCIHVLLIRYVENPSQVLNCERRRFTNLCLDAVCGYLVELQSMSSSVAVQAITGNFKSLQAKLERLH

SEQ ID NO: 573 - protein, 778 aa, Homo sapiens
MDSKESLTPGREENPSSVLAQERGDVMDFYKTLRGGATVKVSASSPSLAVASQSDSKQRRLLVDFPKGSVSNAQQPDLSKAVSLSMGLYMGETETKVMGNDLGFPQQGQISLSSGETDLKLLEESIANLNRSTSVPENPKSSASTAVSAAPTEKEFPKTHSDVSSEQQHLKGQTGTNGGNVKLYTTDQSTFDILQDLEFSSGSPGKETNESPWRSDLLIDENCLLSPLAGEDDSFLLEGNSNEDCKPLILPDTKPKIKDNGDLVLSSPSNVTLPQVKTEKEDFIELCTPGVIKQEKLGTVYCQASFPGANIIGNKMSAISVHGVSTSGGQMYHYDMNTASLSQQQDQKPIFNVIPPIPVGSENWNRCQGSGDDNLTSLGTLNFPGRTVFSNGYSSPSMRPDVSSPPSSSSTATTGPPPKLCLVCSDEASGCHYGVLTCGSCKVFFKRAVEGRQHNYLCAGRNDCIIDKIRRKNCPACRYRKCLQAGMNLEARKTKKKIKGIQQATTGVSQETSENPGNKTIVPATLPQLTPTLVSLLEVIEPEVLYAGYDSSVPDSTWRIMTTLNMLGGRQVIAAVKWAKAIPGFRNLHLDDQMTLLQYSWMFLMAFALGWRSYRQSSANLLCFAPDLIINEQRMTLPCMYDQCKHMLYVSSELHRLQVSYEEYLCMKTLLLLSSVPKDGLKSQELFDEIRMTYIKELGKAIVKREGNSSQNWQRFYQLTKLLDSMHEVVENLLNYCFQTFLDKTMSIEFPEMLAEIITNQIPKYSNGNIKKLLFHQK

SEQ ID NO: 574 - protein, 574 aa, Homo sapiens
MATLVVNKLGAGVDSGRQGSRGTAVVKVLECGVCEDVFSLQGDKVPRLLLCGHTVCHDCLTRLPLHGRAIRCPFDRQVTDLGDSGVWGLKKNFALLELLERLQNGPIGQYGAAEESIGISGESIIRCDEDEAHLASVYCTVCATHLCSECSQVTHSTKTLAKHRRVPLADKPHEKTMCSQHQVHAIEFVCLEEGCQTSPLMCCVCKEYGKHQGHKHSVLEPEANQIRASILDMAHCIRTFTEEISDYSRKLVGIVQHIEGGEQIVEDGIGMAHTEHVPGTAENARSCIRAYFYDLHETLCRQEEMALSVVDAHVREKLIWLRQQQEDMTILLSEVSAACLHCEKTLQQDDCRVVLAKQEITRLLETLQKQQQQFTEVADHIQLDASIPVTFTKDNRVHIGPKMEIRVVTLGLDGAGKTTILFKLKQDEFMQPIPTIGFNVETVEYKNLKFTIWDVGGKHKLRPLWKHYYLNTQAVVFVVDSSHRDRISEAHSELAKLLTEKELRDALLLIFANKQDVAGALSVEEITELLSLHKLCCGRSWYIQGCDARSGMGLYEGLDWLSRQLVAAGVLDVA

SEQ ID NO: 575 - protein, 660 aa, Homo sapiens
MDVLVSECSARLLQQEEEIKSLTAEIDRLKNCGCLGASPNLEQLQEENLKLKYRLNILRKSLQAERNKPTKNMINIISRLQEVFGHAIKAAYPDLENPPLLVTPSQQAKFGDYQCNSAMGISQMLKTKEQKVNPREIAENITKHLPDNECIEKVEIAGPGFINVHLRKDFVSEQLTSLLVNGVQLPALGENKKVIVDFSSPNIAKEMHVGHLRSTIIGESISRLFEFAGYDVLRLNHVGDWGTQFGMLIAHLQDKFPDYLTVSPPIGDLQVFYKESKKRFDTEEEFKKRAYQCVVLLQGKNPDITKAWKLICDVSRQELNKIYDALDVSLIERGESFYQDRMNDIVKEFEDRGFVQVDDGRKIVFVPGCSIPLTIVKSDGGYTYDTSDLAAIKQRLFEEKADMIIYVVDNGQSVHFQTIFAAAQMIGWYDPKVTRVFHAGFGVVLGEDKKKFKTRSGETVRLMDLLGEGLKRSMDKLKEKERDKVLTAEELNAAQTSVAYGCIKYADLSHNRLNDYIFSFDKMLDDRGNTAAYLLYAFTRIRSIARLANIDEEMLQKAARETKILLDHEKEWKLGRCILRFPEILQKILDDLFLHTLCDYIYELATAFTEFYDSCYCVEKDRQTGKILKVNMWRMLLCEAVAAVMAKGFDILGIKPVQRM

SEQ ID NO: 576 - protein, 359 aa, Homo sapiens
MAPNGTASSFCLDSTACKITITVVLAVLILITVAGNVVVCLAVGLNRRLRNLTNCFIVSLAITDLLLGLLVLPFSAIYQLSCKWSFGKVFCNIYTSLDVMLCTASILNLFMISLDRYCAVMDPLRYPVLVTPVRVAISLVLIWVISITLSFLSIHLGWNSRNETSKGNHTTSKCKVQVNEVYGLVDGLVTFYLPLLIMCITYYRIFKVARDQAKRINHISSWKAATIREHKATVTLAAVMGAFIICWFPYFTAFVYRGLRGDDAINEVLEAIVLWLGYANSALNPILYAALNRDFRTGYQQLFCCRLANRNSHKTSLRSNASQLSRTQSREPRQQEEKPLKLQVWSGTEVTAPQGATDR

SEQ ID NO: 577 - protein, 771 aa, Homo sapiens
MSGFFTSLDPRRVQWGAAWYAMHSRILRTKPVESMLEGTGTTTAHGTKLAQVLTTVDLISLGVGSCVGTGMYVVSGLVAKEMAGPGVIVSFIIAAVASILSGVCYAEFGVRVPKTTGSAYTYSYVTVGEFVAFFIGWNLILEYLIGTAAGASALSSMFDSLANHTISRWMADSVGTLNGLGKGEESYPDLLALLIAVIVTIIVALGVKNSIGFNNVLNVLNLAVWVFIMIAGLFFINGKYWAEGQFLPHGWSGVLQGAATCFYAFIGFDIIATTGEEAKNPNTSIPYAITASLVICLTAYVSVSVILTLMVPYYTIDTESPLMEMFVAHGFYAAKFVVAIGSVAGLTVSLLGSLFPMPRVIYAMAGDGLLFRFLAHVSSYTETPVVACIVSGFLAALLALLVSLRDLIEMMSIGTLLAYTLVSVCVLLLRYQPESDIDGFVKFLSEEHTKKKEGILADCEKEACSPVSEGDEFSGPATNTCGAKNLPSLGDNEMLIGKSDKSTYNVNHPNYGTVDMTTGIEADESENIYLIKLKKLIGPHYYTMRIRLGLPGKMDRPTAATGHTVTICVLLLFILMFIFCSFIIFGSDYISEQSWWAILLVVLMVLLISTLVFVILQQPENPKKLPYMAPCLPFVPAFAMLVNIYLMLKLSTITWIRFAVWCFVGLLIYFGYGIWNSTLEISAREEALHQSTYQRYDVDDPFSVEEGFSYATEGESQEDWGGPTEDKGFYYQQMSDAKANGRTSSKAKSKSKHKQNSEALIANDELDYSPE

SEQ ID NO: 578 - protein, 782 aa, Homo sapiens
MAPSAWAICWLLGGLLLHGGSSGPSPGPSVPRLRLSYRDLLSANRSAIFLGPQGSLNLQAMYLDEYRDRLFLGGLDALYSLRLDQAWPDPREVLWPPQPGQREECVRKGRDPLTECANFVRVLQPHNRTHLLACGTGAFQPTCALITVGHRGEHVLHLEPGSVESGRGRCPHEPSRPFASTFIDGELYTGLTADFLGREAMIFRSGGPRPALRSDSDQSLLHDPRFVMAARIPENSDQDNDKVYFFFSETVPSPDGGSNHVTVSRVGRVCVNDAGGQRVLVNKWSTFLKARLVCSVPGPGGAETHFDQLEDVFLLWPKAGKSLEVYALFSTVSAVFQGFAVCVYHMADIWEVFNGPFAHRDGPQHQWGPYGGKVPFPRPGVCPSKMTAQPGRPFGSTKDYPDEVLQFARAHPLMFWPVRPRHGRPVLVKTHLAQQLHQIVVDRVEAEDGTYDVIFLGTDSGSVLKVIALQAGGSAEPEEVVLEELQVFKVPTPITEMEISVKRQMLYVGSRLGVAQLRLHQCETYGTACAECCLARDPYCAWDGASCTHYRPSLGKRRFRRQDIRHGNPALQCLGQSQEEEAVGLVAATMVYGTEHNSTFLECLPKSPQAAVRWLLQRPGDEGPDQVKTDERVLHTERGLLFRRLSRFDAGTYTCTTLEHGFSQTVVRLALVVIVASQLDNLFPPEPKPEEPPARGGLASTPPKAWYKDILQLIGFANLPRVDEYCERVWCRGTTECSGCFRSRSRGKQARGKSWAGLELGKKMKSRVHAEHNRTPREVEAT

SEQ ID NO: 579 - protein, 710 aa, Homo sapiens
MKLVFLVLLFLGALGLCLAGRRRSVQWCAVSQPEATKCFQWQRNMRKVRGPPVSCIKRDSPIQCIQAIAENRADAVTLDGGFIYEAGLAPYKLRPVAAEVYGTERQPRTHYYAVAVVKKGGSFQLNELQGLKSCHTGLRRTAGWNVPIGTLRPFLNWTGPPEPIEAAVARFFSASCVPGADKGQFPNLCRLCAGTGENKCAFSSQEPYFSYSGAFKCLRDGAGDVAFIRESTVFEDLSDEAERDEYELLCPDNTRKPVDKFKDCHLARVPSHAVVARSVNGKEDAIWNLLRQAQEKFGKDKSPKFQLFGSPSGQKDLLFKDSAIGFSRVPPRIDSGLYLGSGYFTAIQNLRKSEEEVAARRARVVWCAVGEQELRKCNQWSGLSEGSVTCSSASTTEDCIALVLKGEADAMSLDGGYVYTAGKCGLVPVLAENYKSQQSSDPDPNCVDRPVEGYLAVAVVRRSDTSLTWNSVKGKKSCHTAVDRTAGWNIPMGLLFNQTGSCKFDEYFSQSCAPGSDPRSNLCALCIGDEQGENKCVPNSNERYYGYTGAFRCLAENAGDVAFVKDVTVLQNTDGNNNEAWAKDLKLADFALLCLDGKRKPVTEARSCHLAMAPNHAVVSRMDKVERLKQVLLHQQAKFGRNGSDCPDKFCLFQSETKNLLFNDNTECLARLHGKTTYEKYLGPQYVAGITNLKKCSTSPLLEACEFLRK

SEQ ID NO: 580 - protein, 694 aa, Homo sapiens
MGAPACALALCVAVAIVAGASSESLGTEQRVVGRAAEVPGPEPGQQEQLVFGSGDAVELSCPPPGGGPMGPTVWVKDGTGLVPSERVLVGPQRLQVLNASHEDSGAYSCRQRLTQRVLCHFSVRVTDAPSSGDDEDGEDEAEDTGVDTGAPYWTRPERMDKKLLAVPAANTVRFRCPAAGNPTPSISWLKNGREFRGEHRIGGIKLRHQQWSLVMESVVPSDRGNYTCVVENKFGSIRQTYTLDVLERSPHRPILQAGLPANQTAVLGSDVEFHCKVYSDAQPHIQWLKHVEVNGSKVGPDGTPYVTVLKVSLESNASMSSNTPLVRIARLSSGEGPTLANVSELELPADPKWELSRARLTLGKPLGEGCFGQVVMAEAIGIDKDRAAKPVTVAVKMLKDDATDKDLSDLVSEMEMMKMIGKHKNIINLLGACTQGGPLYVLVEYAAKGNLREFLRARRPPGLDYSFDTCKPPEEQLTFKDLVSCAYQVARGMEYLASQKCIHRDLAARNVLVTEDNVMKIADFGLARDVHNLDYYKKTTNGRLPVKWMAPEALFDRVYTHQSDVWSFGVLLWEIFTLGGSPYPGIPVEELFKLLKEGHRMDKPANCTHDLYMIMRECWHAAPSQRPTFKQLVEDLDRVLTVTSTDEYLDLSAPFEQYSPGGQDTPSSSSSGDDSVFAHDLLPPAPPSSGGSRT

SEQ ID NO: 581 - protein, 723 aa, Homo sapiens
MAEYTRLHNALALIRLRNPPVNAISTTLLRDIKEGLQKAVIDHTIKAIVICGAEGKFSAGADIRGFSAPRTFGLTLGHVVDEIQRNEKPVVAAIQGMAFGGGLELALGCHYRIAHAEAQVGLPEVTLGLLPGARGTQLLPRLTGVPAALDLITSGRRILADEALKLGILDKVVNSDPVEEAIRFAQRVSDQPLESRRLCNKPIQSLPNMDSIFSEALLKMRRQHPGCLAQEACVRAVQAAVQYPYEVGIKKEEELFLYLLQSGQARALQYAFFAERKANKWSTPSGASWKTASARPVSSVGVVGLGTMGRGIVISFARARIPVIAVDSDKNQLATANKMITSVLEKEASKMQQSGHPWSGPKPRLTSSVKELGGVDLVIEAVFEEMSLKKQVFAELSAVCKPEAFLCTNTSALDVDEIASSTDRPHLVIGTHFFSPAHVMKLLEVIPSQYSSPTTIATVMNLSKKIKKIGVVVGNCFGFVGNRMLNPYYNQAYFLLEEGSKPEEVDQVLEEFGFKMGPFRVSDLAGLDVGWKSRKGQGLTGPTLLPGTPARKRGNRRYCPIPDVLCELGRFGQKTGKGWYQYDKPLGRIHKPDPWLSKFLSRYRKTHHIEPRTISQDEILERCLYSLINEAFRILGEGIAASPEHIDVVYLHGYGWPRHKGGPMFYASTVGLPTVLEKLQKYYRQNPDIPQLEPSDYLKKLASQGNPPLKEWQSLAGSPSSKL

SEQ ID NO: 582 - protein, 442 aa, Homo sapiens [sequence omitted]

SEQ ID NO: 583 - protein, 525 aa, Homo sapiens
MKALIAALLLITLQYSCAVSPTDCSAVEPEAEKALDLINKRRRDGYLFQLLRIADAHLDRVENTTVYYLVLDVQESDCSVLSRKYWNDCEPPDSRRPSEIVIGQCKVIATRHSHESQDLRVIDFNCTTSSVSSALANTKDSPVLIDFFEDTERYRKQANKALEKYKEENDDFASFRVDRIERVARVRGGEGTGYFVDFSVRNCPRHHFPRHPNVFGFCRADLFYDVEALDLESPKNLVINCEVFDPQEHENINGVPPHLGHPFHWGGHERSSTTKPPFKPHGSRDHHHPHKPHEHGPPPPPDERDHSHGPPLPQGPPPLLPMSCSSCQHATFGTNGAQRHSHNNNSSDLHPHKHHSHEQHPHGHHPHAHHPHEHDTHRQHPHGHHPHGHHPHGHHPHGHHPHGHHPHCHDFQDYGPCDPPPHNQGHCCHGHGPPPGHLRRRGPGKGPRPFHCRQIGSVYRLPPLRKGEVLPLPEANFPSFPLPHHKHPLKPDNQPFPQSVSESCPGKFKSGFPQVSMFFTHTFPK

SEQ ID NO: 584 - protein, 706 aa, Homo sapiens
MASPADSCIQFTRHASDVLLNLNRLRSRDILTDVVIVVSREQFRAHKTVLMACSGLFYSIFTDQLKCNLSVINLDPEINPEGFCILLDFMYTSRLNLREGNIMAVMATAMYLQMEHVVDTCRKFIKASEAEMVSAIKPPREEFLNSRMLMPQDIMAYRGREVVENNLPLRSAPGCESRAFAPSLYSGLSTPPASYSMYSHLPVSSLLFSDEEFRDVRMPVANPFPKERALPCDSARPVPGEYSRPTLEVSPNVCHSNIYSPKETIPEEARSDMHYSVAEGLKPAAPSARNAPYFPCDKASKEEERPSSEDEIALHFEPPNAPLNRKGLVSPQSPQKSDCQPNSPTESCSSKNACILQASGSPPAKSPTDPKACNWKKYKFIVLNSLNQNAKPEGPEQAELGRLSPRAYTAPPACQPPMEPENLDLQSPTKLSASGEDSTIPQASRLNNIVNRSMTGSPRSSSESHSPLYMHPPKCTSCGSQSPQHAEMCLHTAGPTFPEEMGETQSEYSDSSCENGAFFCNECDCRFSEEASLKRHTLQTHSDKPYKCDRCQASFRYKGNLASHKTVHTGEKPYRCNICGAQFNRPANLKTHTRIHSGEKPYKCETCGARFVQVAHLRAHVLIHTGEKPYPCEICGTRFRHLQTLKSHLRIHTGEKPYHCEKCNLHFRHKSQLRLHLRQKHGAITNTKVQYRVSATDLPPELPKAC

SEQ ID NO: 585 - protein, 984 aa, Homo sapiens
MDDRYPALQRAQLRLDFIHANSTTHSFLFGALAELLDNARDAGAERLDVFSVDNEKLQGGFMLCFLDDGCGMSPEEASDIIYFGRSKKRLSTLKFIGQYGNGLKSGSMRIGKDFILFTKKEETMTCVFFSQTFCEEESLSEVVVPMPSWLIRTRESVTDDPQKFAMELSIIYKYSPFKTEAELMQQFDVIYGKCGTLLVIYNLKLLLNGEPELDVKTDKEDILMAGALEDFPARWSFRAYTSVLYFNPWMRIFIQAKRVKTKHLCYCLYRPRKYLYVTSSFKGAFKDEVKKAEEAVKIAESILKEAQIKVNQCDRTSLSSAKDVLQRALEDVEAKQKNLKEKQRELKTARTLSLFYGVNVENRSQAGMFIYSNNRLIKMHEKVGSQLKLKSLLGAGVVGIVNIPLEVMEPSHNKQEFLNVQEYNHLLKVMGQYLVQYCKDTGINNRNLTLFCNEFGYQNDIDVEKPLNSFQYQRRQAMGIPFIIQCDLCLKWRVLPSSTNYQEKEFFDIWICANNPNRLENSCHQVECLPSIPLGTMSTISPSKNEKEKQLRESVIKYQNRLAEQQPQPQFIPVDEITVTSTCLTSAHKENTKTQKIRLLGDDLKHESLSSFELSASRRGQKRNIEETDSDVEYISETKIMKKSMEEKMNSQQQRIPVALPENVKLAERSQRSQIANITTVWRAQPTEGCLKNAQAASWEMKRKQSLNFVEECKVLTEDENTSDSDIILVSDKSNTDVSLKQEKKEIPLLNQEKQELCNDVLAMKRSSSLPSWKSLLNVPMEDVNLSSGHIARVSVSGSCKVASSPASSQSTPVKETVRKLKSKLREILLYFFPEHQLPSELEEPALSCELEQCPEQMNKKLKMCFNQIQNTYMVQYEKKIKRKLQSIIYDSNTRGIHNEISLGQCENKRKISEDKLKNLRIKLALLLQKLQLGGPEGDLEQTDTYLEALLKEDNLLFQNNLNKVTIDARHRLPLEKNEKTSEN

SEQ ID NO: 586 - protein, 399 aa, Homo sapiens
MGRKSLYLLIVGILIAYYIYTPLPDNVEEPWRMMWINAHLKTIQNLATFVELLGLHHFMDSFKVVGSFDEVPPTSDENVTVTETKFNNILVRVYVPKRKSEALRRGLFYIHGGGWCVGSAALSGYDLLSRWTADRLDAVVVSTNYRLAPKYHFPIQFEDVYNALRWFLRKKVLAKYGVNPERIGISGDSAGGNLAAAVTQQLLDDPDVKIKLKIQSLIYPALQPLDVDLPSYQENSNFLFLSKSLMVRFWSEYFTTDRSLEKAMLSRQHVPVESSHLFKFVNWSSLLPERFIKGHVYNNPNYGSSELAKKYPGFLDVRAAPLLADDNKLRGLPLTYVITCQYDLLRDDGLMYVTRLRNTGVQVTHNHVEDGFHGAFSFLGLKISHRLINQYIEWLKENL

SEQ ID NO: 587 - protein, 747 aa, Homo sapiens
MGRLNEQRLFQPDLCDVDLVLVPQRSVFPAHKGVLAAYSQFFHSLFTQNKQLQRVELSLEALAPGGLQQILNFIYTSKLLVNAANVHEVLSAASLLQMADIAASCQELLDARSLGPPGPGTVALAQPAASCTPAAPPYYCDIKQEADTPGLPKIYAREGPDPYSVRVEDGAGTAGGTVPATIGPAQPFFKEEKEGGVEEAGGPPASLCKLEGGEELEEELGGSGTYSRREQSQIIVEVNLNNQTLHVSTGPEGKPGAGPSPATVVLGREDGLQRHSDEEEEDDEEEEEEEEEEEGGGSGREEEEEEEGGSQGEEEEEEEDGHSEQEEEEEEEEEEGPSEQDQESSEEEEGEEGEAGGKQGPRGSRSSRADPPPHSHMATRSRENARRRGTPEPEEAGRRGGKRPKPPPGVASASARGPPATDGLGAKVKLEEKQHHPCQKCPRVFNNRWYLEKHMNVTHSRMQICDQCGKRFLLESELLLHRQTDCERNIQCVTCGKAFKKLWSLHEHNKIVHGYAEKKFSCEICEKKFYTMAHVRKHMVAHTKDMPFTCETCGKSFKRSMSLKVHSLQHSGEKPFRCENCNERFQYKYQLRSHMSIHIGHKQFMCQWCGKDFNMKQYFDEHMKTHTGEKPYICEICGKSFTSRPNMKRHRRTHTGEKPYPCDVCGQRFRFSNMLKAHKEKCFRVSHTLAGDGVPAAPGLPPTQPQAHALPLLPGLPQTLPPPPHLPPPPPLFPTTASPGGRMNANN

SEQ ID NO: 588 - protein, 1462 aa, Homo sapiens
MGAQDRPQCHFDIEINREPVGRIMFQLFSDICPKTCKNFLCLCSGEKGLGKTTGKKLCYKGSTFHRVVKNFMIQGGDFSEGNGKGGESIYGGYFKDENFILKHDRAFLLSMANRGKHTNGSQFFITTKPAPHLDGVHVVFGLVISGFEVIEQIENLKTDAASRPYADVRVIDCGVLATKSIKDVFEKKRKKPTHSEGSDSSSNSSSSSESSSESELEHERSRRRKHKRRPKVKRSKKRRKEASSSEEPRNKHAMNPKGHSERSDTNEKRSVDSSAKREKPVVRPEEIPPVPENRFLLRRDMPVVTAEPEPKIPDVAPIVSDQKPSVSKSGRKIKGRGTIRYHTPPRSRSCSESDDDDSSETPPHWKEEMQRLRAYRPPSGEKWSKGDKLSDPCSSRWDERSLSQRSRSWSYNGYYSDLSTARHSGHHKKRRKEKKVKHKKKGKKQKHCRRHKQTKKRRILIPSDIESSKSSTRRMKSSCDRERSSRSSSLSSHHSSKRDWSKSDKDVQSSLTHSSRDSYRSKSHSQSYSRGSSRSRTASKSSSHSRSRSKSRSSSKSGHRKRASKSPRKTASQLSENKPVKTEPLRATMAQNENVVVQPVVAENIPVIPLSDSPPPSRWKPGQKPWKPSYERIQEMKAKTTHLLPIQSTYSLANIKETGSSSSYHKREKNSESDQSTYSKYSDRSSESSPRSRSRSSRSRSYSRSYTRSRSLASSHSRSRSPSSRSHSRNKYSDHSQCSRSSSYTSISSDDGRRAKRRLRSSGKKNSVSHKKHSSSSEKTLHSKYVKGRDRSSCVRKYSESRSSLDYSSDSEQSSVQATQSAQEKEKQGQMERTHNKQEKNRGEEKSKSERECPHSKKRTLKENLSDHLRNGSKPKRKNYAGSKWDSESNSERDVTKNSKNDSHPSSDKEEGEATSDSESEVSEIHIKVKPTTKSSTNTSLPDDNGAWKSSKQRTSTSDSEGSCSNSENNRGKPQKHKHGSKENLKREHTKKVKEKLKGKKDKKHKAPKRKQAFHWQPPLEFGEEEEEEIDDKQVTQESKEKKVSENNETIKDNILKTEKSSEEDLSGKHDTVTVSSDLDQFTKDDSKLSISPTALNTEENVACLQNIQHVEESVPNGVEDVLQTDDNMEICTPDRSSPAKVEETSPLGNARLDTPDINIVLKQDMATEHPQAEVVKQESSMSESKVLGEVGKQDSSSASLASAGESTGKKEVAEKSQINLIDKKWKPLQGVGNLAAPNAATSSAVEVKVLTTVPEMKPQGLRIEIKSKNKVRPGSLFDEVRKTARLNRRPRNQESSSDEQTPSRDDDSQSRSPSRSRSKSETKSRHRTRSVSYSHSRSRSRSSTSSYRSRSYSRSRSRGWYSRGRTRSRSSSYRSYKSHRTSSRSRSRSSSYDPHSRSRSYTYDSYYSRSRSRSRSQRSDSYHRGRSYNRRSRSCRSYGSDSESDRSYSHHRSPSESSRYS

SEQ ID NO: 589 - protein, 841 aa, Homo sapiens
MPLAAYCYLRVVGKGSYGEVTLVKHRRDGKQYVIKKLNLRNASSRERRAAEQEAQLLSQLKHPNIVTYKESWEGGDGLLYIVMGFCEGGDLYRKLKEQKGQLLPENQVVEWFVQIAMALQYLHEKHILHRDLKTQNVFLTRTNIIKVGDLGIARVLENHCDMASTLIGTPYYMSPELFSNKPYNYKSDVWALGCCVYEMATLKHAFNAKDMNSLVYRIIEGKLPPMPRDYSPELAELIRTMLSKRPEERPSVRSILRQPYIKRQISFFLEATKIKTSKNNIKNGDSQSKPFATVVSGEAESNHEVIHPQPLSSEGSQTYIMGEGKCLSQEKPRASGLLKSPASLKAHTCKQDLSNTTELATISSVNIDILPAKGRDSVSDGFVQENQPRYLDASNELGGICSISQVEEEMLQDNTKSSAQPENLIPMWSSDIVTGEKNEPVKPLQPLIKEQKPKDQSLALSPKLECSGTILAHSNLRLLGSSDSPASASRVAGITGVCHHAQDQVAGECIIEKQGRIHPDLQPHNSGSEPSLSRQRRQKRREQTEHRGEKRQVRRDLFAFQESPPRFLPSHPIVGKVDVTSTQKEAENQRRVVTGSVSSSRSSEMSSSKDRPLSARERRRLKQSQEEMSSSGPSVRKASLSVAGPGKPQEEDQPLPARRLSSDCSVTQERKQIHCLSEDELSSSTSSTDKSDGDYGEGKGQTNEINALVQLMTQTLKLDSKESCEDVPVANPVSEFKLHRKYRDTLILHGKVAEEAEEIHFKELPSAIMPGSEKIRRLVEVLRTDVIRGLGVQLLEQVYDLLEEEDEFDREVRLREHMGEKYTTYSVKARQLKFFEENMNF

SEQ ID NO: 590 - protein, 1500 aa, Homo sapiens
MTRILTAFKVVRTLKTGFGFTNVTAHQKWKFSRPGIRLLSVKAQTAHIVLEDGTKMKGYSFGHPSSVAGEVVFNTGLGGYPEAITDPAYKGQILTMANPIIGNGGAPDTTALDELGLSKYLESNGIKVSGLLVLDYSKDYNHWLATKSLGQWLQEEKVPAIYGVDTRMLTKIIRDKGTMLGKIEFEGQPVDFVDPNKQNLIAEVSTKDVKVYGKGNPTKVVAVDCGIKNNVIRLLVKRGAEVHLVPWNHDFTKMEYDGILIAGGPGNPALAEPLIQNVRKILESDRKEPLFGISTGNLITGLAAGAKTYKMSMANRGQNQPVLNITNKQAFITAQNHGYALDNTLPAGWKPLFVNVNDQTNEGIMHESKPFFAVQFHPEVTPGPIDTEYLFDSFFSLIKKGKATTITSVLPKPALVASRVEVSKVLILGSGGLSIGQAGEFDYSGSQAVKAMKEENVKTVLMNPNIASVQTNEVGLKQADTVYFLPITPQFVTEVIKAEQPDGLILGMGGQTALNCGVELFKRGVLKEYGVKVLGTSVESIMATEDRQLFSDKLNEINEKIAPSFAVESIEDALKAADTIGYPVMIRSAYALGGLGSGICPNRETLMDLSTKAFAMTNQILVEKSVTGWKEIEYEVVRDADDNCVTVCNMENVDAMGVHTGDSVVVAPAQTLSNAEFQMLRRTSINVVRHLGIVGECNIQFALHPTSMEYCIIEVNARLSRSSALASKATGYPLAFIAAKIALGIPLPEIKNVVSGKTSACFEPSLDYMVTKIPRWDLDRFHGTSSRIGSSMKSVGEVMAIGRTFEESFQKALRMCHPSIEGFTPRLPMNKEWPSNLDLRKELSEPSSTRIYAIAKAIDDNMSLDEIEKLTYIDKWFLYKMRDILNMEKTLKGLNSESMTEETLKRAKEIGFSDKQISKCLGLTEAQTRELRLKKNIHPWVKQIDTLAAEYPSVTNYLYVTYNGQEHDVNFDDHGMMVLGCGPYHIGSSVEFDWCAVSSIRTLRQLGKKTVVVNCNPETVSTDFDECDKLYFEELSLERILDIYHQEACGGCIISVGGQIPNNLAVPLYKNGVKIMGTSPLQIDRAEDRSIFSAVLDELKVAQAPWKAVNTLNEALEFAKSVDYPCLLRPSYVLSGSAMNVVFSEDEMKKFLEEATRVSQEHPVVLTKFVEGAREVEMDAVGKDGRVISHAISEHVEDAGVHSGDATLMLPTQTISQGAIEKVKDATRKIAKAFAISGPFNVQFLVKGNDVLVIECNLRASRSFPFVSKTLGVDFIDVATKVMIGENVDEKHLPTLDHPIIPADYVAIKAPMFSWPRLRDADPILRCEMASTGEVACFGEGIHTAFLKAMLSTGFKIPQKGILIGIQQSFRPRFLGVAEQLHNEGFKLFATEATSDWLNANNVPATPVAWPSQEGQNPSLSSIRKLIRDGSIDLVINLPNNNTKFVHDNYVIRRTAVDSGIPLLTNFQVTKLFAEAVQKSRKVDSKSLFHYRQYSAGKAA

SEQ ID NO: 591 - protein, 407 aa, Homo sapiens
MNNSGADEIGKLFVGGLDWSTTQETLRSYFSQYGEVVDCVIMKDKTTNQSRGFGFVKFKDPNCVGTVLASRPHTLDGRNIDPKPCTPRGMQPERTRPKEGWQKGPRSDNSKSNKIFVGGIPHNCGETELREYFKKFGVVTEVVMIYDAEKQRPRGFGFITFEDEQSVDQAVNMHFHDIMGKKVEVKRAEPRDSKSQAPGQPGASQWGSRVVPNAANGWAGQPPPTWQQGYGPQGMWVPAGQAIGGYGPPPAGRGAPPPPPPFTSYIVSTPPGGFPPPQGFPQGYGAPPQFSFGYGPPPPPPDQFAPPGVPPPPATPGAAPLAFPPPPSQAAPDMSKPPTAQPDFPYGQYAGYGQDLSGFGQGFSDPSQQPPSYGGPSVPGSGGPPAGGSGFGRGQNHNVQGFHPYRR

SEQ ID NO: 592 - protein, 2071 aa, Homo sapiens
MELAHSLLLNEEALAQITEAKRPVFIFEWLRFLDKVLVAANKTDVKEKQKKLVEQLTGLISSSPGPPTRKLLAKNLAALYSIGDTFTVFQTLDKCNDIIRNKDDTAAYLPTKLAAVACVGAFYEKMGRMLGSAFPETVNNLLKSLKSAESQGRSEILMSLQKVLSGLGGAAASSHRDIYKNARSLLTDRSMAVRCAVAKCLLELQNEAVFMWTAELENIATLCFKALENSNYGVRVAVSKLLGTVMATALMPKQATVMRQNVKRATFDEVLELMATGFLRGGSGFLKSGGEMLKVGGSVNREVRVGVTQAYVVFVTTLGGQWLERSFATFLSHVLDLVSHPRATQTHVEAVYSRRCVSFILRATVGSLLGEKAQIAAAKEICQAIGKQMKAVEAVVNDTSGENKSGAADIAASQHVMVCALQELGSLVQSLNATASPLIQEASIGLLEIVTSVLLHPSMAARLAAAWCLRCVAVALPFQLTPFLDRCAERLNNLKTSPEAVSGYSFAMAALLGGVHQCPLGIPHAKGKMVVSIAEDLLRTAAQNSRLSLQRTQAGWLLLGALMTLGPSVVRYHLPKMLLLWRNVFPRSLKELEAEKARGDSFTWQVTLEGRAGALCAMRSFVAHCPELLTEDVIRKLMTPIECAMTMMSHIPSVMKAHGAHLKASAAMVRLRLYDILALLPPKTYEGSFNALLRELVAEFTLTDNSANTTTSLLRSLCHYDDSVLLGSWLQETDHKSIEDQLQPNSASGSGALEHDPSSIYLRIPAGEAVPGPLPLGVSVIDASVALFGVVFPHVSYKHRLQMLDHFAECVKQAKGVRQQAVQLNIFTAVLSALKGLAENKSTLGPEEVRKSALTLVMGPLDNPNPILRCAAGEALGRMAQVVGEATFIARMAQYSFDKLKSARDVVSRTGHSLALGCLHRYVGGIGSGQHLKTSVSILLALAQDGTSPEVQTWSLHSLALIVDSSGPMYRGYVEPTLSLVLTLLLTVPPSHTEVHQCLGRCLGAIITTVGPELQGNGATTSTIRSSCLVGCAITQDHSDSLVQAAAISCLQQLHMFAPRHVNLSSLVPSLCVHLCSSHLLLRRAAVACLRQLAQREAAEVCEYAMSLAKNTGDKESSSANVSPFAPGVSSRTDIHCRHQGVNITETGLEGLLFGMLDRETDRKLCSDIHDTLGHMLSSLAVEKLSHWLMLCKDVLAASSDMSTATLLSSGKDEEAEKKDEMDDDTMFTTLGEEDKSKPFVAPRWATRVFAADCLCRIINLCENADQAHFDLALARSAKLRNPTNDLLVLHLSDLIRMAFMAATDHSNQLRMAGLQALEDIIKKFASVPEPEFPGHVILEQYQANVGAALRPAFSQDTPSDIIAKACQVCSTWIGSGVVSDLNDLRRVHNLLVSSLDKVQAGKGSSSQLYRESATTMEKLAVLKAWAEVYVVAMNIKKEAESKPKRAIKNTDDDDDDCGTIDELPPDSLITLVQPELPTLSRLWLAALKDYALLTLPAEFSSQLPPDGGAFYTPETIDTARLHYRNSWAPILHAVALWLNSTGFTCSESTEAAAISGLQKRSTSVNLNQASGAVGSAKSLPEINKDRMHLILGVSIQFLCSPRPEEPIEHVTACLQALHTLLDSPYARVHIAEDQLIGVELLSVLHRLLLTWNPSSVQLLVTGVVQQIVRAAQDYLQEKRNTLNEDDMEKEACTVLGEGGDSGGLIPGKSLVFATMELLMFILVRHMPHLSTKVSDSPSHIATKTRLSEESARLVAATVTILSDLPSLCSPAGCMTILPTILFLIARILKDTAIKSADNQVPPPVSAALQGIKSIVTLSMAKTEAGVQKQWTALIRSTLACILEYSQPEDSVPTPDEVSMLTAIALFLWSASNEIIGVQSLQNGCMNRFKNALNSCDPWVQAKCYQLLLSVFQHSNRALSTPYIHSLAPIVVEKLKAVERNRPASNIELLAVQEGIKVLETLVALGEEQNRVQLLALLVPTLISYLLDENSFASASSASKDLHEFALQNLMHIGPLYPHAFKTVMGAAPELKVRLETAVRASQASKAKAAARQPAPAIHSAPTIKLKTSFF

SEQ ID NO: 593 - protein, 281 aa, Homo sapiens
MAVNVYSTSVTSENLSRHDMLAWVNDSLHLNYTKIEQLCSGAAYCQFMDMLFPGCVHLRKVKFQAKLEHEYIHNFKVLQAAFKKMGVDKIIPVEKLVKGKFQDNFEFIQWFKKFFDANYDGKDYNPLLARQGQDVAPPPNPGDQIFNKSKKLIGTAVPQRTSPTGPKNMQTSGRLSNVAPPCILRKNPPSARNGGHETDAQILELNQQLVDLKLTVDGLEKERDFYFSKLRDIELICQEHESENSPVISGIIGILYATEEGFAPPEDDEIEEHQQEDQDEY

SEQ ID NO: 594 - protein, 934 aa, Homo sapiens [sequence omitted]

SEQ ID NO: 595 - protein, 550 aa, Homo sapiens
MTGDKGPQRLSGSSYGSISSPTSPTSPGPQQAPPRETYLSEKIPIPDTKPGTFSLRKLWAFTGPGFLMSIAFLDPGNIESDLQAGAVAGFKLLWVLLWATVLGLLCQRLAARLGVVTGKDLGEVCHLYYPKVPRTVLWLTIELAIVGSDMQEVIGTAIAFNLLSAGRIPLWGGVLITIVDTFFFLFLDNYGLRKLEAFFGLLITIMALTFGYEYVVARPEQGALLRGLFLPSCPGCGHPELLQAVGIVGAIIMPHNIYLHSALVKSREIDRARRADIREANMYFLIEATIALSVSFIINLFVMAVFGQAFYQKTNQAAFNICANSSLHDYAKIFPMNNATVAVDIYQGGVILGCLFGPAALYIWAIGLLAAGQSSTMTGTYAGQFVMEGFLRLRWSRFARVLLTRSCAILPTVLVAVFRDLRDLSGLNDLLNVLQSLLLPFAVLPILTFTSMPTLMQEFANGLLNKVVTSSIMVLVCAINLYFVVSYLPSLPHPAYFGLAALLAAAYLGLSTYLVWTCCLAHGATFLAHSSHHHFLYGLLEEDQKGETSG

SEQ ID NO: 596 - protein, 4563 aa, Homo sapiens
MDPPRPALLALLALPALLLLLLAGARAEEEMLENVSLVCPKDATRFKHLRKYTYNYEAESSSGVPGTADSRSATRINCKVELEVPQLCSFILKTSQCTLKEVYGFNPEGKALLKKTKNSEEFAAAMSRYELKLAIPEGKQVFLYPEKDEPTYILNIKRGIISALLVPPETEEAKQVLFLDTVYGNCSTHFTVKTRKGNVATEISTERDLGQCDRFKPIRTGISPLALIKGMTRPLSTLISSSQSCQYTLDAKRKHVAEAICKEQHLFLPFSYKNKYGMVAQVTQTLKLEDTPKINSRFFGEGTKKMGLAFESTKSTSPPKQAEAVLKTLQELKKLTISEQNIQRANLFNKLVTELRGLSDEAVTSLLPQLIEVSSPITLQALVQCGQPQCSTHILQWLKRVHANPLLIDVVTYLVALIPEPSAQQLREIFNMARDQRSRATLYALSHAVNNYHKTNPTGTQELLDIANYLMEQIQDDCTGDEDYTYLILRVIGNMGQTMEQLTPELKSSILKCVQSTKPSLMIQKAAIQALRKMEPKDKDQEVLLQTFLDDASPGDKRLAAYLMLMRSPSQADINKIVQILPWEQNEQVKNFVASHIANILNSEELDIQDLKKLVKEALKESQLPTVMDFRKFSRNYQLYKSVSLPSLDPASAKIEGNLIFDPNNYLPKESMLKTTLTAFGFASADLIEIGLEGKGFEPTLEALFGKQGFFPDSVNKALYWVNGQVPDGVSKVLVDHFGYTKDDKHEQDMVNGIMLSVEKLIKDLKSKEVPEARAYLRILGEELGFASLHDLQLLGKLLLMGARTLQGIPQMIGEVIRKGSKNDFFLHYIFMENAFELPTGAGLQLQISSSGVIAPGAKAGVKLEVANMQAELVAKPSVSVEFVTNMGIIIPDFARSGVQMNTNFFHESGLEAHVALKAGKLKFIIPSPKRPVKLLSGGNTLHLVSTTKTEVIPPLIENRQSWSVCKQVFPGLNYCTSGAYSNASSTDSASYYPLTGDTRLELELRPTGEIEQYSVSATYELQREDRALVDTLKFVTQAEGAKQTEATMTFKYNRQSMTLSSEVQIPDFDVDLGTILRVNDESTEGKTSYRLTLDIQNKKITEVALMGHLSCDTKEERKIKGVISIPRLQAEARSEILAHWSPAKLLLQMDSSATAYGSTVSKRVAWHYDEEKIEFEWNTGTNVDTKKMTSNFPVDLSDYPKSLHMYANRLLDHRVPQTDMTFRHVGSKLIVAMSSWLQKASGSLPYTQTLQDHLNSLKEFNLQNMGLPDFHIPENLFLKSDGRVKYTLNKNSLKIEIPLPFGGKSSRDLKMLETVRTPALHFKSVGFHLPSREFQVPTFTIPKLYQLQVPLLGVLDLSTNVYSNLYNWSASYSGGNTSTDHFSLRARYHMKADSVVDLLSYNVQGSGETTYDHKNTFTLSCDGSLRHKFLDSNIKFSHVEKLGNNPVSKGLLIFDASSSWGPQMSASVHLDSKKKQHLFVKEVKIDGQFRVSSFYAKGTYGLSCQRDPNTGRLNGESNLRFNSSYLQGTNQITGRYEDGTLSLTSTSDLQSGIIKNTASLKYENYELTLKSDTNGKYKNFATSNKMDMTFSKQNALLRSEYQADYESLRFFSLLSGSLNSHGLELNADILGTDKINSGAHKATLRIGQDGISTSATTNLKCSLLVLENELNAELGLSGASMKLTTNGRFREHNAKFSLDGKAALTELSLGSAYQAMILGVDSKNIFNFKVSQEGLKLSNDMMGSYAEMKFDHTNSLNIAGLSLDFSSKLDNIYSSDKFYKQTVNLQLQPYSLVTTLNSDLKYNALDLTNNGKLRLEPLKLHVAGNLKGAYQNNEIKHIYAISSAALSASYKADTVAKVQGVEFSHRLNTDIAGLASAIDMSTNYNSDSLHFSNVFRSVMAPFTMTIDAHTNGNGKLALWGEHTGQLYSKFLLKAEPLAFTFSHDYKGSTSHHLVSRKSISAALEHKVSALLTPAEQTGTWKLKTQFNNNEYSQDLDAYNTKDKIGVELTGRTLADLTLLDSPIKVPLLLSEPINIIDALEMRDAVEKPQEFTIVAFVKYDKNQDVHSINLPFFETLQEYFERNRQTIIVVLENVQRNLKHINIDQFVRKYRAALGKLPQQANDYLNSFNWERQVSHAKEKLTALTKKYRITENDIQIALDDAKINFNEKLSQLQTYMIQFDQYIKDSYDLHDLKIAIANIIDEIIEKLKSLDEHYHIRVNLVKTIHDLHLFIENIDFNKSGSSTASWIQNVDTKYQIRIQIQEKLQQLKRHIQNIDIQHLAGKLKQHIEAIDVRVLLDQLGTTISFERINDILEHVKHFVINLIGDFEVAEKINAFRAKVHELIERYEVDQQIQVLMDKLVELAHQYKLKETIQKLSNVLQQVKIKDYFEKLVGFIDDAVKKLNELSFKTFIEDVNKFLDMLIKKLKSFDYHQFVDETNDKIREVTQRLNGEIQALELPQKAEALKLFLEETKATVAVYLESLQDTKITLIINWLQEALSSASLAHMKAKFRETLEDTRDRMYQMDIQQELQRYLSLVGQVYSTLVTYISDWWTLAAKNLTDFAEQYSIQDWAKRMKALVEQGFTVPEIKTILGTMPAFEVSLQALQKATFQTPDFIVPLTDLRIPSVQINFKDLKNIKIPSRFSTPEFTILNTFHIPSFTIDFVEMKVKIIRTIDQMLNSELQWPVPDIYLRDLKVEDIPLARITLPDFRLPEIAIPEFIIPTLNLNDFQVPDLHIPEFQLPHISHTIEVPTFGKLYSILKIQSPLFTLDANADIGNGTTSANEAGIAASITAKGESKLEVLNFDFQANAQLSNPKINPLALKESVKFSSKYLRTEHGSEMLFFGNAIEGKSNTVASLHTEKNTLELSNGVIVKINNQLTLDSNTKYFHKLNIPKLDFSSQADLRNEIKTLLKAGHIAWTSSGKGSWKWACPRFSDEGTHESQISFTIEGPLTSFGLSNKINSKHLRVNQNLVYESGSLNFSKLEIQSQVDSQHVGHSVLTAKGMALFGEGKAEFTGRHDAHLNGKVIGTLKNSLFFSAQPFEITASTNNEGNLKVRFPLRLTGKIDFLNNYALFLSPSAQQASWQVSARFNQYKYNQNFSAGNNENIMEAHVGINGEANLDFLNIPLTIPEMRLPYTIITTPPLKDFSLWEKTGLKEFLKTTKQSFDLSVKAQYKKNKHRHSITNPLAVLCEFISQSIKSFDRHFEKNRNNALDFVTKSYNETKIKFDKYKAEKSHDELPRTFQIPGYTVPVVNVEVSPFTIEMSAFGYVFPKAVSMPSFSILGSDVRVPSYTLILPSLELPVLHVPRNLKLSLPDFKELCTISHIFIPAMGNITYDFSFKSSVITLNTNAELFNQSDIVAHLLSSSSSVIDALQYKLEGTTRLTRKRGLKLATALSLSNKFVEGSHNSTVSLTTKNMEVSVATTTKAQIPILRMNFKQELNGNTKSKPTVSSSMEFKYDFNSSMLYSTAKGAVDHKLSLESLTSYFSIESSTKGDVKGSVLSREYSGTIASEANTYLNSKSTRSSVKLQGTSKIDDIWNLEVKENFAGEATLQRIYSLWEHSTKNHLQLEGLFFTNGEHTSKATLELSPWQMSALVQVHASQPSSFHDFPDLGQEVALNANTKNQKIRWKNEVRIHSGSFQSQVELSNDQEKAHLDIAGSLEGHLRFLKNIILPVYDKSLWDFLKLDVTTSIGRRQHLRVSTAFVYTKNPNGYSFSIPVKVLADKFIIPGLKLNDLNSVLVMPTFHVPFTDLQVPSCKLDFREIQIYKKLRTSSFALNLPTLPEVKFPEVDVLTKYSQPEDSLIPFFEITVPESQLTVSQFTLPKSVSDGIAALDLNAVANKIADFELPTIIVPEQTIEIPSIKFSVPAGIVIPSFQALTARFEVDSPVYNATWSASLKNKADYVETVLDSTCSSTVQFLEYELNVLGTHKIEDGTLASKTKGTFAHRDFSAEYEEDGKYEGLQEWEGKAHLNIKSPAFTDLHLRYQKDKKGISTSAASPAVGTVGMDMDEDDDFSKWNFYYSPQSSPDKKLTIFKTELRVRESDEETQIKVNWEEEAASGLLTSLKDNVPKATGVLYDYVNKYHWEHTGLTLREVSSKLRRNLQNNAEWVYQGAIRQIDDIDVRFQKAASGTTGTYQEWKDKAQNLYQELLTQEGQASFQGLKDNVFDGLVRVTQEFHMKVKHLIDSLIDFLNFPRFQFPGKPGIYTREELCTMFIREVGTVLSQVYSKVHNGSEILFSYFQDLVITLPFELRKHKLIDVISMYRELLKDLSKEAQEVFKAIQSLKTTEVLRNLQDLLQFIFQLIEDNIKQLKEMKFTYLINYIQDEINTIFSDYIPYVFKLLKENLCLNLHKFNEFIQNELQEASQELQQIHQYIMALREEYFDPSIVGWTVKYYELEEKIVSLIKNLLVALKDFHSEYIVSASNFTSQLSSQVEQFLHRNIQEYLSILTDPDGKGKEKIAELSATAQEIIKSQAIATKKIISDYHQQFRYKLQDFSDQLSDYYEKFIAESKRLIDLSIQNYHTFLIYITELLKKLQSTTVMNPYMKLAPGELTIIL

SEQ ID NO: 597 - protein, 513 aa, Homo sapiens
MREGACKLLAACSQREQALEATKSLLVCNSRILSYMGELQRRKEAQVLGKTSRRPSDSGPPAERSPCRGRVCISDLRIPLMWKDTEYFKNKGDLHRWAVFLLLQLGEHIQDTEMILVDRTLTDISFQSNVLFAEAGPDFELRLELYGACVEEEGALTGGPKRLATKLSSSLGRSSGRRVRASLDSAGGSGSSPILLPTPVVGGPRYHLLAHTTLTLAAVQDGFRTHDLTLASHEENPAWLPLYGSVCCRLAAQPLCMTQPTASGTLRVQQAGEMQNWAQVHGVLKGTNLFCYRQPEDADTGEEPLLTIAVNKETRVRAGELDQALGRPFTLSISNQYGDDEVTHTLQTESREALQSWMEALWQLFFDMSQWKQCCDEIMKIETPAPRKPPQALAKQGSLYHEMAIEPLDDIAAVTDILTQREGARLETPPPWLAMFTDQPALPNPCSPASVAPAPDWTHPLPWGRPRTFSLDAVPPDHSPRARSVAPLPPQRSPRTRGLCSKGQPRTWLQSPV

SEQ ID NO: 598 - protein, 388 aa, Homo sapiens
MEPSPAAGGLETTRLVSPRDRGGAGGSLRLKSLFTEPSEPLPEESKPVEMPFHHCHRDPLPPPGLTPERLHARRQLYAACAVCFVFMAGEVVGGYLAHSLAIMTDAAHLLADVGSMMGSLFSLWLSTRPATRTMTFGWHRSETLGALASVVSLWMVTGILLYLAFVRLLHSDYHIEGGAMLLTASIAVCANLLMAFVLHQAGPPHSHGSRGAEYAPLEEGPEEPLPLGNTSVRAAFVHVLGDLLQSFGVLAASILIYFKPQYKAADPISTFLFSICALGSTAPTLRDVLRILMEGTPRNVGFEPVRDTLLSVPGVRATHELHLWALTLTYHVASAHLAIDSTADPEAVLAEASSRLYSRFGFSSCTLQVEQYQPEMAQCLRCQEPPQA

SEQ ID NO: 599 - protein, 523 aa, Homo sapiens
MAAVAVAVREDSGSGMKAELPPGPGAVGREMTKEEKLQLRKEKKQQKKKRKEEKGAEPETGSAVSAAQCQVGPTRELPESGIQLGTPREKVPAGRSKAELRAERRAKQEAERALKQARKGEQGGPPPKASPSTAGETPSGVKRLPEYPQVDDLLLRRLVKKPERQQVPTRKDYGSKVSLFSHLPQYSRQNSLTQFMSIPSSVIHPAMVRLGLQYSQGLVSGSNARCIALLRALQQVIQDYTTPPNEELSRDLVNKLKPYMSFLTQCRPLSASMHNAIKFLNKEITSVGSSKREEEAKSELRAAIDRYVQEKIVLAAQAISRFAYQKISNGDVILVYGCSSLVSRILQEAWTEGRRFRVVVVDSRPWLEGRHTLRSLVHAGVPASYLLIPAASYVLPEVSKVLLGAHALLANGSVMSRVGTAQLALVARAHNVPVLVCCETYKFCERVQTDAFVSNELDDPDDLQCKRGEHVALANWQNHASLRLLNLVYDVTPPELVDLVITELGMIPCSSVPVVLRVKSSDQ

SEQ ID NO: 600 - protein, 535 aa, Homo sapiens
MSEGESQTVLSSGSDPKVESSSSAPGLTSVSPPVTSTTSAASPEEEEESEDESEILEESPCGRWQKRREEVNQRNVPGIDSAYLAMDTEEGVEVVWNEVQFSERKNYKLQEEKVRAVFDNLIQLEHLNIVKFHKYWADIKENKARVIFITEYMSSGSLKQFLKKTKKNHKTMNEKAWKRWCTQILSALSYLHSCDPPIIHGNLTCDTIFIQHNGLIKIGSVAPDTINNHVKTCREEQKNLHFFAPEYGEVTNVTTAVDIYSFGMCALEMAVLEIQGNGESSYVPQEAISSAIQLLEDPLQREFIQKCLQSEPARRPTARELLFHPALFEVPSLKLLAAHCIVGHQHMIPENALEEITKNMDTSAVLAEIPAGPGREPVQTLYSQSPALELDKFLEDVRNGIYPLTAFGLPRPQQPQQEEVTSPVVPPSVKTPTPEPAEVETRKVVLMQCNIESVEEGVKHHLTLLLKLEDKLNRHLSCDLMPNENIPELAAELVQLGFISEADQSRLTSLLEETLNKFNFARNSTLNSAAVTVSS

SEQ ID NO: 601 - protein, 614 aa, Homo sapiens
MAWEARREPGPRRAAVRETVMLLLCLGVPTGRPYNVDTESALLYQGPHNTLFGYSVVLHSHGANRWLLVGAPTANWLANASVINPGAIYRCRIGKNPGQTCEQLQLGSPNGEPCGKTCLEERDNQWLGVTLSRQPGENGSIVTCGHRWKNIFYIKNENKLPTGGCYGVPPDLRTELSKRIAPCYQDYVKKFGENFASCQAGISSFYTKDLIVMGAPGSSYWTGSLFVYNITTNKYKAFLDKQNQVKFGSYLGYSVGAGHFRSQHTTEVVGGAPQHEQIGKAYIFSIDEKELNILHEMKGKKLGSYFGASVCAVDLNADGFSDLLVGAPMQSTIREEGRVFVYINSGSGAVMNAMETNLVGSDKYAARFGESIVNLGDIDNDGFEDVAIGAPQEDDLQGAIYIYNGRADGISSTFSQRIEGLQISKSLSMFGQSISGQIDADNNGYVDVAVGAFRSDSAVLLRTRPVVIVDASLSHPESVNRTKFDCVENGWPSVCIDLTLCFSYKGKEVPGYIVLFYNMSLDVNRKAESPPRFYFSSNGTSDVITGSIQVSSREANCRTHQAFMRKDVRDILTPIQIEAAYHLGPHVISKRSTEEFPPLQPILQQKKEKDIMKK

SEQ ID NO: 602 - protein, 2303 aa, Homo sapiens
MASSVAPYEQLVRQVEALKAENSHLRQELRDNSSHLSKLETETSGMKEVLKHLQGKLEQEARVLVSSGQTEVLEQLKALQMDITSLYNLKFQPPTLGPEPAARTPEGSPVHGSGPSKDSFGELSRATIRLLEELDRERCFLLNEIEKEEKEKLWYYSQLQGLSKRLDELPHVETQFSMQMDLIRQQLEFEAQHIRSLMEERFGTSDEMVQRAQIRASRLEQIDKELLEAQDRVQQTEPQALLAVKSVPVDEDPETEVPTHPEDGTPQPGNSKVEVVFWLLSMLATRDQEDTARTLLAMSSSPESCVAMRRSGCLPLLLQILHGTEAAAGGRAGAPGAPGAKDARMRANAALHNIVFSQPDQGLARKEMRVLHVLEQIRAYCETCWDWLQARDGGPEGGGAGSAPIPIEPQICQATCAVMKLSFDEEYRRAMNELGGLQAVAELLQVDYEMHKMTRDPLNLALRRYAGMTLTNLTFGDVANKATLCARRGCMEAIVAQLASDSEELHQVVSSILRNLSWRADINSKKVLREAGSVTALVQCVLRATKESTLKSVLSALWNLSAHSTENKAAICQVDGALGFLVSTLTYKCQSNSLAIIESGGGILRNVSSLVATREDYRQVLRDHNCLQTLLQHLTSHSLTIVSNACGTLWNLSARSARDQELLWDLGAVGMLRNLVHSKHKMIAMGSAAALRNLLAHRPAKHQAAATAVSPGSCVPSLYVRKQRALEAELDARHLAQALEHLEKQGPPAAEAATKKPLPPLRHLDGLAQDYASDSGCFDDDDAPSSLAAAAATGEPASPAALSLFLGSPFLQGQALARTPPTRRGGKEAEKDTSGEAAVAAKAKAKLALAVARIDQLVEDISALHTSSDDSFSLSSGDPGQEAPREGRAQSCSPCRGPEGGRREAGSRAHPLLRLKAAHASLSNDSLNSGSASDGYCPREHMLPCPLAALASRREDPRCGQPRPSRLDLDLPGCQAEPPAREATSADARVRTIKLSPTYQHVPLLEGASRAGAEPLAGPGISPGARKQAWLPADHLSKVPEKLAAAPLSVASKALQKLAAQEGPLSLSRCSSLSSLSSAGRPGPSEGGDLDDSDSSLEGLEEAGPSEAELDSTWRAPGATSLPVAIPAPRRNRGRGLGVEDATPSSSSENYVQETPLVLSRCSSVSSLGSFESPSIASSIPSEPCSGQGSGTISPSELPDSPGQTMPPSRSKTPPLAPAPQGPPEATQFSLQWESYVKRFLDIADCRERCRLPSELDAGSVRFTVEKPDENFSCASSLSALALHEHYVQQDVELRLLPSACPERGGGAGGAGLHFAGHRRREEGPAPTGSRPRGAADQELELLRECLGAAVPARLRKVASALVPGRRALPVPVYMLVPAPAPAQEDDSCTDSAEGTPVNFSSAASLSDETLQGPPRDQPGGPAGRQRPTGRPTSARQAMGHRHKAGGAGRSAEQSRGAGKNRAGLELPLGRPPSAPADKDGSKPGRTRGDGALQSLCLTTPTEEAVYCFYGNDSDEEPPAAAPTPTHRRTSAIPRAFTRERPQGRKEAPAPSKAAPAAPPPARTQPSLIADETPPCYSLSSSASSLSEPEPSEPPAVHPRGREPAVTKDPGPGGGRDSSPSPRAAEELLQRCISSALPRRRPPVSGLRRRKPRATRLDERPAEGSRERGEEAAGSDRASDLDSVEWRAIQEGANSIVTWLHQAAAATREASSESDSILSFVSGLSVGSTLQPPKHRKGRQAEGEMGSARRPEKRGAASVKTSGSPRSPAGPEKPRGTQKTTPGVPAVLRGRTVIYVPSPAPRAQPKGTPGPRATPRKVAPPCLAQPAAPAKVPSPGQQRSRSLHRPAKTSELATLSQPPRSATPPARLAKTPSSSSSQTSPASQPLPRKRPPVTQAAGALPGPGASPVPKTPARTLLAKQHKTQRSPVRIPFMQRPARRGPPPLARAVPEPGPRGRAGTEAGPGARGGRLGLVRVASALSSGSESSDRSGFRRQLTFIKESPGLRRRRSELSSAESAASAPQGASPRRGRPALPAVFLCSSRCEELRAAPRQGPAPARQRPPAARPSPGERPARRTTSESPSRLPVRAPAARPETVKRYASLPHISVARRPDGAVPAAPASADAARRSSDGEPRPLPRVAAPGTTWRRIRDEDVPHILRSTLPATALPLRGSTPEDAPAGPPPRKTSDAVVQTEEVAAPKTNSSTSPSLETREPPGAPAGGQLSLLGSDVDGPSLAKAPISAPFVHEGLGVAVGGFPASRHGSPSRSARVPPFNYVPSPMVVAATTDSAAEKAPATASATLLE

SEQ ID NO: 603 - protein, 269 aa, Homo sapiens
MARASSGNGSEEAWGALRAPQQQLRELCPGVNNQPYLCESGHCCGETGCCTYYYELWWFWLLWTVLILFSCCCAFRHRRAKLRLQQQQRQREINLLAYHGACHGAGPFPTGSLLDLRFLSTFKPPAYEDVVHRPGTPPPPYTVAPGRPLTASSEQTCCSSSSSCPAHFEGTNVEGVSSHQSAPPHQEGEPGAGVTPASTPPSCRYRRLTGDSGIELCPCPASGEGEPVKEVRVSATLPDLEDYSPCALPPESVPQIFPMGLSSSEGDIP

SEQ ID NO: 604 - protein, 481 aa, Homo sapiens [sequence omitted]

SEQ ID NO: 605 - protein, 430 aa, Homo sapiens [sequence omitted]

SEQ ID NO: 606 - protein, 152 aa, Homo sapiens
MRLPLSHSPEHVEMALLSNILAAYSFVSENPERAALYFVSGVCIGLVLTLAALVIRISCHTDCRRRPGKKFLQDRESSSDSSDSEDGSEDTVSDLSVRRHRRFERTLNKNVFTSAEELERAQRLEERERIIREIWMNGQPEVPGTRSLNRYY

SEQ ID NO: 607 - protein, 399 aa, Homo sapiens
MAQRAFPNPYADYNKSLAEGYFDAAGRLTPEFSQRLTNKIRELLQQMERGLKSADPRDGTGYTGWAGIAVLYLHLYDVFGDPAYLQLAHGYVKQSLNCLTKRSITFLCGDAGPLAVAAVLYHKMNNEKQAEDCITRLIHLNKIDPHAPNEMLYGRIGYIYALLFVNKNFGVEKIPQSHIQQICETILTSGENLARKRNFTAKSPLMYEWYQEYYVGAAHGLAGIYYYLMQPSLQVSQGKLHSLVKPSVDYVCQLKFPSGNYPPCIGDNRDLLVHWCHGAPGVIYMLIQAYKVFREEKYLCDAYQCADVIWQYGLLKKGYGLCHGSAGNAYAFLTLYNLTQDMKYLYRACKFAEWCLEYGEHGCRTPDTPFSLFEGMAGTIYFLADLLVPTKARFPAFEL

SEQ ID NO: 608 - protein, 166 aa, Homo sapiens
MAQTSSYFMLISCLMFLSQSQGQEAQTELPQARISCPEGTNAYRSYCYYFNEDRETWVDADLYCQNMNSGNLVSVLTQAEGAFVASLIKESGTDDFNVWIGLHDPKKNRRWHWSSGSLVSYKSWGIGAPSSVNPGYCVSLTSSTGFQKWKDVPCEDKFSFVCKFKN

SEQ ID NO: 609 - protein, 375 aa, Homo sapiens
MAVTEASLLRQCPLLLPQNRSKTVYEGFISAQGRDFHLRIVLPEDLQLKNARLLCSWQLRTILSGYHRIVQQRMQHSPDLMSFMMELKMLLEVALKNRQELYALPPPPQFYSSLIEEIGTLGWDKLVYADTCFSTIKLKAEDASGREHLITLKLKAKYPAESPDYFVDFPVPFCASWTPQSSLISIYSQFLAAIESLKAFWDVMDEIDEKTWVLEPEKPPRSATARRIALGNNVSINIEVDPRHPTMLPECFFLGADHVVKPLGIKLSRNIHLWDPENSVLQNLKDVLEIDFPARAILEKSDFTMDCGICYAYQLDGTIPDQVCDNSQCGQPFHQICLYEWLRGLLTSRQSFNIIFGECPYCSKPITLKMSGRKH

SEQ ID NO: 610 - protein, 325 aa, Homo sapiens
MLPRVGCPALPLPPPPLLPLLLLLLGASGGGGGARAEVLFRCPPCTPERLAACGPPPVAPPAAVAAVAGGARMPCAELVREPGCGCCSVCARLEGEACGVYTPRCGQGLRCYPHPGSELPLQALVMGEGTCEKRRDAEYGASPEQVADNGDDHSEGGLVENHVDSTMNMLGGGGSAGRKPLKSGMKELAVFREKVTEQHRQMGKGGKHHLGLEEPKKLRPPPARTPCQQELDQVLERISTMRLPDERGPLEHLYSLHIPNCDKHGLYNLKQCKMSLNGQRGECWCVNPNTGKLIQGAPTIRGDPECHLFYNEQQEARGVHTQRMQ

SEQ ID NO: 611 - protein, 360 aa, Homo sapiens
MDSSNCKVIAPLLSQRYRRMVTKDGHSTLQMDGAQRGLAYLRDAWGILMDMRWRWMMLVFSASFVVHWLVFAVLWYVLAEMNGDLELDHDAPPENHTICVKYITSFTAAFSFSLETQLTIGYGTMFPSGDCPSAIALLAIQMLLGLMLEAFITGAFVAKIARPKNRAFSIRFTDTAVVAHMDGKPNLIFQVANTRPSPLTSVRVSAVLYQERENGKLYQTSVDFHLDGISSDECPFFIFPLTYYHSITPSSPLATLLQHENPSHFELVVFLSAMQEGTGEICQRRTSYLPSEIMLHHCFASLLTRGSKGEYQIKMENFDKTVPEFPTPLVSKSPNRTDLDIHINGQSIDNFQISETGLTE

SEQ ID NO: 612 - protein, 758 aa, Homo sapiens
MAVSAGSARTSPSSDKVQKDKAELISGPRQDSRIGKLLGFEWTDLSSWRRLVTLLNRPTDPASLAVFRFLFGFLMVLDIPQERGLSSLDRKYLDGLDVCRFPLLDALRPLPLDWMYLVYTIMFLGALGMMLGLCYRISCVLFLLPYWYVFLLDKTSWNNHSYLYGLLAFQLTFMDANHYWSVDGLLNAHRRNAHVPLWNYAVLRGQIFIVYFIAGVKKLDADWVEGYSMEYLSRHWLFSPFKLLLSEELTSLLVVHWGGLLLDLSAGFLLFFDVSRSIGLFFVSYFHCMNSQLFSIGMFSYVMLASSPLFCSPEWPRKLVSYCPRRLQQLLPLKAAPQPSVSCVYKRSRGKSGQKPGLRHQLGAAFTLLYLLEQLFLPYSHFLTQGYNNWTNGLYGYSWDMMVHSRSHQHVKITYRDGRTGELGYLNPGVFTQSRRWKDHADMLKQYATCLSRLLPKYNVTEPQIYFDIWVSINDRFQQRIFDPRVDIVQAAWSPFQRTSWVQPLLMDLSPWRAKLQEIKSSLDNHTEVVFIADFPGLHLENFVSEDLGNTSIQLLQGEVTVELVAEQKNQTLREGEKMQLPAGEYHKVYTTSPSPSCYMYVYVNTTELALEQDLAYLQELKEKVENGSETGPLPPELQPLLEGEVKGGPEPTPLVQTFLRRQQRLQEIERRRNTPFHERFFRFLLRKLYVFRRSFLMTCISLRNLILGRPSLEQLAQEVTYANLRPFEAVGELNPSNTDSSHSNPPESNPDPVHSEF

SEQ ID NO: 613 - protein, 556 aa, Homo sapiens
MGFWILAILTILMYSTAAKFSKQSWGLENEALIVRCPRQGKPSYTVDWYYSQTNKSIPTQERNRVFASGQLLKFLPAAVADSGIYTCIVRSPTFNRTGYANVTIYKKQSDCNVPDYLMYSTVSGSEKNSKIYCPTIDLYNWTAPLEWFKNCQALQGSRYRAHKSFLVIDNVMTEDAGDYTCKFIHNENGANYSVTATRSFTVKDEQGFSLFPVIGAPAQNEIKEVEIGKNANLTCSACFGKGTQFLAAVLWQLNGTKITDFGEPRIQQEEGQNQSFSNGLACLDMVLRIADVKEEDLLLQYDCLALNLHGLRRHTVRLSRKNPIDHHSIYCIIAVCSVFLMLINVLVIILKMFWIEATLLWRDIAKPYKTRNDGKLYDAYVVYPRNYKSSTDGASRVEHFVHQILPDVLENKCGYTLCIYGRDMLPGEDVVTAVETNIRKSRRHIFILTPQITHNKEFAYEQEVALHCALIQNDAKVILIEMEALSELDMLQAEALQDSLQHLMKVQGTIKWREDHIANKRSLNSKFWKHVRYQMPVPSKIPRKASSLTPLAAQKQ

SEQ ID NO: 614 - protein, 541 aa, Homo sapiens
MNCRELPLTLWVLISVSTAESCTSRPHITVVEGEPFYLKHCSCSLAHEIETTTKSWYKSSGSQEHVELNPRSSSRIALHDCVLEFWPVELNDTGSYFFQMKNYTQKWKLNVIRRNKHSCFTERQVTSKIVEVKKFFQITCENSYYQTLVNSTSLYKNCKKLLLENNKNPTIKKNAEFEDQGYYSCVHFLHHNGKLFNITKTFNITIVEDRSNIVPVLLGPKLNHVAVELGKNVRLNCSALLNEEDVIYWMFGEENGSDPNIHEEKEMRIMTPEGKWHASKVLRIENIGESNLNVLYNCTVASTGGTDTKSFILVRKADMADIPGHVFTRGMIIAVLILVAVVCLVTVCVIYRVDLVLFYRHLTRRDETLTDGKTYDAFVSYLKECRPENGEEHTFAVEILPRVLEKHFGYKLCIFERDVVPGGAVVDEIHSLIEKSRRLIIVLSKSYMSNEVRYELESGLHEALVERKIKIILIEFTPVTDFTFLPQSLKLLKSHRVLKWKADKSLSYNSRFWKNLLYLMPAKTVKPGRDEPEVLPVLSES

SEQ ID NO: 615 - protein, 812 aa, Homo sapiens
MEPLGNWRSLRAPLPPMLLLLLLQVAGPVGALAETLLNAPRAMGTSSSPPSPASVVAPGTTLFEESRLPVFTLDYPHVQIPFEITLWILLASLAKIGFHLYHKLPTIVPESCLLIMVGLLLGGIIFGVDEKSPPAMKTDVFFLYLLPPIVLDAGYFMPTRPFFENIGTIFWYAVVGTLWNSIGIGVSLFGICQIEAFGLSDITLLQNLLFGSLISAVDPVAVLAVFENIHVNEQLYILVFGESLLNDAVTVVLYNLFKSFCQMKTIETIDVFAGIANFFVVGIGGVLIGIFLGFIAAFTTRFTHNIRVIEPLFVFLYSYLSYITAEMFHLSGIMAITACAMTMNKYVEENVSQKSYTTIKYFMKMLSSVSETLIFIFMGVSTVGKNHEWNWAFVCFTLAFCLMWRALGVFVLTQVINRFRTIPLTFKDQFIIAYGGLRGAICFALVFLLPAAVFPRKKLFITAAIVVIFFTVFILGITIRPLVEFLDVKRSNKKQQAVSEEIYCRLFDHVKTGIEDVCGHWGHNFWRDKFKKFDDKYLRKLLIRENQPKSSIVSLYKKLEIKHAIEMAETGMISTVPTFASLNDCREEKIRKVTSSETDEIRELLSRNLYQIRQRTLSYNRHSLTADTSERQAKEILIRRRHSLRESIRKDSSLNREHRASTSTSRYLSLPKNTKLPEKLQKRRTISIADGNSSDSDADAGTTVLNLQPRARRFLPEQFSKKSPQSYKMEWKNEVDVDSGRDMPSTPPTPHSREKGTQTSGLLQQPLLSKDQSGSEREDSLTEGIPPKPPPRLVWRASEPGSRKARFGSEKP

SEQ ID NO: 616 - protein, 360 aa, Homo sapiens
MAAERGAGQQQSQEMMEVDRRVESEESGDEEGKKHSSGIVADLSEQSLKDGEERGEEDPEEEHELPVDMETINLDRDAEDVDLNHYRIGKIEGFEVLKKVKTLCLRQNLIKCIENLEELQSLRELDLYDNQIKKIENLEALTELEILDISFNLLRNIEGVDKLTRLKKLFLVNNKISKIENLSNLHQLQMLELGSNRIRAIENIDTLTNLESLFLGKNKITKLQNLDALTNLTVLSMQSNRLTKIEGLQNLVNLRELYLSHNGIEVIEGLENNNKLTMLDIASNRIKKIENISHLTELQEFWMNDNLLESWSDLDELKGARSLETVYLERNPLQKDPQYRRKVMLALPSVRQIDATFVRF

SEQ ID NO: 617 - protein, 1323 aa, Homo sapiens
MEDGGLTAFEEDQRCLSQSLPLPVSAEGPAAQTTAEPSRSFSSAHRHLSRRNGLSRLCQSRTALSEDRWSSYCLSSLAAQNICTSKLHCPAAPEHTDPSEPRGSVSCCSLLRGLSSGWSSPLLPAPVCNPNKAIFTVDAKTTEILVANDKACGLLGYSSQDLIGQKLTQFFLRSDSDVVEALSEEHMEADGHAAVVFGTVVDIISRSGEKIPVSVWMKRMRQERRLCCVVVLEPVERVSTWVAFQSDGTVTSCDSLFAHLHGYVSGEDVAGQHITDLIPSVQLPPSGQHIPKNLKIQRSVGRARDGTTFPLSLKLKSQPSSEEATTGEAAPVSGYRASVWVFCTISGLITLLPDGTIHGINHSFALTLFGYGKTELLGKNITFLIPGFYSYMDLAYNSSLQLPDLASCLDVGNESGCGERTLDPWQGQDPAEGGQDPRINVVLAGGHVVPRDEIRKLMESQDIFTGTQTELIAGGQLLSCLSPQPAPGVDNVPEGSLPVHGEQALPKDQQITALGREEPVAIESPGQDLLGESRSEPVDVKPFASCEDSEAPVPAEDGGSDAGMCGLCQKAQLERMGVSGPSGSDLWAGAAVAKPQAKGQLAGGSLLMHCPCYGSEWGLWWRSQDLAPSPSGMAGLSFGTPTLDEPWLGVENDREELQTCLIKEQLSQLSLAGALDVPHAELVPTECQAVTAPVSSCDLGGRDLCGGCTGSSSACYALATDLPGGLEAVEAQEVDVNSFSWNLKELFFSDQTDQTSSNCSCATSELRETPSSLAVGSDPDVGSLQEQGSCVLDDRELLLLTGTCVDLGQGRRFRESCVGHDPTEPLEVCLVSSEHYAASDRESPGHVPSTLDAGPEDTCPSAEEPRLNVQVTSTPVIVMRGAAGLQREIQEGAYSGSCYHRDGLRLSIQFEVRRVELQGPTPLFCCWLVKDLLHSQRDSAARTRLFLASLPGSTHSTAAELTGPSLVEVLRARPWFEEPPKAVELEGLAACEGEYSQKYSTMSPLGSGAFGFVWTAVDKEKNKEVVVKFIKKEKVLEDCWIEDPKLGKVTLEIAILSRVEHANIIKVLDIFENQGFFQLVMEKHGSGLDLFAFIDRHPRLDEPLASYIFRQLVSAVGYLRLKDIIHRDIKDENIVIAEDFTIKLIDFGSAAYLERGKLFYTFCGTIEYCAPEVLMGNPYRGPELEMWSLGVTLYTLVFEENPFCELEETVEAAIHPPYLVSKELMSLVSGLLQPVPERRTTLEKLVTDPWVTQPVNLADYTWEEVFRVNKPESGVLSAASLEMGNRSLSDVAQAQELCGGPVPGEAPNGQGCLHPGDPRLLTS

SEQ ID NO: 618 - protein, 1949 aa, Homo sapiens
MGNSYAGQLKTTRFEEVLHNSIEASLRSNNLVPRPIFSQLYLEAEQQLAALEGGSRVDNEEEEEEGEGGLETNGPPNPFQLHPLPEGCCTTDGFCQAGKDLRLVSISNEPMDVPAGFLLVGVKSPSLPDHLLVCAVDKRFLPDDNGHNALLGFSGNCVGCGKKGFCYFTEFSNHINLKLTTQPKKQKHLKYYLVRNAQGTLTKGPLICWKGSEFRSRQIPASTCSSSLFPALESTAAFPSEPVPGTNPSILMGAQQAGPASDHPSLNAAMGPAVFNGKDSPKCQQLAKNNLLALPRPSALGILSNSGPPKKRHKGWSPESPSAPDGGCPQGGGNRAKYESAGMSCVPQVGLVGPASVTFPVVASGEPVSVPDNLLKICKAKPVIFKGHGNFPYLCGNLNDVVVSPLLYTCYQNSQSVSRAYEQYGASAIQPISEEMQLLLTVYYLVQLAADQVPLMEDLEQIFLRSWRESHLTEIRQYQQAPPQPFPPAPSAAAPVTSAQLPWLASLAASSCNDSVHVIECAYSLAEGLSEMFRLLVEGKLAKTNYVVIICACRSAAIDSCIAVTGKYQARILSESLLTPAEYQKEVNYELVTGKVDSLGAFFSTLCPEGDIDILLDKFHQENQGHISSSLAASSVTKAASLDVSGTPVCTSYNLEPHSIRPFQLAVAQKLLSHVCSIADSSTQNLDLGSFEKVDFLICIPPSEVTYQQTLLHVWHSGVLLELGLKKEHMTKQRVEQYVLKLDTEAQTKFKAFLQNSFQNPHTLFVLIHDHAHWDLVSSTVHNLYSQSDPSVGLVDRLLNCREVKEAPNIVTLHVTSFPYALQTQHTLISPYNEIHWPASCSNGVDLYHENKKYFGLSEFIESTLSGHSLPLLRYDSSFEAMVTALGKRFPRLHSAVIRTFVLVQHYAAALMAVSGLPQMKNYTSVETLEITQNLLNSPKQCPCGHGLMVLLRVPCSPLAVVAYERLAHVRARLALEEHFEIILGSPSSGVTVGKHFVKQLRMWQKIEDVEWRPQTYLELEGLPCILIFSGMDPHGESLPRSLRYCDLRLINSSCLVRTALEQELGLAAYFVSNEVPLEKGARNEALESDAEKLSSTDNEDEELGTEGSTSEKRSPMKRERSRSHDSASSSLSSKASGSALGGESSAQPTALPQGEHARSPQPRGPAEEGRAPGEKQRPRASQGPPSAISRHSPGPTPQPDCSLRTGQRSVQVSVTSSCSQLSSSSGSSSSSVAPAAGTWVLQASQCSLTKACRQPPIVFLPKLVYDMVVSTDSSGLPKAASLLPSPSVMWASSFRPLLSKTMTSTEQSLYYRQWTVPRPSHMDYGNRAEGRVDGFHPRRLLLSGPPQIGKTGAYLQFLSVLSRMLVRLTEVDVYDEEEININLREESDWHYLQLSDPWPDLELFKKLPFDYIIHDPKYEDASLICSHYQGIKSEDRGMSRKPEDLYVRRQTARMRLSKYAAYNTYHHCEQCHQYMGFHPRYQLYESTLHAFAFSYSMLGEEIQLHFIIPKSKEHHFVFSQPGGQLESMRLPLVTDKSHEYIKSPTFTPTTGRHEHGLFNLYHAMDGASHLHVLVVKEYEMAIYKKYWPNHIMLVLPSIFNSAGVGAAHFLIKELSYHNLELERNRQEELGIKPQDIWPFIVISDDSCVMWNVVDVNSAGERSREFSWSERNVSLKHIMQHIEAAPDIMHYALLGLRKWSSKTRASEVQEPFSRCHVHNFIILNVDLTQNVQYNQNRFLCDDVDFNLRVHSAGLLLCRFNRFSVMKKQIVVGGHRSFHITSKVSDNSAAVVPAQYICAPDSKHTFLAAPAQLLLEKFLQHHSHLFFPLSLKNHDHPVLSVDCYLNLGSQISVCYVSSRPHSLNISCSDLLFSGLLLYLCDSFVGASFLKKFHFLKGATLCVICQDRSSLRQTVVRLELEDEWQFRLRDEFQTANAREDRPLFFLTGRHI

SEQ ID NO: 619 - protein, 1054 aa, Homo sapiens
MAAVKEPLEFHAKRPWRPEEAVEDPDEEDEDNTSEAENGFSLEEVLRLGGTKQDYLMLATLDENEEVIDGGKKGAIDDLQQGELEAFIQNLNLAKYTKASLVEEDEPAEKENSSKKEVKIPKINNKNTAESQRTSVNKVKNKNRPEPHSDENGSTTPKVKKDKQNIFEFFERQTLLLRPGGKWYDLEYSNEYSLKPQPQDVVSKYKTLAQKLYQHEINLFKSKTNSQKGASSTWMKAIVSSGTLGDRMAAMILLIQDDAVHTLQFVETLVNLVKKKGSKQQCLMALDTFKELLITDLLPDNRKLRIFSQRPFDKLEQLSSGNKDSRDRRLILWYFEHQLKHLVAEFVQVLETLSHDTLVTTKTRALTVAHELLCNKPEEEKALLVQVVNKLGDPQNRIATKASHLLETLLCKHPNMKGVVSGEVERLLFRSNISSKAQYYAICFLNQMALSHEESELANKLITVYFCFFRTCVKKKDVESKMLSALLTGVNRAYPYSQTGDDKVREQIDTLFKVLHIVNFNTSVQALMLLFQVMNSQQTISDRYYTALYRKMLDPGLMTCSKQAMFLNLVYKSLKADIVLRRVKAFVKRLLQVTCQQMPPFICGALYLVSEILKAKPGLRSQLDDHPESDDEENFIDANDDEDMEKFTDADKETEIVKKLETEETVPETDVETKKPEVASWVHFDNLKGGKQLNKYDPFSRNPLFCGAENTSLWELKKLSVHFHPSVALFAKTILQGNYIQYSGDPLQDFTLMRFLDRFVYRNPKPHKGKENTDSVVMQPKRKHFIKDIRHLPVNSKEFLAKEESQIPVDEVFFHRYYKKVAVKEKQKRDADEESIEDVDDEEFEELIDTFEDDNCFSSGKDDMDFAGNVKKRTKGAKDNTLDEDSEGSDDELGNLDDDEVSLGSMDDEEFAEVDEDGGTFMDVLDDESESVPELEVHSKVSTKKSKRKGTDDFDFAGSFQGPRKKKRNLNDSSLFVSAEEFGHLLDENMGSKFDNIGMNAMANKDNASLKQLRWEAERDDWLHNRDAKSIIKKKKHFKKKRIKTTQKTKKQRK

SEQ ID NO: 620 - protein, 890 aa, Homo sapiens
MSANNSPPSAQKSVLPTAIPAVLPAASPCSSPKTGLSARLSNGSFSAPSLTNSRGSVHTVSFLLQIGLTRESVTIEAQELSLSAVKDLVCSIVYQKFPECGFFGMYDKILLFRHDMNSENILQLITSADEIHEGDLVEVVLSALATVEDFQIRPHTLYVHSYKAPTFCDYCGEMLWGLVRQGLKCEGCGLNYHKRCAFKIPNNCSGVRKRRLSNVSLPGPGLSVPRPLQPEYVALPSEESHVHQEPSKRIPSWSGRPIWMEKMVMCRVKVPHTFAVHSYTRPTICQYCKRLLKGLFRQGMQCKDCKFNCHKRCASKVPRDCLGEVTFNGEPSSLGTDTDIPMDIDNNDINSDSSRGLDDTEEPSPPEDKMFFLDPSDLDVERDEEAVKTISPSTSNNIPLMRVVQSIKHTKRKSSTMVKEGWMVHYTSRDNLRKRHYWRLDSKCLTLFQNESGSKYYKEIPLSEILRISSPRDFTNISQGSNPHCFEIITDTMVYFVGENNGDSSHNPVLAATGVGLDVAQSWEKAIRQALMPVTPQASVCTSPGQGKDHKDLSTSISVSNCQIQENVDISTVYQIFADEVLGSGQFGIVYGGKHRKTGRDVAIKVIDKMRFPTKQESQLRNEVAILQNLHHPGIVNLECMFETPERVFVVMEKLHGDMLEMILSSEKSRLPERITKFMVTQILVALRNLHFKNIVHCDLKPENVLLASAEPFPQVKLCDFGFARIIGEKSFRRSVVGTPAYLAPEVLRSKGYNRSLDMWSVGVIIYVSLSGTFPFNEDEDINDQIQNAAFMYPPNPWREISGEAIDLINNLLQVKMRKRYSVDKSLSHPWLQDYQTWLDLREFETRIGERYITHESDDARWEIHAYTHNLVYPKHFIMAPNPDDMEEDP

SEQ ID NO: 621 - protein, 573 aa, Homo sapiens
MGKCLSCCKEDQSFQRCSPEDQVSTDAQHRGASSISQPSISLGHKTSYSPVTHKVNAAKASRRLLSVSSPSFSERRYSLFVGFQKRNASPYWQQSRANFDSEEDTGFTDIKSSSDHCGSFISRRRRFSSRKLSIVSYYKSAIFFDPQASGQNVFNLNEIEIFSKTSSNTDAKKHITISAPEYNTKNFKNFETNTTSPAFGNTIDTASYQQSTSSFFSLASDISSPDQQNGIANDIQQRGQLCKDLKDFLHPRPESYSTDHSPIMIPQHPSQSGTFPFLHKAGFSSSYKNSGCFIPPQSELTSGLFEDEDFAVLFQDEDRSSPIEIPKIRYITANTDTEEQSFPVPKAFNTRVEELNLDVLLQKVDHLRMSESGKSESFELLRDHKEKFRDEIEFMWRFARAYGDMYELSTNTQEKKHYANIGKTLSERAINRAPMNGHCHLWYAVLCGYVSEFEGLQNKINYGHLFKEHLDIAIKLLPEEPFLYYLKGRYCYTVSKLSWIEKKMAATLFGKIPSSTVQEALHNFLKAEELCPGYSNPNYMYLAKCYTDLEENQNALKFCNLALLLPTVTKEEL

SEQ ID NO: 622 - protein, 577 aa, Homo sapiens
MSKPELKEDKMLEVHFVGDDDVLNHILDREGGAKLKKERAQLLVNPKKIIKKPEYDLEEDDQEVLKDQNYVEIMGRDVQESLKNGSATGGGNKVYSFQNRKHSEKMAKLASELAKTPQKSVSFSLKNDPEITINVPQSSKGHSASDKVQPKNNDKSEFLSTAPRSLRKRLIVPRSHSDSESEYSASNSEDDEGVAQEHEEDTNAVIFSQKIQAQNRVVSAPVGKETPSKRMKRDKTSDLVEEYFEAHSSSKVLTSDRTLQKLKRAKLDQQTLRNLLSKVSPSFSAELKQLNQQYEKLFHKWMLQLHLGFNIVLYGLGSKRDLLERFRTTMLQDSIHVVINGFFPGISVKSVLNSITEEVLDHMGTFRSILDQLDWIVNKFKEDSSLELFLLIHNLDSQMLRGEKSQQIIGQLSSLHNIYLIASIDHLNAPLMWDHAKQSLFNWLWYETTTYSPYTEETSYENSLLVKQSGSLPLSSLTHVLRSLTPNARGIFRLLIKYQLDNQDNPSYIGLSFQDFYQQCREAFLVNSDLTLRAQLTEFRDHKLIRTKKGTDGVEYLLIPVDNGTLTDFLEKEEEEA

SEQ ID NO: 623 - protein, 350 aa, Homo sapiens
MEPKRIREGYLVKKGSVFNTWKPMWVVLLEDGIEFYKKKSDNSPKGMIPLKGSTLTSPCQDFGKRMFVFKITTTKQQDHFFQAAFLEERDAWVRDIKKAIKCIEGGQKFARKSTRRSIRLPETIDLGALYLSMKDTEKGIKELNLEKDKKIFNHCFTGNCVIDWLVSNQSVRNRQEGLMIASSLLNEGYLQPAGDMSKSAVDGTAENPFLDNPDAFYYFPDSGFFCEENSSDDDVILKEEFRGVIIKQGCLLKQGHRRKNWKVRKFILREDPAYLHYYDPAGAEDPLGAIHLRGCVVTSVESNSNGRKSEEENLFEIITADEVHYFLQAATPKERTEWIRAIQMASRTGK

SEQ ID NO: 624 - protein, 1043 aa, Homo sapiens
MEFVRALWLGLALALGPGSAGGHPQPCGVLARLGGSVRLGALLPRAPLARARARAALARAALAPRLPHNLSLELVVAAPPARDPASLTRGLCQALVPPGVAALLAFPEARPELLQLHFLAAATETPVLSLLRREARAPLGAPNPFHLQLHWASPLETLLDVLVAVLQAHAWEDVGLALCRTQDPGGLVALWTSRAGRPPQLVLDLSRRDTGDAGLRARLAPMAAPVGGEAPVPAAVLLGCDIARARRVLEAVPPGPHWLLGTPLPPKALPTAGLPPGLLALGEVARPPLEAAIHDIVQLVARALGSAAQVQPKRALLPAPVNCGDLQPAGPESPGRFLARFLANTSFQGRTGPVWVTGSSQVHMSRHFKVWSLRRDPRGAPAWATVGSWRDGQLDLEPGGASARPPPPQGAQVWPKLRVVTLLEHPFVFARDPDEDGQCPAGQLCLDPGTNDSATLDALFAALANGSAPRALRKCCYGYCIDLLERLAEDTPFDFELYLVGDGKYGALRDGRWTGLVGDLLAGRAHMAVTSFSINSARSQVVDFTSPFFSTSLGIMVRARDTASPIGAFMWPLHWSTWLGVFAALHLTALFLTVYEWRSPYGLTPRGRNRSTVFSYSSALNLCYAILFRRTVSSKTPKCPTGRLLMNLWAIFCLLVLSSYTANLAAVMVGDKTFEELSGIHDPKLHHPAQGFRFGTVWESSAEAYIKKSFPDMHAHMRRHSAPTTPRGVAMLTSDPPKLNAFIMDKSLLDYEVSIDADCKLLTVGKPFAIEGYGIGLPQNSPLTSNLSEFISRYKSSGFIDLLHDKWYKMVPCGKRVFAVTETLQMSIYHFAGLFVLLCLGLGSALLSSLGEHAFFRLALPRIRKGSRLQYWLHTSQKIHRALNTEPPEGSKEETAEAEPSGPEVEQQQQQQDQPTAPEGWKRARRAVDKERRVRFLLEPAVVVAPEADAEAEAAPREGPVWLCSYGRPPAARPTGAPQPGELQELERRIEVARERLRQALVRRGQLLAQLGDSARHRPRRLLQARAAPAEAPPHSGRPGSQE

SEQ ID NO: 625 - protein, 513 aa, Homo sapiens
MAMEIDSRPGGLPGSSCNLGAAREHMQAVTRNYITHPRVTYRTVCSVNGPLVVLDRVKFAQYAEIVHFTLPDGTQRSGQVLEVAGTKAIVQVFEGTSGIDARKTTCEFTGDILRTPVSEDMLGRVFNGSGKPIDKGPVVMAEDFLDINGQPINPHSRIYPEEMIQTGISPIDVMNSIARGQKIPIFSAAGLPHNEIAAQICRQAGLVKKSKAVLDYHDDNFAIVFAAMGVNMETARFFKSDFEQNGTMGNVCLFLNLANDPTIERIITPRLALTTAEFLAYQCEKHVLVILTDMSSYAEALREVSAAREEVPGRRGFPGYMYTDLATIYERAGRVEGRGGSITQIPILTMPNDDITHPIPDLTGFITEGQIYVDRQLHNRQIYPPINVLPSLSRLMKSAIGEGMTRKDHGDVSNQLYACYAIGKDVQAMKAVVGEEALTSEDLLYLEFLQKFEKNFINQGPYENRSVFESLDLGWKLLRIFPKEMLKRIPQAVIDEFYSREGALQDLAPDTAL

SEQ ID NO: 626 - protein, 1360 aa, Homo sapiens
MSRQSTLYSFFPKSPALSDANKASARASREGGRAAAAPGASPSPGGDAAWSEAGPGPRPLARSASPPKAKNLNGGLRRSVAPAAPTSCDFSPGDLVWAKMEGYPWWPCLVYNHPFDGTFIREKGKSVRVHVQFFDDSPTRGWVSKRLLKPYTGSKSKEAQKGGHFYSAKPEILRAMQRADEALNKDKIKRLELAVCDEPSEPEEEEEMEVGTTYVTDKSEEDNEIESEEEVQPKTQGSRRSSRQIKKRRVISDSESDIGGSDVEFKPDTKEEGSSDEISSGVGDSESEGLNSPVKVARKRKRMVTGNGSLKRKSSRKETPSATKQATSISSETKNTLRAFSAPQNSESQAHVSGGGDDSSRPTVWYHETLEWLKEEKRRDEHRRRPDHPDFDASTLYVPEDFLNSCTPGMRKWWQIKSQNFDLVICYKVGKFYELYHMDALIGVSELGLVFMKGNWAHSGFPEIAFGRYSDSLVQKGYKVARVEQTETPEMMEARCRKMAHISKYDRVVRREICRIITKGTQTYSVLEGDPSENYSKYLLSLKEKEEDSSGHTRAYGVCFVDTSLGKFFIGQFSDDRHCSRFRTLVAHYPPVQVLFEKGNLSKETKTILKSSLSCSLQEGLIPGSQFWDASKTLRTLLEEEYFREKLSDGIGVMLPQVLKGMTSESDSIGLTPGEKSELALSALGGCVFYLKKCLIDQELLSMANFEEYIPLDSDTVSTTRSGAIFTKAYQRMVLDAVTLNNLEIFLNGTNGSTEGTLLERVDTCHTPFGKRLLKQWLCAPLCNHYAINDRLDAIEDLMVVPDKISEVVELLKKLPDLERLLSKIHNVGSPLKSQNHPDSRAIMYEETTYSKKKIIDFLSALEGFKVMCKIIGIMEEVADGFKSKILKQVISLQTKNPEGRFPDLTVELNRWDTAFDHEKARKTGLITPKAGFDSDYDQALADIRENEQSLLEYLEKQRNRIGCRTIVYWGIGRNRYQLEIPENFTTRNLPEEYELKSTKKGCKRYWTKTIEKKLANLINAEERRDVSLKDCMRRLFYNFDKNYKDWQSAVECIAVLDVLLCLANYSRGGDGPMCRPVILLPEDTPPFLELKGSRHPCITKTFFGDDFIPNDILIGCEEEEQENGKAYCVLVTGPNMGGKSTLMRQAGLLAVMAQMGCYVPAEVCRLTPIDRVFTRLGASDRIMSGESTFFVELSETASILMHATAHSLVLVDELGRGTATFDGTAIANAVVKELAETIKCRTLFSTHYHSLVEDYSQNVAVRLGHMACMVENECEDPSQETITFLYKFIKGACPKSYGFNAARLANLPEEVIQKGHRKAREFEKMNQSLRLFREVCLASERSTVDAEAVHKLLTLIKEL

SEQ ID NO: 627 - protein, 300 aa, Homo sapiens
MEGVLYKWTNYLTGWQPRWFVLDNGILSYYDSQDDVCKGSKGSIKMAVCEIKVHSADNTRMELIIPGEQHFYMKAVNAAERQRWLVALGSSKACLTDTRTKKEKEISETSESLKTKMSELRLYCDLLMQQVHTIQEFVHHDENHSSPSAENMNEASSLLSATCNTFITTLEECVKIANAKFKPEMFQLHHPDPLVSPVSPSPVQMMKRSVSHPGSCSSERSSHSIKEPVSTLHRLSQRRRRTYSDTDSCSDIPLEDPDRPVHCSKNTLNGDLASATIPEESRLMAKKQSESEDTLPSFSS

SEQ ID NO: 628 - protein, 869 aa, Homo sapiens
MAGCRGSLCCCCRWCCCCGERETRTPEELTILGETQEEEDEILPRKDYESLDYDRCINDPYLEVLETMDNKKGRRYEAVKWMVVFAIGVCTGLVGLFVDFFVRLFTQLKFGVVQTSVEECSQKGCLALSLLELLGFNLTFVFLASLLVLIEPVAAGSGIPEVKCYLNGVKVPGIVRLRTLLCKVLGVLFSVAGGLFVEKEGPMIHSGSVVGAGLPQFQSISLRKIQFNFPYFRSDRDKRDFVSAGAAAGVAAAFGAPIGGTLFSLEEGSSFWNQGLTWKVLFCSMSATFTLNFFRSGIQFGSWGSFQLPGLLNFGEFKCSDSDKKCHLWTAMDLGFFVVMGVIGGLLGATFNCLNKRLAKYRMRNVHPKPKLVRVLESLLVSLVTTVVVFVASMVLGECRQMSSSSQIGNDSFQLQVTEDVNSSIKTFFCPNDTYNDMATLFFNPQESAILQLFHQDGTFSPVTLALFFVLYFLLACWTYGISVPSGLFVPSLLCGAAFGRLVANVLKSYIGLGHIYSGTFALIGAAAFLGGVVRMTISLTVILIESTNEITYGLPIMVTLMVAKWTGDFFNKGIYDIHVGLRGVPLLEWETEVEMDKLRASDIMEPNLTYVYPHTRIQSLVSILRTTVHHAFPVVTENRGNEKEFMKGNQLISNNIKFKKSSILTRAGEQRKRSQSMKSYPSSELRNMCDEHIASEEPAEKEDLLQQMLERRYTPYPNLYPDQSPSEDWTMEERFRPLTFHGLILRSQLVTLLVRGVCYSESQSSASQPRLSYAEMAEDYPRYPDIHDLDLTLLNPRMIVDVTPYMNPSPFTVSPNTHVSQVFNLFRTMGLRHLPVVNAVGEIVGIITRHNLTYEFLQARLRQHYQTI

SEQ ID NO: 629 - protein, 574 aa, Homo sapiens
MEASLGIQMDEPMAFSPQRDRFQAEGSLKKNEQNFKLAGVKKDIEKLYEAVPQLSNVFKIEDKIGEGTFSSVYLATAQLQVGPEEKIALKHLIPTSHPIRIAAELQCLTVAGGQDNVMGVKYCFRKNDHVVIAMPYLEHESFLDILNSLSFQEVREYMLNLFKALKRIHQFGIVHRDVKPSNFLYNRRLKKYALVDFGLAQGTHDTKIELLKFVQSEAQQERCSQNKSHIITGNKIPLSGPVPKELDQQSTTKASVKRPYTNAQIQIKQGKDGKEGSVGLSVQRSVFGERNFNIHSSISHESPAVKLMKQSKTVDVLSRKLATKKKAISTKVMNSAVMRKTASSCPASLTCDCYATDKVCSICLSRRQQVAPRAGTPGFRAPEVLTKCPNQTTAIDMWSAGVIFLSLLSGRYPFYKASDDLTALAQIMTIRGSRETIQAAKTFGKSILCSKEVPAQDLRKLCERLRGMDSSTPKLTSDIQGHASHQPAISEKTDHKASCLVQTPPGQYSGNSFKKGDSNSCEHCFDEYNTNLEGWNEVPDEAYDLLDKLLDLNPASRITAEEALLHPFFKDMSL

SEQ ID NO: 630 - protein, 914 aa, Homo sapiens
MGPFKSSVFILILHLLEGALSNSLIQLNNNGYEGIVVAIDPNVPEDETLIQQIKDMVTQASLYLLEATGKRFYFKNVAILIPETWKTKADYVRPKLETYKNADVLVAESTPPGNDEPYTEQMGNCGEKGERIHLTPDFIAGKKLAEYGPQGRAFVHEWAHLRWGVFDEYNNDEKFYLSNGRIQAVRCSAGITGTNVVKKCQGGSCYTKRCTFNKVTGLYEKGCEFVLQSRQTEKASIMFAQHVDSIVEFCTEQNHNKEAPNKQNQKCNLRSTWEVIRDSEDFKKTTPMTTQPPNPTFSLLQIGQRIVCLVLDKSGSMATGNRLNRLNQAGQLFLLQTVELGSWVGMVTFDSAAHVQNELIQINSGSDRDTLAKRLPAAASGGTSICSGLRSAFTVIRKKYPTDGSEIVLLTDGEDNTISGCFNEVKQSGAIIHTVALGPSAAQELEELSKMTGGLQTYASDQVQNNGLIDAFGALSSGNGAVSQRSIQLESKGLTLQNSQWMNGTVIVDSTVGKDTLFLITWTMQPPQILLWDPSGQKQGGFVVDKNTKMAYLQIPGIAKVGTWKYSLQASSQTLTLTVTSRASNATLPPITVTSKTNKDTSKFPSPLVVYANIRQGASPILRASVTALIESVNGKTVTLELLDNGAGADATKDDGVYSRYFTTYDTNGRYSVKVRALGGVNAARRRVIPQQSGALYIPGWIENDEIQWNPPRPEINKDDVQHKQVCFSRTSSGGSFVASDVPNAPIPDLFPPGQITDLKAEIHGGSLINLTWTAPGDDYDHGTAHKYIIRISTSILDLRDKFNESLQVNTTALIPKEANSEEVFLFKPENITFENGTDLFIAIQAVDKVDLKSEISNIARVSLFIPPQTPPETPSPDETSAPCPNIHINSTIPGIHILKIMWKWIGELQLSIA

SEQ ID NO: 631 - protein, 1426 aa, Homo sapiens
MHSSNPKVRSSPSGNTQSSPKSKQEVMVRPPTVMSPSGNPQLDSKFSNQGKQGGSASQSQPSPCDSKSGGHTPKALPGPGGSMGLKNGAGNGAKGKGKRERSISADSFDQRDPGTPNDDSDIKECNSADHIKSQDSQHTPHSMTPSNATAPRSSTPSHGQTTATEPTPAQKTPAKVVYVFSTEMANKAAEAVLKGQVETIVSFHIQNISNNKTERSTAPLNTQISALRNDPKPLPQQPPAPANQDQNSSQNTRLQPTPPIPAPAPKPAAPPRPLDRESPGVENKLIPSVGSPASSTPLPPDGTGPNSTPNNRAVTPVSQGSNSSSADPKAPPPPPVSSGEPPTLGENPDGLSQEQLEHRERSLQTLRDIQRMLFPDEKEFTGAQSGGPQQNPGVLDGPQKKPEGPIQAMMAQSQSLGKGPGPRTDVGAPFGPQGHRDVPFSPDEMVPPSMNSQSGTIGPDHLDHMTPEQIAWLKLQQEFYEEKRRKQEQVVVQQCSLQDMMVHQHGPRGVVRGPPPPYQMTPSEGWAPGGTEPFSDGINMPHSLPPRGMAPHPNMPGSQMRLPGFAGMINSEMEGPNVPNPASRPGLSGVSWPDDVPKIPDGRNFPPGQGIFSGPGRGERFPNPQGLSEEMFQQQLAEKQLGLPPGMAMEGIRPSMEMNRMIPGSQRHMEPGNNPIFPRIPVEGPLSPSRGDFPKGIPPQMGPGRELEFGMVPSGMKGDVNLNVNMGSNSQMIPQKMREAGAGPEEMLKLRPGGSDMLPAQQKMVPLPFGEHPQQEYGMGPRPFLPMSQGPGSNSGLRNLREPIGPDQRTNSRLSHMPPLPLNPSSNPTSLNTAPPVQRGLGRKPLDISVAGSQVHSPGINPLKSPTMHQVQSPMLGSPSGNLKSPQTPSQLAGMLAGPAAAASIKSPPVLGSAAASPVHLKSPSLPAPSPGWTSSPKPPLQSPGIPPNHKAPLTMASPAMLGNVESGGPPPPTASQPASVNIPGSLPSSTPYTMPPEPTLSQNPLSIMMSRMSKFAMPSSTPLYHDAIKTVASSDDDSPPARSPNLPSMNNMPGMGINTQNPRISGPNPVVPMPTLSPMGMTQPLSHSNQMPSPNAVGPNIPPHGVPMGPGLMSHNPIMGHGSQEPPMVPQGRMGFPQGFPPVQSPPQQVPFPHNGPSGGQGSFPGGMGFPGEGPLGRPSNLPQSSADAALCKPGGPGGPDSFTVLGNSMPSVFTDPDLQEVIRPGATGIPEFDLSRIIPSEKPSQTLQYFPRGEVPGRKQPQGPGPGFSHMQGMMGEQAPRMGLALPGMGGPGPVGTPDIPLGTAPSMPGHNPMRPPAFLQQGMMGPHHRMMSPAQSTMPGQPTLMSNPAAAVGMIPGKDRGPAGLYTHPGPVGSPGMMMSMQGMMGPQQNIMIPPQMRPRGMAADVGMGGFSQGPGNPGNMMF

SEQ ID NO: 632 - protein, 323 aa, Homo sapiens
MAAPKGSLWVRTQLGLPPLLLLTMALAGGSGTASAEAFDSVLGDTASCHRACQLTYPLHTYPKEEELYACQRGCRLFSICQFVDDGIDLNRTKLECESACTEAYSQSDEQYACHLGCQNQLPFAELRQEQLMSLMPKMHLLFPLTLVRSFWSDMMDSAQSFITSSWTFYLQADDGKIVIFQSKPEIQYAPHLEQEPTNLRESSLSKMSYLQMRNSQAHRNFLEDGESDGFLRCLSLNSGWILTTTLVLSVMVLLWICCATVATAVEQYVPSEKLSIYGDLEFMNEQKLNRYPASSLVVVRSKTEDHEEAGPLPTKVNLAHSEI

SEQ ID NO: 633 - protein, 181 aa, Homo sapiens
MPMILGYWDIRGLAHAIRLLLEYTDSSYEEKKYTMGDAPDYDRSQWLNEKFKLGLDFPNLPYLIDGAHKITQSNAILCYIARKHNLCGETEEEKIRVDILENQTMDNHMQLGMICYNPEFEKLKPKYLEELPEKLKLYSEFLGKRPWFAGNKGLEKISAYMKSSRFLPRPVFSKMAVWGNK

SEQ ID NO: 634 - protein, 979 aa, Homo sapiens
MRGYHGDRGSHPRPARFADQQHMDVGPAARAPYLLGSREAFSTEPRFCAPRAGLGHISPEGPLSLSEGPSVGPEGGPAGAGVGGGSSTFPRMYPGQGPFDTCEDCVGHPQGKGAPRLPPTLLDQFEKQLPVQQDGFHTLPYQRGPAGAGPGPAPGTGTAPEPRSESPSRIRHLVHSVQKLFAKSHSLEAPGKRDYNGPKAEGRGGSGGDSYPGPGSGGPHTSHHHHHHHHHHHHQSRHGKRSKSKDRKGDGRHQAKSTGWWSSDDNLDSDSGFLAGGRPPGEPGGPFCLEGPDGSYRDLSFKGRSGGSEGRCLACTGMSMSLDGQSVKRSAWHTMMVSQGRDGYPGAGPGKGLLGPETKAKARTYHYLQVPQDDWGGYPTGGKDGEIPCRRMRSGSYIKAMGDEESGDSDGSPKTSPKAVARRFTTRRSSSVDQARINCCVPPRIHPRSSIPGYSRSLTTGQLSDELNQQLEAVCGSVFGELESQAVDALDLPGCFRMRSHSYLRAIQAGCSQDDDCLPLLATPAAVSGRPGSSFNFRKAPPPIPPGSQAPPRISITAQSSTDSAHESFTAAEGPARRCSSADGLDGPAMGARTLELAPVPPRASPKPPTLIIKTIPGREELRSLARQRKWRPSIGVQVETISDSDTENRSRREFHSIGVQVEEDKRRARFKRSNSVTAGVQADLELEGLAGLATVATEDKALQFGRSFQRHASEPQPGPRAPTYSVFRTVHTQGQWAYREGYPLPYEPPATDGSPGPAPAPTPGPGAGRRDSWIERGSRSLPDSGRASPCPRDGEWFIKMLRAEVEKLEHWCQQMEREAEDYELPEEILEKIRSAVGSTQLLLSQKVQQFFRLCQQSMDPTAFPVPTFQDLAGFWDLLQLSIEDVTLKFLELQQLKANSWKLLEPKEEKKVPPPIPKKPLRGRGVPVKERSLDSVDRQRQEARKRLLAAKRAASFRHSSATESADSIEIYIPEAQTRL

SEQ ID NO: 635 - protein, 1718 aa, Homo sapiens
MNQNTTEPVAATETLAEVPEHVLRGLPEEVRLFPSAVDKTRIGVWATKPILKGKKFGPFVGDKKKRSQVKNNVYMWEVYYPNLGWMCIDATDPEKGNWLRYVNWACSGEEQNLFPLEINRAIYYKTLKPIAPGEELLVWYNGEDNPEIAAAIEEERASARSKRSSPKSRKGKKKSQENKNKGNKIQDIQLKTSEPDFTSANMRDSAEGPKEDEEKPSASALEQPATLQEVASQEVPPELATPAPAWEPQPEPDERLEAAACEVNDLGEEEEEEEEEDEEEEEDDDDDELEDEGEEEASMPNENSVKEPEIRCDEKPEDLLEEPKTTSEETLEDCSEVTPAMQIPRTKEEANGDVFETFMFPCQHCERKFTTKQGLERHMHIHISTVNHAFKCKYCGKAFGTQINRRRHERRHEAGLKRKPSQTLQPSEDLADGKASGENVASKDDSSPPSLGPDCLIMNSEKASQDTINSSVVEENGEVKELHPCKYCKKVFGTHTNMRRHQRRVHERHLIPKGVRRKGGLEEPQPPAEQAQATQNVYVPSTEPEEEGEADDVYIMDISSNISENLNYYIDGKIQTNNNTSNCDVIEMESASADLYGINCLLTPVTVEITQNIKTTQVPVTEDLPKEPLGSTNSEAKKRRTASPPALPKIKAETDSDPMVPSCSLSLPLSISTTEAVSFHKEKSVYLSSKLKQLLQTQDKLTPAGISATEIAKLGPVCVSAPASMLPVTSSRFKRRTSSPPSSPQHSPALRDFGKPSDGKAAWTDAGLTSKKSKLESHSDSPAWSLSGRDERETVSPPCFDEYKMSKEWTASSAFSSVCNQQPLDLSSGVKQKAEGTGKTPVQWESVLDLSVHKKHCSDSEGKEFKESHSVQPTCSAVKKRKPTTCMLQKVLLNEYNGIDLPVENPADGTRSPSPCKSLEAQPDPDLGPGSGFPAPTVESTPDVCPSSPALQTPSLSSGQLPPLLIPTDPSSPPPCPPVLTVATPPPPLLPTVPLPAPSSSASPHPCPSPLSNATAQSPLPILSPTVSPSPSPIPPVEPLMSAASPGPPTLSSSSSSSSSSSSFSSSSSSSSPSPPPLSAISSVVSSGDNLEASLPMISFKQEELENEGLKPREEPQSAAEQDVVVQETFNKNFVCNVCESPFLSIKDLTKHLSIHAEEWPFKCEFCVQLFKDKTDLSEHRFLLHGVGNIFVCSVCKKEFAFLCNLQQHQRDLHPDKVCTHHEFESGTLRPQNFTDPSKAHVEHMQSLPEDPLETSKEEEELNDSSEELYTTIKIMASGIKTKDPDVRLGLNQHYPSFKPPPFQYHHRNPMGIGVTATNFTTHNIPQTFTTAIRCTKCGKGVDNMPELHKHILACASASDKKRYTPKKNPVPLKQTVQPKNGVVVLDNSGKNAFRRMGQPKRLNFSVELSKMSSNKLKLNALKKKNQLVQKAILQKNKSAKQKADLKNACESSSHICPYCNREFTYIGSLNKHAAFSCPKKPLSPPKKKVSHSSKKGGHSSPASSDKNSNSNHRRRTADAEIKMQSMQTPLGKTRARSSGPTQVPLPSSSFRSKQNVKFAASVKSKKPSSSSLRNSSPIRMAKITHVEGKKPKAVAKNHSAQLSSKTSRSLHVRVQKSKAVLQSKSTLASKKRTDRFNIKSRERSGGPVTRSLQLAAAADLSENKREDGSAKQELKDFSYSLRLASRCSPPAAPYITRQYRKVKAPAAAQFQGPFFKE

SEQ ID NO: 636 - protein, 1275 aa, Homo sapiens
MGFAPGKAVGSHIRGHYERILNPYNLFLSGDSLRCLQKPNLTTDTKDKEYKPHDIPQRQSVQPSETCPPARRAKRMRAEAMNIKIEPEETTEARTHNLRRRMGCPTPKCENEKEMKSSIKQEPIERKDYIVENEKEKPKSRSKKATNAVDLYVCLLCGSGNDEDRLLLCDGCDDSYHTFCLIPPLHDVPKGDWRCPKCLAQECSKPQEAFGFEQAARDYTLRTFGEMADAFKSDYFNMPVHMVPTELVEKEFWRLVSTIEEDVTVEYGADIASKEFGSGFPVRDGKIKLSPEEEEYLDSGWNLNNMPVMEQSVLAHITADICGMKLPWLYVGMCFSSFCWHIEDHWSYSINYLHWGEPKTWYGVPGYAAEQLENVMKKLAPELFVSQPDLLHQLVTIMNPNTLMTHEVPVYRTNQCAGEFVITFPRAYHSGFNQGFNFAEAVNFCTVDWLPLGRQCVEHYRLLHRYCVFSHDEMICKMASKADVLDVVVASTVQKDMAIMIEDEKALRETVRKLGVIDSERMDFELLPDDERQCVKCKTTCFMSAISCSCKPGLLVCLHHVKELCSCPPYKYKLRYRYTLDDLYPMMNALKLRAESYNEWALNVNEALEAKINKKKSLVSFKALIEESEMKKFPDNDLLRHLRLVTQDAEKCASVAQQLLNGKRQTRYRSGGGKSQNQLTVNELRQFVTQLYALPCVLSQTPLLKDLLNRVEDFQQHSQKLLSEETPSAAELQDLLDVSFEFDVELPQLAEMRIRLEQARWLEEVQQACLDPSSLTLDDMRRLIDLGVGLAPYSAVEKAMARLQELLTVSEHWDDKAKSLLKARPRHSLNSLATAVKEIEEIPAYLPNGAALKDSVQRARDWLQDVEGLQAGGRVPVLDTLIELVTRGRSIPVHLNSLPRLETLVAEVQAWKECAVNTFLTENSPYSLLEVLCPRCDIGLLGLKRKQRKLKEPLPNGKKKSTKLESLSDLERALTESKETASAMATLGEARLREMEALQSLRLANEGKLLSPLQDVDIKICLCQKAPAAPMIQCELCRDAFHTSCVAVPSISQGLRIWLCPHCRRSEKPPLEKILPLLASLQRIRVRLPEGDALRYMIERTVNWQHRAQQLLSSGNLKFVQDRVGSGLLYSRWQASAGQVSDTNKVSQPPGTTSFSLPDDWDNRTSYLHSPFSTGRSCIPLHGVSPEVNELLMEAQLLQVSLPEIQELYQTLLAKPSPAQQTDRSSPVRPSSEKNDCCRGKRDGINSLERKLKRRLEREGLSSERWERVKKMRTP

SEQ ID NO: 637 - protein, 181 aa, Homo sapiens
KALPRRLVGLASLRAVSTSSMGTLPKRVKIVEVGPRDGLQNEKVTKKFYSMGCYEISLGDTIGVGTPGIMKDMLSAVMQEVPLAALAVHCHDTYGQALANTLMALQMGVSVVDSSVAGLGGCPYAQGASGNLATEDLVYMLEGLGIHTGVNLQKLLEAGNFICQALNRKTSSKVAQATCKL

SEQ ID NO: 638 - protein, 804 aa, Homo sapiens
MAVRALKLLTTLLAVVAAASQAEVESEAGWGMVTPDLLFAEGTAAYARGDWPGVVLSMERALRSRAALRALRLRCRTQCAADFPWELDPDWSPSPAQASGAAALRDLSFFGGLLRRAACLRRCLGPPAAHSLSEEMELEFRKRSPYNYLQVAYFKINKLEKAVAAAHTFFVGNPEHMEMQQNLDYYQTMSGVKEADFKDLETQPHMQEFRLGVRLYSEEQPQEAVPHLEAALQEYFVAYEECRALCEGPYDYDGYNYLEYNADLFQAITDHYIQVLNCKQNCVTELASHPSREKPFEDFLPSHYNYLQFAYYNIGNYTQAVECAKTYLLFFPNDEVMNQNLAYYAAMLGEEHTRSIGPRESAKEYRQRSLLEKELLFFAYDVFGIPFVDPDSWTPEEVIPKRLQEKQKSERETAVRISQEIGNLMKEIETLVEEKTKESLDVSRLTREGGPLLYEGISLTMNSKLLNGSQRVVMDGVISDHECQELQRLTNVAATSGDGYRGQTSPHTPNEKFYGVTVFKALKLGQEGKVPLQSAHLYYNVTEKVRRIMESYFRLDTPLYFSYSHLVCRTAIEEVQAERKDDSHPVHVDNCILNAETLVCVKEPPAYTFRDYSAILYLNGDFDGGNFYFTELDAKTVTAEVQPQCGRAVGFSSGTENPHGVKAVTRGQRCAIALWFTLDPRHSERVRAARAGESSWCCGDPFPERPWFAFLFPKSHCQWLRHERSTWDTSSNALSLWSHCLVLPGPAVNGIQVGKEVKTGSDAEFLVPSLGPTSAVLFQRVGPAGKEMSLGPLRNLPCPLGSSS

SEQ ID NO: 639 - protein, 372 aa, Homo sapiens [sequence omitted]

SEQ ID NO: 640 - protein, 607 aa, Homo sapiens
MWMNSILPIFLFRSVRLLKNDPVNLQKFSYTSEDEAWKTYLENPLTAATKAMMRVNGDDDSVAALSFLYDYYMGPKEKRILSSSTGGRNDQGKRYYHGMEYETDLTPLESPTHLMKFLTENVSGTPEYPDLLKKNNLMSLEGALPTPGKAAPLPAGPSKLEAGSVDSYLLPTTDMYDNGSLNSLFESIHGVPPTQRWQPDSTFKDDPQESMLFPDILKTSPEPPCPEDYPSLKSDFEYTLGSPKAIHIKSGESPMAYLNKGQFYPVTLRTPAGGKGLALSSNKVKSVVMVVFDNEKVPVEQLRFWKHWHSRQPTAKQRVIDVADCKENFNTVEHIEEVAYNALSFVWNVNEEAKVFIGVNCLSTDFSSQKGVKGVPLNLQIDTYDCGLGTERLVHRAVCQIKIFCDKGAERKMRDDERKQFRRKVKCPDSSNSGVKGCLLSGFRGNETTYLRPETDLETPPVLFIPNVHFSSLQRSGGAAPSAGPSSSNRLPLKRTCSPFTEEFEPLPSKQAKEGDLQRVLLYVRRETEEVFDALMLKTPDLKGLRNAISEKYGFPEENIYKVYKKCKRGILVNMDNNIIQHYSNHVAFLLDMGELDGKIQIILKEL

SEQ ID NO: 641 - protein, 333 aa, Homo sapiens
MSWIKEGELSLWERFCANIIKAGPMPKHIAFIMDGNRRYAKKCQVERQEGHSQGFNKLAETLRWCLNLGILEVTVYAFSIENFKRSKSEVDGLMDLARQKFSRLMEEKEKLQKHGVCIRVLGDLHLLPLDLQELIAQAVQATKNYNKCFLNVCFAYTSRHEISNAVREMAWGVEQGLLDPSDISESLLDKCLYTNRSPHPDILIRTSGEVRLSDFLLWQTSHSCLVFQPVLWPEYTFWNLFEAILQFQMNHSVLQKARDMYAEERKRQQLERDQATVTEQLLREGLQASGDAQLRRTRLHKLSARREERVQGFLQALELKRADWLARLGTASA

SEQ ID NO: 642 - protein, 706 aa, Homo sapiens
MSKELAAMGPGASGDGVRTETAPHIALDSRVGLHAYDISVVVIYFVFVIAVGIWSSIRASRGTIGGYFLAGRSMSWWPIGASLMSSNVGSGLFIGLAGTGAAGGLAVGGFEWNMRKSRSGGDRGIHPRSHGRTGVRSQATWLLLALGWVFVPVYIAAGVVTMPQYLKKRFGGQRIQVYMSVLSLILYIFTKISTDIFSGALFIQMALGWNLYLSTGILLVVTAVYTIAGGLMAVIYTDALQTVIMVGGALVLMFLGFQDVGWYPGLEQRYRQAIPNVTVPNTTCHLPRPDAFHILRDPVSGDIPWPGLIFGLTVLATWCWCTDQVIVQRSLSAKSLSHAKGGSVLGGYLKILPMFFIVMPGMISRALFPDEVGCVDPDVCQRICGARVGCSNIAYPKLVMALMPVGLRGLMIAVIMAALMSSLTSIFNSSSTLFTIDVWQRFRRKSTEQELMVVGRVFVVFLVVISILWIPIIQSSNSGQLFDYIQAVTSYLAPPITALFLLAIFCKRVTEPGAFWGLVFGLGVGLLRMILEFSYPAPACGEVDRRPAVLKDFHYLYFAILLCGLTAIVIVIVSLCTTPIPEEQLTRLTWWTRNCPLSELEKEAHESTPEISERPAGECPAGGGAAENSSLGQEQPEAPSRSWGKLLWSWFCGLSGTPEQALSPAEKAALEQKLTSIEEEPLWRHVCNINAVLLLAINIFLWGYFA

SEQ ID NO: 643 - protein, 268 aa, Homo sapiens
MTPALCRSSSLASKGMRERRETKAPPDGLEESAPREKKQSQPVVTASDISKRKCTSSFVEMGSQGDMGDKGQKGSVGRHGKIGPIGSKGEKGDSGDIGPPGPNGEPGLPCECSQLRKAIGEMDNQVSQLTSELKFIKNAVAGVRETESKIYLLVKEEKRYADAQLSCQGRGGTLSMPKDEAANGLMAAYLAQAGLARVFIGINDLEKEGAFVYSDHSPMRTFNKWRSGEPNNAYDEEDCVEMVASGGWNDVACHTTMYFMCEFDKENM

SEQ ID NO: 644 - protein, 1221 aa, Homo sapiens
MITSELPVLQDSTNETTAHSDAGSELEETEVKGKRKRGRPGRPPSTNKKPRKSPGEKSRIEAGIRGAGRGRANGHPQQNGEGEPVTLFEVVKLGKSAMQSVVDDWIESYKQDRDIALLDLINFFIQCSGCRGTVRIEMFRNMQNAEIIRKMTEEFDEDSGDYPLTMPGPQWKKFRSNFCEFIGVLIRQCQYSIIYDEYMMDTVISLLTGLSDSQVRAFRHTSTLAAMKLMTALVNVALNLSIHQDNTQRQYEAERNKMIGKRANERLELLLQKRKELQENQDEIENMMNSIFKGIFVHRYRDAIAEIRAICIEEIGVWMKMYSDAFLNDSYLKYVGWTLHDRQGEVRLKCLKALQSLYTNRELFPKLELFTNRFKDRIVSMTLDKEYDVAVEAIRLVTLILHGSEEALSNEDCENVYHLVYSAHRPVAVAAGEFLHKKLFSRHDPQAEEALAKRRGRNSPNGNLIRMLVLFFLESELHEHAAYLVDSLWESSQELLKDWECMTELLLEEPVQGEEAMSDRQESALIELMVCTIRQAAEAHPPVGRGTGKRVLTAKERKTQIDDRNKLTEHFIITLPMLLSKYSADAEKVANLLQIPQYFDLEIYSTGRMEKHLDALLKQIKFVVEKHVESDVLEACSKTYSILCSEEYTIQNRVDIARSQLIDEFVDRFNHSVEDLLQEGEEADDDDIYNVLSTLKRLTSFHNAHDLTKWDLFGNCYRLLKTGIEHGAMPEQIVVQALQCSHYSILWQLVKITDGSPSKEDLLVLRKTVKSFLAVCQQCLSNVNTPVKEQAFMLLCDLLMIFSHQLMTGGREGLQPLVFNPDTGLQSELLSFVMDHVFIDQDEENQSMEGDEEDEANKIEALHKRRNLLAAFSKLIIYDIVDMHAAADIFKHYMKYYNDYGDIIKETLSKTRQIDKIQCAKTLILSLQQLFNELVQEQGPNLDRTSAHVSGIKELARRFALTFGLDQIKTREAVATLHKDGIEFAFKYQNQKGQEYPPPNLAFLEVLSEFSSKLLRQDKKTVHSYLEKFLTEQMMERREDVWLPLISYRNSLVTGGEDDRMSVNSGSSSSKTSSVRNKKGRPPLHKKRVEDESLDNTWLNRTDTMIQTPGPLPAPQLTSTVLRENSRPMGDQIQEPESEHGSEPDFLHNRGLMEEDAEPIFEDVMMSSRSQLEDMNEEFEDTMVIDLPPSRNRRERAELRPDFFDSAAIIEDDSGFGMPMF

SEQ ID NO: 645 - protein, 340 aa, Homo sapiens
MRKELQLSLSVTLLLVCGFLYQFTLKSSCLFCLPSFKSHQGLEALLSHRRGIVFLETSERMEPPHLVSCSVESAAKIYPEWPVVFFMKGLTDSTPMPSNSTYPAFSFLSAIDNVFLFPLDMKRLLEDTPLFSWYNQINASAERNWLHISSDASRLAIIWKYGGIYMDTDVISIRPIPEENFLAAQASRYSSNGIFGFLPHHPFLWECMENFVEHYNSAIWGNQGPELMTRMLRVWCKLEDFQEVSDLRCLNISFLHPQRFYPISYREWRRYYEVWDTEPSFNVSYALHLWNHMNQEGRAVIRGSNTLVENLYRKHCPRTYRDLIKGPEGSVTGELGPGNK

SEQ ID NO: 646 - protein, 467 aa, Homo sapiens [sequence omitted]

SEQ ID NO: 647 - protein, 921 aa, Homo sapiens
MAPLALVGVTLLLAAPPCSGAATPTPSLPPPPANDSDTSTGGCQGSYRCQPGVLLPVWEPDDPSLGDKAARAVVYFVAMVYMFLGVSIIADRFMAAIEVITSKEKEITITKANGETSVGTVRIWNETVSNLTLMALGSSAPEILLSVIEVCGHNFQAGELGPGTIVGSAAFNMFVVIAVCIYVIPAGESRKIKHLRVFFVTASWSIFAYVWLYLILAVFSPGVVQVWEALLTLVFFPVCVVFAWMADKRLLFYKYVYKRYRTDPRSGIIIGAEGDPPKSIELDGTFVGAEAPGELGGLGPGPAEARELDASRREVIQILKDLKQKHPDKDLEQLVGIANYYALLHQQKSRAFYRIQATRLMTGAGNVLRRHAADASRRAAPAEGAGEDEDDGASRIFFEPSLYHCLENCGSVLLSVTCQGGEGNSTFYVDYRTEDGSAKAGSDYEYSEGTLVFKPGETQKELRIGIIDDDIFEEDEHFFVRLLNLRVGDAQGMFEPDGGGRPKGRLVAPLLATVTILDDDHAGIFSFQDRLLHVSECMGTVDVRVVRSSGARGTVRLPYRTVDGTARGGGVHYEDACGELEFGDDETMKTLQVKIVDDEEYEKKDNFFIELGQPQWLKRGISALLLNQGDGDRKLTAEEEEARRIAEMGKPVLGENCRLEVIIEESYDFKNTVDKLIKKTNLALVIGTHSWREQFLEAITVSAGDEEEEEDGSREERLPSCFDYVMHFLTVFWKVLFACVPPTEYCHGWACFGVSILVIGLLTALIGDLASHFGCTVGLKDSVNAVVFVALGTSIPDTFASKVAALQDQCADASIGNVTGSNAVNVFLGLGVAWSVAAVYWAVQGRPFEVRTGTLAFSVTLFTVFAFVGIAVLLYRRRPHIGGELGGPRGPKLATTALFLGLWLLYILFASLEAYCHIRGF

SEQ ID NO: 648 - protein, 495 aa, Homo sapiens
MSSNSDTGDLQESLKHGLTPIVSQFKMVNYSYDEDLEELCPVCGDKVSGYHYGLLTCESCKGFFKRTVQNNKRYTCIENQNCQIDKTQRKRCPYCRFQKCLSVGMKLEAVRADRMRGGRNKFGPMYKRDRALKQQKKALIRANGLKLEAMSQVIQAMPSDLTISSAIQNIHSASKGLPLNHAALPPTDYDRSPFVTSPISMTMPPHGSLQGYQTYGHFPSRAIKSEYPDPYTSSPESIMGYSYMDSYQTSSPASIPHLILELLKCEPDEPQVQAKIMAYLQQEQANRSKHEKLSTFGLMCKMADQTLFSIVEWARSSIFFRELKVDDQMKLLQNCWSELLILDHIYRQVVHGKEGSIFLVTGQQVDYSIIASQAGATLNNLMSHAQELVAKLRSLQFDQREFVCLKFLVLFSLDVKNLENFQLVEGVQEQVNAALLDYTMCNYPQQTEKFGQLLLRLPEIRAISMQAEEYLYYKHLNGDVPYNNLLIEMLHAKRA

SEQ ID NO: 649 - protein, 1489 aa, Homo sapiens
MGDAADPREMRKTFIVPAIKPFDHYDFSRAKIACNLAWLVAKAFGTENVPEELQEPFYTDQYDQEHIKPPVVNLLLSAELYCRAGSLILKSDAAKPLLGHDAVIQALAQKGLYVTDQEKLVTERDLHKKPIQMSAHLAMIDTLMMAYTVEMVSIEKVIACAQQYSAFFQATDLPYDIEDAVMYWINKVNEHLKDIMEQEQKLKEHHTVEAPGGQKSPSKWFWKLVPARYRKEQTLLKQLPCIPLVENLLKDGTDGCALAALIHFYCPDVVRLEDICLKETMSLADSLYNLQLIQEFCQEYLNQCCHFTLEDMLYAASSIKSNYLVFMAELFWWFEVVKPSFVQPRVVRPQGAEPVKDMPSIPVLNAAKRNVLDSSSDFPSSGEGATFTQSHHHLPSRYSRPQAHSSASGGIRRSSSMSYVDGFIGTWPKEKRSSVHGVSFDISFDKEDSVQRSTPNRGITRSISNEGLTLNNSHVSKHIRKNLSFKPINGEEEAESIEEELNIDSHSDLKSCVPLNTNELNSNENIHYKLPNGALQNRILLDEFGNQIETPSIEEALQIIHDTEKSPHTPQPDQIANGFFLHSQEMSILNSNIKLNQSSPDNVTDTKGALSPITDNTEVDTGIHVPSEDIPETMDEDSSLRDYTVSLDSDMDDASKFLQDYDIRTGNTREALSPCPSTVSTKSQPGSSASSSSGVKMTSFAEQKFRKLNHTDGKSSGSSSQKTTPEGSELNIPHVVAWAQIPEETGLPQGRDTTQLLASEMVHLRMKLEEKRRAIEAQKKKMEAAFTKQRQKMGRTAFLTVVKKKGDGISPLREEAAGAEDEKVYTDRAKEKESQKTDGQRSKSLADIKESMENPQAKWLKSPTTPIDPEKQWNLASPSEETLNEGEILEYTKSIEKLNSSLHFLQQEMQRLSLQQEMLMQMREQQSWVISPPQPSPQKQIRDFKPSKQAGLSSAIAPFSSDSPRPTHPSPQSSNRKSASFSVKSQRTPRPNELKITPLNRTLTPPRSVDSLPRLRRFSPSQVPIQTRSFVCFGDDGEPQLKESKPKEEVKKEELESKGTLEQRGHNPEEKEIKPFESTVSEVLSLPVTETVCLTPNEDQLNQPTEPPPKPVFPPTAPKNVNLIEVSLSDLKPPEKADVPVEKYDGESDKEQFDDDQKVCCGFFFKDDQKAENDMAMKRAALLEKRLRREKETQLRKQQLEAEMEHKKEETRRKTEEERQKKEDERARREFIRQEYMRRKQLKLMEDMDTVIKPRPQVVKQKKQRPKSIHRDHIESPKTPIKGPPVSSLSLASLNTGDNESVHSGKRTPRSESVEGFLSPSRCGSRNGEKDWENASTTSSVASGTEYTGPKLYKEPSAKSNKHIIQNALAHCCLAGKVNEGQKKKILEEMEKSDANNFLILFRDSGCQFRSLYTYCPETEEINKLTGIGPKSITKKMIEGLYKYNSDRKQFSHIPAKTLSASVDAITIHSHLWQTKRPVTPKKLLPTKA

SEQ ID NO: 650 - protein, 359 aa, Homo sapiens
MKLGCVLMAWALYLSLGVLWVAQMLLAASFETLQCEGPVCTEESSCHTEDDLTDAREAGFQVKAYTFSEPFHLIVSYDWLILQGPAKPVFEGDLLVLRCQAWQDWPLTQVTFYRDGSALGPPGPNREFSITVVQKADSGHYHCSGIFQSPGPGIPETASVVAITVQELFPAPILRAVPSAEPQAGSPMTLSCQTKLPLQRSAARLLFSFYKDGRIVQSRGLSSEFQIPTASEDHSGSYWCEAATEDNQVWKQSPQLEIRVQGASSSAAPPTLNPAPQKSAAPGTAPEEAPGPLPPPPTPSSEDPGFSSPLGMPDPHLYHQMGLLLKHMQDVRVLLGHLLMELRELSGHRKPGTTKATAE

SEQ ID NO: 651 - protein, 592 aa, Homo sapiens
MAPGQLALFSVSDKTGLVEFARNLTALGLNLVASGGTAKALRDAGLAVRDVSELTGFPEMLGGRVKTLHPAVHAGILARNIPEDNADMARLDFNLIRVVACNLYPFVKTVASPGVTVEEAVEQIDIGGVTLLRAAAKNHARVTVVCEPEDYVVVSTEMQSSESKDTSLETRRQLALKAFTHTAQYDEAISDYFRKQYSKGVSQMPLRYGMNPHQTPAQLYTLQPKLPITVLNGAPGFINLCDALNAWQLVKELKEALGIPAAASFKHVSPAGAAVGIPLSEDEAKVCMVYDLYKTLTPISAAYARARGADRMSSFGDFVALSDVCDVPTAKIISREVSDGIIAPGYEEEALTILSKKKNGNYCVLQMDQSYKPDENEVRTLFGLHLSQKRNNGVVDKSLFSNVVTKNKDLPESALRDLIVATIAVKYTQSNSVCYAKNGQVIGIGAGQQSRIHCTRLAGDKANYWWLRHHPQVLSMKFKTGVKRAEISNAIDQYVTGTIGEDEDLIKWKALFEEVPELLTEAEKKEWVEKLTEVSISSDAFFPFRDNVDRAKRSGVAYIAAPSGSAADKVVIEACDELGIILAHTNLRLFHH

SEQ ID NO: 652 - protein, 343 aa, Homo sapiens
MSVLRRMMRVSNRSLLAFIFFFSLSSSCLYFIYVAPGIDYPEGNNSSDYLVQTTTYLPENFTYSPYLPCPEKLPYMRGFLNVNVSEVSFDEIHQLFSKDLDIEPGGHWRPKDCKPRWKVAVLIPFRNRHEHLPIFFLHLIPMLQKQRLEFAFYVIEQTGTQPFNRAMLFNVGFKEAMKDSVWDCVIFHDVDHLPENDRNYYGCGEMPRHFAAKLDKYMYILPYKEFFGGVSGLTVEQFRKINGFPNAFWGWGGEDDDLWNRVHYAGYNVTRPEGDLGKYKSIPHHHRGEVQFLGRYKLLRYSKERQYIDGLNNLIYRPKILVDRLYTNISVNLMPELAPIEDY

SEQ ID NO: 653 - protein, 2476 aa, Homo sapiens
MNTEELELLSDSKYRNYVAAIDKALKNFEYSSEWADLISALGKLNKVLQNNAKYQVVPKKLTIGKRLAQCLHPALPGGVHRKALETYEIIFKIIGPKRLAKDLFLYSSGLFPLLANAAMSVKPTLLSLYEIYYLPLGKTLKPGLQGLLTGILPGLEEGSEYYERTNMLLEKVAAAVDQSAFYSALWGSLLTSPAVRLPGITYVLAHLNRKLSMEDQLYIIGSDIELMVEAVSTSVQDSSVLVQRSTLDLILFCFPFHMSQATRPDMIRILSAALHVVLRRDMSLNRRLYAWLLGPRSTRHSNPEEHATYYFTTFSKELLVQAMVGILQVNGFGEENTLMQDLKPFRILISLLDKPELGPVILEDVLIEVFRTLYSQCKAELDLQTEPPFSKDHAQLSSKLRENKKTAELIKTANLLFNSFEPYYMWDYVARWFEECCRRTLHVRLQIGPGDSNDSSELQLTNFCLLVDFLLDIVSLPTRSMRVLCQETYIEIQTEHLPQLLLRMISALTSHLQTLHLSELTDSLRLCSKILSKVQPPLLSASTGGVLQFPSGQNNSVKEWEDKKVSSVSHENPTEVFEDGENPPSSRSSESGFTEFIQYQADRTDDIDRELSEGQGAAAIPIGSTSSETETASTVGSEETIIQTPSVVTQGTATRSRKTAQKTAMQCCLEYVQQFLTRLINLYIIQNNSFSQSLATEHQGDLGREQGETSKWDRNSQGDVKEKNISKQKTSKEYLSAFLAACQLFLECSSFPVYIAEGNHTSELRSEKLETDCEHVQPPQWLQTLMNACSQASDFSVQSVAISLVMDLVGLTQSVAMVTGENINSVEPAQPLSPNQGRVAVVIRPPLTQGNLRYIAEKTEFFKHVALTLWDQLGDGTPQHHQKSVELFYQLHNLVPSSSICEDVISQQLTHKDKKIRMEAHAKFAVLWHLTRDLHINKSSSFVRSFDRSLFIMLDSLNSLDGSTSSVGQAWLNQVLQRHDIARVLEPLLLLLLHPKTQRVSVQRVQAERYWNKSPCYPGEESDKHFMQNFACSNVSQVQLITSKGNGEKPLTMDEIENFSLTVNPLSDRLSLLSTSSETIPMVVSDFDLPDQQIEILQSSDSGCSQSSAGDNLSYEVDPETVNAQEDSQMPKESSPDDDVQQVVFDLICKVVSGLEVESASVTSQLEIEAMPPKCSDIDPDEETIKIEDDSIQQSQNALLSNESSQFLSVSAEGGHECVANGISRNSSSPCISGTTHTLHDSSVASIETKSRQRSHSSIQFSFKEKLSEKVSEKETIVKESGKQPGAKPKVKLARKKDDDKKKSSNEKLKQTSVFFSDGLDLENWYSCGEGDISEIESDMGSPGSRKSPNFNIHPLYQHVLLYLQLYDSSRTLYAFSAIKAILKTNPIAFVNAISTTSVNNAYTPQLSLLQNLLARHRISVMGKDFYSHIPVDSNHNFRSSMYIEILISLCLYYMRSHYPTHVKVTAQDLIGNRNMQMMSIEILTLLFTELAKVIESSAKGFPSFISDMLSKCKVQKVILHCLLSSIFSAQKWHSEKMAGKNLVAVEEGFSEDSLINFSEDEFDNGSTLQSQLLKVLQRLIVLEHRVMTIPEENETGFDFVVSDLEHISPHQPMTSLQYLHAQPITCQGMFLCAVIRALHQHCACKMHPQWIGLITSTLPYMGKVLQRVVVSVTLQLCRNLDNLIQQYKYETGLSDSRPLWMASIIPPDMILTLLEGITAIIHYCLLDPTTQYHQLLVSVDQKHLFEARSGILSILHMIMSSVTLLWSILHQADSSEKMTIAASASLTTINLGATKNLRQQILELLGPISMNHGVHFMAAIAFVWNERRQNKTTTRTKVIPAASEEQLLLVELVRSISVMRAETVIQTVKEVLKQPPAIAKDKKHLSLEVCMLQFFYAYIQRIPVPNLVDSWASLLILLKDSIQLSLPAPGQFLILGVLNEFIMKNPSLENKKDQRDLQDVTHKIVDAIGAIAGSSLEQTTWLRRNLEVKPSPKIMVDGTNLESDVEDMLSPAMETANITPSVYSVHALTLLSEVLAHLLDMVFYSDEKERVIPLLVNIMHYVVPYLRNHSAHNAPSYRACVQLLSSLSGYQYTRRAWKKEAFDLFMDPSFFQMDASCVNHWRAIMDNLMTHDKTTFRDLMTRVAVAQSSSLNLFANRDVELEQRAMLLKRLAFAIFSSEIDQYQKYLPDIQERLVESLRLPQVPTLHSQVFLFFRVLLLRMSPQHLTSLWPTMITELVQVFLLMEQELTADEDISRTSGPSVAGLETTYTGGNGFSTSYNSQRWLNLYLSACKFLDLALALPSENLPQFQMYRWAFIPEASDDSGLEVRRQGIHQREFKPYVVRLAKLLRKRAKDKEEDFKTVILEGLEMAKHQKNPEEDNSGRTLGWEPGHLLLTICTVRSMEQLLPFFNVLSQVFNSKVTSRCGGHSGSPILYSNAFPNKDMKLENHKPCSSKARQKIEEMVEKDFLEGMIKT

SEQ ID NO: 654 - protein, 1213 aa, Homo sapiens
MRSRNQGGESASDGHISCPKPSIIGNAGEKSLSEDAKKKKKSNRKEDDVMASGTVKRHLKTSGECERKTKKSLELSKEDLIQLLSIMEGELQAREDVIHMLKTEKTKPEVLEAHYGSAEPEKVLRVLHRDAILAQEKSIGEDVYEKPISELDRLEEKQKETYRRMLEQLLLAEKCHRRTVYELENEKHKHTDYMNKSDDFTNLLEQERERLKKLLEQEKAYQARKEKENAKRLNKLRDELVKLKSFALMLVDERQMHIEQLGLQSQKVQDLTQKLREEEEKLKAITSKSKEDRQKLLKLEVDFEHKASRFSQEHEEMNAKLANQESHNRQLRLKLVGLTQRIEELEETNKNLQKAEEELQELRDKIAKGECGNSSLMAEVENLRKRVLEMEGKDEEITKTESQCRELRKKLQEEEHHSKELRLEVEKLQKRMSELEKLEEAFSKSKSECTQLHLNLEKEKNLTKDLLNELEVVKSRVKELECSESRLEKAELSLKDDLTKLKSFTVMLVDERKNMMEKIKQEERKVDGLNKNFKVEQGKVMDVTEKLIEESKKLLKLKSEMEEKVYNLTRERDELIGKLKSEEEKSSELSCSVDLLKKRLDGIEEVEREITRGRSRKGSELTCPEDNKIKELTLEIERLKKRLQQLEVVEGDLMKTEDEYDQLEQKFRTEQDKANFLSQQLEEIKHQIAKNKAIEKGEVVSQEAELRHRFRLEEAKSRDLKAEVQALKEKIHELMNKEDQLSQLQVDYSVLQQRFMEEENKNKNMGQEVLNLTKELELSKRYSRALRPSVNGRRMVDVPVTSTGVQTDAVSGEAAEEETPAVFIRKSFQEENHIMSNLRQVGLKKPVERSSVLDRYPPAANELTMRKSWIPWMRKRENGPSITQEKGPRTNSSPGHPGEVVLSPKQGQPLHIRVTPDHENSTATLEITSPTSEEFFSSTTVIPTLGNQKPRITIIPSPNVMPQKQKSGDTTLGPERAMSPVTITTFSREKTPESGRGAFADRPTSPIQIMTVSTSAAPAEIAVSPESQEMPMGRTILKVTPEKQTVPTPVRKYNSNANIITTEDNKIHIHLGSQFKRSPGTSGEGVSPVITVRPVNVTAEKEVSTGTVLRSPRNHLSSRPGASKVTSTITITPVTTSSARGTQSVSGQDGSSQRPTPTRIPMSKGMKAGKPVVAAPGAGNLTKFEPRAETQSMKIELKKSAASSTTSLGGGKG

SEQ ID NO: 655 - protein, 859 aa, Homo sapiens
MMEGLKKRTRKAFGIRKKEKDTDSTGSPDRDGIQGKKKTQKTQLLLTSCFWLRALSLTLSQKKSNGAPNGFYAEIDWERYNSPELDEEGYSIRPEEPGSTKGKHFYSSSESEEEEESHKKFNIKIKPLQSKDILKNAATVDELKASIGNIALSPSPVRKSPRRSPGAIKRNLSSEEVARPRRSTPTPELISKKPPDDTTALAPLFGPPLESAFDEQKTEVLLDQPEIWGSGQPINPSMESPKLTRPFPTGTPPPLPPKNVPATPPRTGSPLTIGPGNDQSATEVKIEKLPSINDLDSIFGPVLSPKSVAVNAEEKWVHFSDTSPEHVTPELTPREKVVSPPATPDNPADSPAPGPLGPPGPTGPPGPPGPPRNVLSPLNLEEVQKKVAEQTFIKDDYLETISSPKDFGLGQRATPPPPPPPTYRTVVSSPGPGSGPGPGTTSDGKTEAQRYQVICPSLQAGGNELDSYSGASSPARPATPLVPCRSTTPPPPPPRPPSRPKLPPGKPGVGDVSRPFSPPIHSSSPPPIAPLARAESTSSISSTNSLSAATTPTVENEQPSLVWFDRGKFYLTFEGSSRGPSPLTMGAQDTLPVAAAFTETVNAYFKGADPSKCIVKITGEMVLSFPAGITRHFANNPSPAALTFRVINFSRLEHVLPNPQLLCCDNTQNDANTKEFWVNMPNLMTHLKKVSEQKPQATYYNVDMLKYQVSAQGIQSTPLNLAVNWRCEPSSTDLRIDYKYNTDAMTTAVALNNVQFLVPIDGGVTKLQAVLPPAVWNAEQQRILWKIPDISQKSENGGVGSLLARFQLSEGPSKPSPLVVQFTSEGSTLSGCDIELVGAGYRFSLIKKRFAAGKYLADN

SEQ ID NO: 656 - protein, 186 aa, Homo sapiens
MDADSDVALDILITNVVCVFRTRCHLNLRKIALEGANVIYKRDVGKVLMKLRKPRITATIWSSGKIICTGATSEEEAKFGARRLARSLQKLGFQVIFTDFKVVNVLAVCNMPFEIRLPEFTKNNRPHASYEPELHPAVCYRIKSLRATLQIFSTGSITVTGPNVKAVATAVEQIYPFVFESRKEIL

SEQ ID NO: 657 - protein, 745 aa, Homo sapiens
MEEELQHSHCVNCVSRRCMTRPEPGISCDLIGCPLVCGAVFHSCKADEHRLLCPFERVPCLNSDFGCPFTMARNKVAEHLEMCPASVVCCTMEWNRWPVSYADRKSYENLSRDVDEVAQLDMALALQDQRMLLESLKVATMMSKATDKVSKPREQISVKSSVPEIPHANGLVSVDEESYGALYQATVETTRSLAAALDILNTATRDIGMLNTSVPNDMDEQQNARESLEDQNLKDQDHLYEEEIGAVGGIDYNDTNQNAQSEQNGSSDLLCDLNTSSYDTSALCNGFPLENICTQVIDQNQNLHGDSKQSNLTNGDCVASSDGTSKPSSSLAVAAQLREIIPSSALPNGTVQHILMPDDEGEGELCWKKVDLGDVKNVDVLSFSHAPSFNFLSNSCWSKPKEDKAVDTSDLEVAEDPMGLQGIDLITAALLFCLGDSPGGRGISDSRMADIYHIDVGTQTFSLPSAILATSTMVGEIASASACDHANPQLSNPSPFQTLGLDLVLECVARYQPKQRSMFTFVCGQLFRRKEFSSHFKNVHGDIHAGLNGWMEQRCPLAYYGCTYSQRRFCPSIQGAKIIHDRHLRSFGVQPCVSTVLVEPARNCVLGLHNDHLSSLPFEVLQHIAGFLDGFSLCQLSCVSKLMRDVCGSLLQSRGMVILQWGKRKYPEGNSSWQIKEKVWRFSTAFCSVNEWKFADILSMADHLKKCSYNVVEKREEAIPLPCMCVTRELTKEGRSLRSVLKPVL

SEQ ID NO: 658 - protein, 790 aa, Homo sapiens
MAEQVLPQALYLSNMRKAVKIRERTPEDIFKPTNGIIHHFKTMHRYTLEMFRTCQFCPQFREIIHKALIDRNIQATLESQKKLNWCREVRKLVALKTNGDGNCLMHATSQYMWGVQDTDLVLRKALFSTLKETDTRNFKFRWQLESLKSQEFVETGLCYDTRNWNDEWDNLIKMASTDTPMARSGLQYNSLEEIHIFVLCNILRRPIIVISDKMLRSLESGSNFAPLKVGGIYLPLHWPAQECYRYPIVLGYDSHHFVPLVTLKDSGPEIRAVPLVNRDRGRFEDLKVHFLTDPENEMKEKLLKEYLMVIEIPVQGWDHGTTHLINAAKLDEANLPKEINLVDDYFELVQHEYKKWQENSEQGRREGHAQNPMEPSVPQLSLMDVKCETPNCPFFMSVNTQPLCHECSERRQKNQNKLPKLNSKPGPEGLPGMALGASRGEAYEPLAWNPEESTGGPHSAPPTAPSPFLFSETTAMKCRSPGCPFTLNVQHNGFCERCHNARQLHASHAPDHTRHLDPGKCQACLQDVTRTFNGICSTCFKRTTAEASSSLSTSLPPSCHQRSKSDPSRLVRSPSPHSCHRAGNDAPAGCLSQAARTPGDRTGTSKCRKAGCVYFGTPENKGFCTLCFIEYRENKHFAAASGKVSPTASRFQNTIPCLGRECGTLGSTMFEGYCQKCFIEAQNQRFHEAKRTEEQLRSSQRRDVPRTTQSTSRPKCARASCKNILACRSEELCMECQHPNQRMGPGAHRGEPAPEDPPKQRCRAPACDHFGNAKCNGYCNECFQFKQMYG

SEQ ID NO: 659 - protein, 431 aa, Homo sapiens
MTVKTEAAKGTLTYSRMRGMVAILIAFMKQRRMGLNDFIQKIANNSYACKHPEVQSILKISQPQEPELMNANPSPPPSPSQQINLGPSSNPHAKPSDFHFLKVIGKGSFGKVLLARHKAEEVFYAVKVLQKKAILKKKEEKHIMSERNVLLKNVKHPFLVGLHFSFQTADKLYFVLDYINGGELFYHLQRERCFLEPRARFYAAEIASALGYLHSLNIVYRDLKPENILLDSQGHIVLTDFGLCKENIEHNSTTSTFCGTPEYLAPEVLHKQPYDRTVDWWCLGAVLYEMLYGLPPFYSRNTAEMYDNILNKPLQLKPNITNSARHLLEGLLQKDRTKRLGAKDDFMEIKSHVFFSLINWDDLINKKITPPFNPNVSGPNDLRHFDPEFTEEPVPNSIGKSPDSVLVTASVKEAAEAFLGFSYAPPTDSFL

SEQ ID NO: 660 - protein, 179 aa, Homo sapiens
MSTGSLSDVEDLQEVEMLECDGLKMDSNKEFVTSNESTEESSNCENGSPQKGRGGLGKRRKAPTKKSPLSGVSQEGKQVQRNAANARERARMRVLSKAFSRLKTTLPWVPPDTKLSKLDTLRLASSYIAHLRQILANDKYENGYIHPVNLTWPFMVAGKPESDLKEVVTASRLCGTTAS

SEQ ID NO: 661 - protein, 1007 aa, Homo sapiens
MKDEAGERDREVSSLNSKLLSLQLDIKNLHDVCKRQRKTLQDNQLCMEEAMNSSHDKKQAQALAFEESEVEFGSSKQCHLRQLQQLKKKLLVLQQELEFHTEELQTSYYSLRQYQSILEKQTSDLVLLHHHCKLKEDEVILYEEEMGNHNENTGEKLHLAQEQLALAGDKIASLERSLNLYRDKYQSSLSNIELLECQVKMLQGELGGIMGQEPENKGDHSKVRIYTSPCMIQEHQETQKRLSEVWQKVSQQDDLIQELRNKLACSNALVLEREKALIKLQADFASCTATHRYPPSSSEECEDIKKILKHLQEQKDSQCLHVEEYQNLVKDLRVELEAVSEQKRNIMKDMMKLELDLHGLREETSAHIERKDKDITILQCRLQELQLEFTETQKLTLKKDKFLQEKDEMLQELEKKLTQVQNSLLKKEKELEKQQCMATELEMTVKEAKQDKSKEAECKALQAEVQKLKNSLEEAKQQERLAAQQAAQCKEEAALAGCHLEDTQRKLQKGLLLDKQKADTIQELQRELQMLQKESSMAEKEQTSNRKRVEELSLELSEALRKLENSDKEKRQLQKTVAEQDMKMNDMLDRIKHQHREQGSIKCKLEEDLQEATKLLEDKREQLKKSKEHEKLMEGELEALRQEFKKKDKTLKENSRKLEEENENLRAELQCCSTQLESSLNKYNTSQQVIQDLNKEIALQKESLMSLQAQLDKALQKEKHYLQTTITKEAYDALSRKSAACQDDLTQALEKLNHVTSETKSLQQSLTQTQEKKAQLEEEIIAYEERMKKLNTELRKLRGFHQESELEVHAFDKKLEEMSCQVLQWQKQHQNDLKMLAAKEEQLREFQEEMAALKENLLEDDKEPCCLPQWSVPKDTCRLYRGNDQIMTNLEQWAKQQKVANEKLGNQLREQVKYIAKLSGEKDHLHSVMVHLQQENKKLKKEIEEKKMKAENTRLCTKALGPSRTESTQREKVCGTLGWKGLPQDMGQRMDLTKYIGMPHCPGSSYC

SEQ ID NO: 662 - protein, 685 aa, Homo sapiens
MWLKLFFLLLYFLVLFVLARFFEAIVWYETGIFATQLVDPVALSFKKLKTILECRGLGYSGLPEKKDVRELVEKSGDLMEGELYSALKEEEASESVSSTNFSGEMHFYELVEDTKDGIWLVQVIANDRSPLVGKIHWEKMVKKVSRFGIRTGTFNCSSDPRYCRRRGWVRSTLIMSVPQTSTSKGKVMLKEYSGRKIEVEHIFKWITAHAASRIKTIYNAEHLKEEWNKSDQYWLKIYLFANLDQPPAFFSALSIKFTGRVEFIFVNVENWDNKSYMTDIGIYNMPSYILRTPEGIYRYGNHTGEFISLQAMDSFLRSLQPEVNDLFVLSLVLVNLMAWMDLFITQGATIKRFVVLISTLGTYNSLLIISWLPVLGFLQLPYLDSFYEYSLKLLRYSNTTTLASWVRADWMFYSSHPALFLSTYLGHGLLIDYFEKKRRRNNNNDEVNANNLEWLSSLWDWYTSYLFHPIASFQNFPVESDWDEDPDLFLERLAFPDLWLHPLIPTDYIKNLPMWRFKCLGVQSEEEMSEGSQDTENDSESENTDTLSSEKEVFEDKQSVLHNSPGTASHCDAEACSCANKYCQTSPCERKGRSYGSYNTNEDMEPDWLTWPADMLHCTECVVCLENFENGCLLMGLPCGHVFHQNCIVMWLAGGRHCCPVCRWPSYKKKQPYAQHQPLSNDVPS

SEQ ID NO: 663 - protein, 1661 aa, Homo sapiens
MEAPAAEPPVRGCGPQPAPAPAPAPERKKSHRAPSPARPKDVAGWSLAKGRRGPGPGSAVACSAAFSSRPDKKGRAVAPGARGAGVRVAGVRTGVRAKGRPRSGAGPRPPPPPPSLTDSSSEVSDCASEEARLLGLELALSSDAESAAGGPAGVRTGQPAQPAPSAQQPPRPPASPDEPSVAASSVGSSRLPLSASLAFSDLTEEMLDCGPSGLVRELEELRSENDYLKDEIEELRAEMLEMRDVYMEEDVYQLQELRQQLDQASKTCRILQYRLRKAERRSLRAAQTGQVDGELIRGLEQDVKVSKDISMRLHKELEVVEKKRARLEEENEELRQRLIETELAKQVLQTELERPREHSLKKRGTRSLGKADKKTLVQEDSADLKCQLHFAKEESALMCKKLTKLAKENDSMKEELLKYRSLYGDLDSALSAEELADAPHSRETELKVHLKLVEEEANLLSRRIVELEVENRGLRAEMDDMKDHGGGCGGPEARLAFSALGGGECGESLAELRRHLQFVEEEAELLRRSSAELEDQNKLLLNELAKFRSEHELDVALSEDSCSVLSEPSQEELAAAKLQIGELSGKVKKLQYENRVLLSNLQRCDLASCQSTRPMLETDAEAGDSAQCVPAPLGETHESHAVRLCRAREAEVLPGLREQAALVSKAIDVLVADANGFTAGLRLCLDNECADFRLHEAPDNSEGPRDTKLIHAILVRLSVLQQELNAFTRKADAVLGCSVKEQQESFSSLPPLGSQGLSKEILLAKDLGSDFQPPDFRDLPEWEPRIREAFRTGDLDSKPDPSRSFRPYRAEDNDSYASEIKELQLVLAEAHDSLRGLQEQLSQERQLRKEEADNFNQKMVQLKEDQQRALLRREFELQSLSLQRRLEQKFWSQEKNMLVQESQQFKHNFLLLFMKLRWFLKRWRQGKVLPSEGDDFLEVNSMKELYLLMEEEEINAQHSDNKACTGDSWTQNTPNEYIKTLADMKVTLKELCWLLRDERRGLTELQQQFAKAKATWETERAELKGHTSQMELKTGKGAGERAGPDWKAALQREREEQQHLLAESYSAVMELTRQLQISERNWSQEKLQLVERLQGEKQQVEQQVKELQNRLSQLQKAADPWVLKHSELEKQDNSWKETRSEKIHDKEAVSEVELGGNGLKRTKSVSSMSEFESLLDCSPYLAGGDARGKKLPNNPAFGFVSSEPGDPEKDTKEKPGLSSRDCNHLGALACQDPPGRQMQRSYTAPDKTGIRVYYSPPVARRLGVPVVHDKEGKIIIEPGFLFTTAKPKESAEADGLAESSYGRWLCNFSRQRLDGGSAGSPSAAGPGFPAALHDFEMSGNMSDDMKEITNCVRQAMRSGSLERKVKSTSSQTVGLASVGTQTIRTVSVGLQTDPPRSSLHGKAWSPRSSSLVSVRSKQISSSLDKVHSRIERPCCSPKYGSPKLQRRSVSKLDSSKDRSLWNLHQGKQNGSAWARSTTTRDSPVLRNINDGLSSLFSVVEHSGSTESVWKLGMSETRAKPEPPKYGIVQEFFRNVCGRAPSPTSSAGEEGTKKPEPLSPASYHQPEGVARILNKKAAKLGSSEEVRLTMLPQVGKDGVLRDGDGAVVLPNEDAVCDCSTQSLTSCFARSSRSAIRHSPSKCRLHPSESSWGGEERALPPSE

SEQ ID NO: 664 - protein, 968 aa, Homo sapiens
MVNSSRVQPQQPGDAKRPPAPRAPDPGRLMAGCAAVGASLAAPGGLCEQRGLEIEMQRIRQAAARDPPAGAAASPSPPLSSCSRQAWSRDNPGFEAEEEEEEVEGEEGGMVVEMDVEWRPGSRRSAASSAVSSVGARSRGLGGYHGAGHPSGRRRRREDQGPPCPSPVGGGDPLHRHLPLEGQPPRVAWAERLVRGLRGLWGTRLMEESSTNREKYLKSVLRELVTYLLFLIVLCILTYGMMSSNVYYYTRMMSQLFLDTPVSKTEKTNFKTLSSMEDFWKFTEGSLLDGLYWKMQPSNQTEADNRSFIFYENLLLGVPRIRQLRVRNGSCSIPQDLRDEIKECYDVYSVSSEDRAPFGPRNGTAWIYTSEKDLNGSSHWGIIATYSGAGYYLDLSRTREETAAQVASLKKNVWLDRGTRATFIDFSVYNANINLFCVVRLLVEFPATGGVIPSWQFQPLKLIRYVTTFDFFLAACEIIFCFFIFYYVVEEILEIRIHKLHYFRSFWNCLDVVIVVLSVVAIGINIYRTSNVEVLLQFLEDQNTFPNFEHLAYWQIQFNNIAAVTVFFVWIKLFKFINFNRTMSQLSTTMSRCAKDLFGFAIMFFIIFLAYAQLAYLVFGTQVDDFSTFQECIFTQFRIILGDINFAEIEEANRVLGPIYFTTFVFFMFFILLNMFLAIINDTYSEVKSDLAQQKAEMELSDLIRKGYHKALVKLKLKKNTVDDISESLRQGGGKLNFDELRQDLKGKGHTDAEIEAIFTKYDQDGDQELTEHEHQQMRDDLEKEREDLDLDHSSLPRPMSSRSFPRSLDDSEEDDDEDSGHSSRRRGSISSGVSYEEFQVLVRRVDRMEHSIGSIVSKIDAVIVKLEIMERAKLKRREVLGRLLDGVAEDERLGRDSEIHREQMERLVREELERWESDDAASQISHGLGTPVGLNGQPRPRSSRPSSSQSTEGMEGAGGNGSSNVHV

SEQ ID NO: 665 - protein, 655 aa, Homo sapiens
MSSSNVEVFIPVSQGNTNGFPATASNDLKAFTEGAVLSFHNICYRVKLKSGFLPCRKPVEKEILSNINGIMKPGLNAILGPTGGGKSSLLDVLAARKDPSGLSGDVLINGAPRPANFKCNSGYVVQDDVVMGTLTVRENLQFSAALRLATTMTNHEKNERINRVIQELGLDKVADSKVGTQFIRGVSGGERKRTSIGMELITDPSILFLDEPTTGLDSSTANAVLLLLKRMSKQGRTIIFSIHQPRYSIFKLFDSLTLLASGRLMFHGPAQEALGYFESAGYHCEAYNNPADFFLDIINGDSTAVALNREEDFKATEIIEPSKQDKPLIEKLAEIYVNSSFYKETKAELHQLSGGEKKKKITVFKEISYTTSFCHQLRWVSKRSFKNLLGNPQASIAQIIVTVVLGLVIGAIYFGLKNDSTGIQNRAGVLFFLTTNQCFSSVSAVELFVVEKKLFIHEYISGYYRVSSYFLGKLLSDLLPMRMLPSIIFTCIVYFMLGLKPKADAFFVMMFTLMMVAYSASSMALAIAAGQSVVSVATLLMTICFVFMMIFSGLLVNLTTIASWLSWLQYFSIPRYGFTALQHNEFLGQNFCPGLNATGNNPCNYATCTGEEYLVKQGIDLSPWGLWKNHVALACMIVIFLTIAYLKLLFLKKYS

SEQ ID NO: 666 - protein, 377 aa, Homo sapiens
MKFPGPLENQRLSFLLEKAITREAQMWKVNVRKMPSNQNVSPSQRDEVIQWLAKLKYQFNLYPETFALASSLLDRFLATVKAHPKYLSCIAISCFFLAAKTVEEDERIPVLKVLARDSFCGCSSSEILRMERIILDKLNWDLHTATPLDFLHIFHAIAVSTRPQLLFSLPKLSPSQHLAVLTKQLLHCMACNQLLQFRGSMLALAMVSLEMEKLIPDWLSLTIELLQKAQMDSSQLIHCRELVAHHLSTLQSSLPLNSVYVYRPLKHTLVTCDKGVFRLHPSSVPGPDFSKDNSKPEVPVRGTAAFYHHLPAASGCKQTSTKRKVEEMEVDDFYDGIKRLYNEDNVSENVGSVCGTDLSRQEGHASPCPPLQPVSVM

SEQ ID NO: 667 - protein, 251 aa, Homo sapiens
MLGARLRLWVCALCSVCSMSVLRAYPNASPLLGSSWGGLIHLYTATARNSYHLQIHKNGHVDGAPHQTIYSALMIRSEDAGFVVITGVMSRRYLCMDFRGNIFGSHYFDPENCRFQHQTLENGYDVYHSPQYHFLVSLGRAKRAFLPGMNPPPYSQFLSRRNEIPLIHFNTPIPRRHTRSAEDDSERDPLNVLKPRARMTPAPASCSQELPSAEDNSPMASDPLGVVRGGRVNTHAGGTGPEGCRPFAKFI

SEQ ID NO: 668 - protein, 640 aa, Homo sapiens
MAAGGTGGLREEQRYGLSCGRLGQDNITVLHVKLTETAIRALETYQSHKNLIPFRPSIQFQGLHGLVKIPKNDPLNEVHNFNFYLSNVGKDNPQGSFDCIQQTFSSSGASQLNCLGFIQDKITVCATNDSYQMTRERMTQAEEESRNRSTKVIKPGGPYVGKRVQIRKAPQAVSDTVPERKRSTPMNPANTIRKTHSSSTISQRPYRDRVIHLLALKAYKKPELLARLQKDGVNQKDKNSLGAILQQVANLNSKDLSYTLKDYVFKELQRDWPGYSEIDRRSLESVLSRKLNPSQNAAGTSRSESPVCSSRDAVSSPQKRLLDSEFIDPLMNKKARISHLTNRVPPTLNGHLNPTSEKSAAGLPLPPAAAAIPTPPPLPSTYLPISHPPQIVNSNSNSPSTPEGRGTQDLPVDSFSQNDSIYEDQQDKYTSRTSLETLPPGSVLLKCPKPMEENHSMSHKKSKKKSKKHKEKDQIKKHDIETIEEKEEDLKREEEIAKLNNSSPNSSGGVKEDCTASMEPSAIELPDYLIKYIAIVSYEQRQNYKDDFNAEYDEYRALHARMETVARRFIKLDAQRKRLSPGSKEYQNVHEEVLQEYQKIKQSSPNYHEEKYRCEYLHNKLAHIKRLIGEFDQQQAESWS

SEQ ID NO: 669 - protein, 479 aa, Homo sapiens
MKSQGQHWYSSSDKNCKVSFREKLLIIDSNLGVQDVENLKFLCIGLVPNKKLEKSSSASDVFEHLLAEDLLSEEDPFFLAELLYIIRQKKLLQHLNCTKEEVERLLPTRQRVSLFRNLLYELSEGIDSENLKDMIFLLKDSLPKTEMTSLSFLAFLEKQGKIDEDNLTCLEDLCKTVVPKLLRNIEKYKREKAIQIVTPPVDKEAESYQGEEELVSQTDVKTFLEALPRAAVYRMNRNHRGLCVIVNNHSFTSLKDRQGTHKDAEILSHVFQWLGFTVHIHNNVTKVEMEMVLQKQKCNPAHADGDCFVFCILTHGRFGAVYSSDEALIPIREIMSHFTALQCPRLAEKPKLFFIQACQGEEIQPSVSIEADALNPEQAPTSLQDSIPAEADFLLGLATVPGYVSFRHVEEGSWYIQSLCNHLKKLVPRHEDILSILTAVNDDVSRRVDKQGTKKQMPQPAFTLRKKLVFPVPLDALSL

SEQ ID NO: 670 - protein, 148 aa, Homo sapiens
MAASPARPAVLALTGLALLLLLCWGPGGISGNKLKLMLQKREAPVPTKTKVAVDENKAKEFLGSLKRQKRQLWDRTRPEVQQWYQQFLYMGFDEAKFEDDITYWLNRDRNGHEYYGDYYQRHYDEDSAIGPRSPYGFRHGASVNYDDY

SEQ ID NO: 671 - protein, 684 aa, Homo sapiens
MSAIPAEESDQLLIRPLGAGQEVGRSCIILEFKGRKIMLDCGIHPGLEGMDALPYIDLIDPAEIDLLLISHFHLDHCGALPWFLQKTSFKGRTFMTHATKAIYRWLLSDYVKVSNISADDMLYTETDLEESMDKIETINFHEVKEVAGIKFWCYHAGHVLGAAMFMIEIAGVKLLYTGDFSRQEDRHLMAAEIPNIKPDILIIESTYGTHIHEKREEREARFCNTVHDIVNRGGRGLIPVFALGRAQELLLILDEYWQNHPELHDIPIYYASSLAKKCMAVYQTYVNAMNDKIRKQININNPFVFKHISNLKSMDHFDDIGPSVVMASPGMMQSGLSRELFESWCTDKRNGVIIAGYCVEGTLAKHIMSEPEEITTMSGQKLPLKMSVDYISFSAHTDYQQTSEFIRALKPPHVILVHGEQNEMARLKAALIREYEDNDEVHIEVHNPRNTEAVTLNFRGEKLAKVMGFLADKKPEQGQRVSGILVKRNFNYHILSPCDLSNYTDLAMSTVKQTQAIPYTGPFNLLCYQLQKLTGDVEELEIQEKPALKVFKNITVIQEPGMVVLEWLANPSNDMYADTVTTVILEVQSNPKIRKGAVQKVSKKLEMHVYSKRLEIMLQDIFGEDCVSVKDDSILSVTVDGKTANLNLETRTVECEEGSEDDESLREMVELAAQRLYEALTPVH

SEQ ID NO: 672 - protein, 331 aa, Homo sapiens
MTSPHFSSYDEGPLDVSMAATNLENQLHSAQKNLLFLQREHASTLKGLHSEIRRLQQHCTDLTYELTVKSSEQTGDGTSKSSELKKRCEELEAQLKVKENENAELLKELEQKNAMITVLENTIKEREKKYLEELKAKSHKLTLLSSELEQRASTIAYLTSQLHAAKKKLMSSSGTSDASPSGSPVLASYKPAPPKDKLPETPRRRMKKSLSAPLHPEFEEVYRFGAESRKLLLREPVDAMPDPTPFLLARESAEVHLIKERPLVIPPIASDRSGEQHSPAREKPHKAHVGVAHRIHHATPPQAQPEVKTLAVDQVNGGKVVRKHSGTDRTV

SEQ ID NO: 673 - protein, 1219 aa, Homo sapiens
MFGAGDEDDTDFLSPSGGARLASLFGLDQAAAGHGNEFFQYTAPKQPKKGQGTAATGNQATPKTAPATMSTPTILVATAVHAYRYTNGQYVKQGKFGAAVLGNHTAREYRILLYISQQQPVTVARIHVNFELMVRPNNYSTFYDDQRQNWSIMFESEKAAVEFNKQVCIAKCNSTSSLDAVLSQDLIVADGPAVEVGDSLEVAYTGWLFQNHVLGQVFDSTANKDKLLRLKLGSGKVIKGWEDGMLGMKKGGKRLLIVPPACAVGSEGVIGWTQATDSILVFEVEVRRVKFARDSGSDGHSVSSRDSAAPSPIPGADNLSADPVVSPPTSIPFKSGEPALRTKSNSLSEQLAINTSPDAVKAKLISRMAKMGQPMLPILPPQLDSNDSEIEDVNTLQGGGQPVVTPSVQPSLHPAHPALPQMTSQAPQPSVTGLQAPSAALMQVSSLDSHSAVSGNAQSFQPYAGMQAYAYPQASAVTSQLQPVRPLYPAPLSQPPHFQGSGDMASFLMTEARQHNTEIRMAVSKVADKMDHLMTKVEELQKHSAGNSMLIPSMSVTMETSMIMSNIQRIIQENERLKQEILEKSNRIEEQNDKISELIERNQRYVEQSNLMMEKRNNSLQTATENTQARVLHAEQEKAKVTEELAAATAQVSHLQLKMTAHQKKETELQMQLTESLKETDLLRGQLTKVQAKLSELQETSEQAQSKFKSEKQNRKQLELKVTSLEEELTDLRVEKESLEKNLSERKKKSAQERSQAEEEIDEIRKSYQEELDKLRQLLKKTRVSTDQAAAEQLSLVQAELQTQWEAKCEHLLASAKDEHLQQYQEVCAQRDAYQQKLVQLQEKCLALQAQITALTKQNEQHIKELEKNKSQMSGVEAAASDPSEKVKKIMNQVFQSLRREFELEESYNGRTILGTIMNTIKMVTLQLLNQQEQEKEESSSEEEEEKAEERPRRPSQEQSASASSGQPQAPLNRERPESPMVPSEQVVEEAVPLPPQALTTSQDGHRRKGDSEAEALSEIKDGSLPPELSCIPSHRVLGPPTSIPPEPLGPVSMDSECEESLAASPMAAKPDNPSGKVCVREVAPDGPLQESSTRLSLTSDPEEGDPLALGPESPGEPQPPQLKKDDVTSSTGPHKELSSTEAGSTVAGAALRPSHHSQRSSLSGDEEDELFKGATLKALRPKAQPEEEDEDEVSMKGRPPPTPLFGDDDDDDDIDWLG

SEQ ID NO: 674 - protein, 2325 aa, Homo sapiens
MKKGSQQKIFSKAKIPSSSHSPIPSSMSNMRSRSLSPLIGSETLPFHSGGQWCEQVEIADENNMLLDYQDHKGADSHAGVRYITEALIKKLTKQDNLALIKSLNLSLSKDGGKKFKYIENLEKCVKLEVLNLSYNLIGKIEKLDKLLKLRELNLSYNKISKIEGIENMCNLQKLNLAGNEIEHIPVWLGKKLKSLRVLNLKGNKISSLQDISKLKPLQDLISLILVENPVVTLPHYLQFTIFHLRSLESLEGQPVTTQDRQEAFERFSLEEVERLERDLEKKMIETEELKSKQTRFLEEIKNQDKLNKSLKEEAMLQKQSCEELKSDLNTKNELLKQKTIELTRACQKQYELEQELAFYKIDAKFEPLNYYPSEYAEIDKAPDESPYIGKSRYKRNMFATESYIIDSAQAVQIKKMEPDEQLRNDHMNLRGHTPLDTQLEDKEKKISAAQTRLSELHDEIEKAEQQILRATEEFKQLEEAIQLKKISEAGKDLLYKQLSGRLQLVNKLRQEALDLELQMEKQKQEIAGKQKEIKDLQIAIDSLDSKDPKHSHMKAQKSGKEQQLDIMNKQYQQLESRLDEILSRIAKETEEIKDLEEQLTEGQIAANEALKKDLEGVISGLQEYLGTIKGQATQAQNECRKLRDEKETLLQRLTEVEQERDQLEIVAMDAENMRKELAELESALQEQHEVNASLQQTQGDLSAYEAELEARLNLRDAEANQLKEELEKVTRLTQLEQSALQAELEKERQALKNALGKAQFSEEKEQENSELHAKLKHLQDDNNLLKQQLKDFQNHLNHVVDGLVRPEEVAARVDELRRKLKLGTGEMNIHSPSDVLGKSLADLQKQFSEILARSKWERDEAQVRERKLQEEMALQQEKLATGQEEFRQACERALEARMNFDKRQHEARIQQMENEIHYLQENLKSMEEIQGLTDLQLQEADEEKERILAQLRELEKKKKLEDAKSQEQVFGLDKELKKLKKAVATSDKLATAELTIAKDQLKSLHGTVMKINQERAEELQEAERFSRKAAQAARDLTRAEAEIELLQNLLRQKGEQFRLEMEKTGVGTGANSQVLEIEKLNETMERQRTEIARLQNVLDLTGSDNKGGFENVLEEIAELRREVSYQNDYISSMADPFKRRGYWYFMPPPPSSKVSSHSSQATKDSGVGLKYSASTPVRKPRPGQQDGKEGSQPPPASGYWVYSPIRSGLHKLFPSRDADSGGDSQEESELDDQEEPPFVPPPGYMMYTVLPDGSPVPQGMALYAPPPPLPNNSRPLTPGTVVYGPPPAGAPMVYGPPPPNFSIPFIPMGVLHCNVPEHHNLENEVSRLEDIMQHLKSKKREERWMRASKRQSEKEMEELHHNIDDLLQEKKSLECEVEELHRTVQKRQQQKDFIDGNVESLMTELEIEKSLKHHEDIVDEIECIEKTLLKRRSELREADRLLAEAESELSCTKEKTKNAVEKFTDAKRSLLQTESDAEELERRAQETAVNLVKADQQLRSLQADAKDLEQHKIKQEEILKEINKIVAAKDSDFQCLSKKKEKLTEELQKLQKDIEMAERNEDHHLQVLKESEVLLQAKRAELEKLKSQVTSQQQEMAVLDRQLGHKKEELHLLQGSMVQAKADLQEALRLGETEVTEKCNHIREVKSLLEELSFQKGELNVQISERKTQLTLIKQEIEKEEENLQVVLRQMSKHKTELKNILDMLQLENHELQGLKLQHDQRVSELEKTQVAVLEEKLELENLQQISQQQKGEIEWQKQLLERDKREIERMTAESRALQSCVECLSKEKEDLQEKCDIWEKKLAQTKRVLAAAEENSKMEQSNLEKLELNVRKLQQELDQLNRDKLSLHNDISAMQQQLQEKREAVNSLQEELANVQDHLNLAKQDLLHTTKHQDVLLSEQTRLQKDISEWANRFEDCQKEEETKQQQLQVLQNEIEENKLKLVQQEMMFQRLQKERESEESKLETSKVTLKEQQHQLEKELTDQKSKLDQVLSKVLAAEERVRTLQEEERWCESLEKTLSQTKRQLSEREQQLVEKSGELLALQKEADSMRADFSLLRNQFLTERKKAEKQVASLKEALKIQRSQLEKNLLEQKQENSCIQKEMATIELVAQDNHERARRLMKELNQMQYEYTELKKQMANQKDLERRQMEISDAMRTLKSEVKDEIRTSLKNLNQFLPELPADLEAILERNENLEGELESLKENLPFTMNEGPFEEKLNFSQVHIMDEHWRGEALREKLRHREDRLKAQLRHCMSKQAEVLIKGKRQTEGTLHSLRRQVDALGELVTSTSADSASSPSLSQLESSLTEDSQLGQNQEKNASAR

SEQ ID NO: 675 - protein, 730 aa, Homo sapiens
MASSVAPYEQLVRQVEALKAENSHLRQELRDNSSHLSKLETETSGMKEVLKHLQGKLEQEARVLVSSGQTEVLEQLKALQMDITSLYNLKFQPPTLGPEPAARTPEGSPVHGSGPSKDSFGELSRATIRLLEELDRERCFLLNEIEKEEKEKLWYYSQLQGLSKRLDELPHVETFSMQMDLIRQQLEFEAQHIRSLMEERFGTSDEMVQRAQIRASRLEQIDKELLEAQDRVQQTEPQALLAVKSVPVDEDPETEVPTHPEDGTPQPGNSKVEVVFWLLSMLATRDQEDTARTLLAMSSSPESCVAMRRSGCLPLLLQILHGTEAAAGGRAGAPGAPGAKDARMRANAALHNIVFSQPDQGLARKEMRVLHVLEQIRAYCETCWDWLQARDGGPEGGGAGSAPIPIEPQICQATCAVMKLSFDEEYRRAMNELGGLQAVAELLQVDYEMHKMTRDPLNLALRRYAGMTLTNLTFGDVANKATLCARRGCMEAIVAQLASDSEELHQVVSSILRNLSWRADINSKKVLREAGSVTALVQCVLRATKESTLKSVLSALWNLSAHSTENKAAICQVDGALGFLVSTLTYKCQSNSLAIIESGGGILRNVSSLVATREDYRQVLRDHNCLQTLLQHLTSHSLTIVSNACGTLWNLSARSARDQELLWDLGAVGMLRNLVHSKHKMIAMGSAAALRNLLAHRPAKHQAAATAVSPGSCVPSLYVRKQRALEAELD

SEQ ID NO: 676 - protein, 397 aa, Homo sapiens
MDSLATSINQFALELSKKLAESAQGKNIFFSSWSISTSLTIVYLGAKGTTAAQMAQVLQFNRDQGVKCDPESEKKRKMEFNLSNSEEIHSDFQTLISEILKPNDDYLLKTANAIYGEKTYAFHNKYLEDMKTYFGAEPQPVNFVEASDQIRKDINSWVERQTEGKIQNLLPDDSVDSTTRMILVNALYFKGIWEHQFLVQNTTEKPFRINETTSKPVQMMFMKKKLHIFHIEKPKAVGLQLYYKSRDLSLLILLPEDINGLEQLEKAITYEKLNEWTSADMMELYEVQLHLPKFKLEDSYDLKSTLSSMGMSDAFSQSKADFSGMSSARNLFLSNVFHKAFVEINEQGTEAAAGSGSEIDIRIRVPSIEFNANHPFLFFIRHNKTNTILFYGRLCSP

SEQ ID NO: 677 - protein, 257 aa, Homo sapiens
MPASMFSIDNILAARPRCKDSVLPVAHSAAAPVVFPALHGDSLYGASGGASSDYGAFYPRPVAPGGAGLPAAVSGSRLGYNNYFYGQLHVQAAPVGPACCGAVPPLGAQQCSCVPTPPGYEGPGSVLVSPVPHQMLPYMNVGTLSRTELQLLNQLHCRRKRRHRTIFTDEQLEALENLFQETKYPDVGTREQLARKVHLREEKVEVWFKNRRAKWRRQKRSSSEESENAEKWNKTSSSKASPEKREEEGKSDLDSDS

SEQ ID NO: 678 - protein, 523 aa, Homo sapiens
MARKALKLASWTSMALAASGIYFYSNKYLDPNDFGAVRVGRAVATTAVISYDYLTSLKSVPYGSEEYLQLRSKVHLRSARRLCELCCANRGTFIKVGQHLGALDYLLPEEYTSTLKVLHSQAPQSSMQEIRQVIREDLGKEIHDLFQSFDDTPLGTASLAQVHKAVLHDGRTVAVKVQHPKVRAQSSKDILLMEVLVLAVKQLFPEFEFMWLVDEAKKNLPLELDFLNEGRNAEKVSQMLRHFDFLKVPRIHWDLSTERVLLMEFVDGGQVNDRDYMERNKIDVNEISRHLGKMYSEMIFVNGFVHCDPHPGNVLVRKHPGTGKAEIVLLDHGLYQMLTEEFRLNYCHLWQSLIWTDMKRVKEYSQRLGAGDLYPLFACMLTARSWDSVNRGISQAPVTATEDLEIRNNAANYLPQISHLLNHVPRQMLLILKTNDLLRGIEAALGTRASASSFLNMSRCCIRALAEHKKKNTCSFFRRTQISFSEAFNLWQINLHELILRVKGLKLADRVLALICWLFPAPL

SEQ ID NO: 679 - protein, 796 aa, Homo sapiens
MSAAQVSSSRRQSCYLCDLPRMPWAMIWDFSEPVCRGCVNYEGADRIEFVIETARQLKRAHGCFQDGRSPGPPPPVGVKTVALSAKEAAAAAAAAAAAAAAAQQQQQQQQQQQQQQQQQQQQQQQQQLNHVDGSSKPAVLAAPSGLERYGLSAAAAAAAAAAAAVEQRSRFEYPPPPVSLGSSSHTARLPNGLGGPNGFPKPTPEEGPPELNRQSPNSSSAAASVASRRGTHGGLVTGLPNPGGGGGPQLTVPPNLLPQTLLNGPASAAVLPPPPPHALGSRGPPTPAPPGAPGGPACLGGTPGVSATSSSASSSTSSSVAEVGVGAGGKRPGSVSSTDQERELKEKQRNAEALAELSESLRNRAEEWASKPKMVRDTLLTLAGCTPYEVRFKKDHSLLGRVFAFDAVSKPGMDYELKLFIEYPTGSGNVYSSASGVAKQMYQDCMKDFGRGLSSGFKYLEYEKKHGSGDWRLLGDLLPEAVRFFKEGVPGADMLPQPYLDASCPMLPTALVSLSRAPSAPPGTGALPPAAPSGRGAAASLRKRKASPEPPDSAEGALKLGEEQQRQQWMANQSEALKLTMSAGGFAAPGHAAGGPPPPPPPLGPHSNRTTPPESAPQNGPSPMAALMSVADTLGTAHSPKDGSSVHSTTASARRNSSSPVSPASVPGQRRLASRNGDLNLQVAPPPPSAHPGMDQVHPQNIPDSPMANSGPLCCTICHERLEDTHFVQCPSVPSHKFCFPCSRESIKAQGATGEVYCPSGEKCPLVGSNVPWAFMQGEIATILAGDVKVKKERDP

SEQ ID NO: 680 - protein, 526 aa, Homo sapiens
MVNEGPNQEESDDTPVPESALQADPSVSVHPSVSVHPSVSINPSVSVHPSSSAHPSALAQPSGLAHPSSSGPEDLSVIKVSRRRWAVVLVFSCYSMCNSFQWIQYGSINNIFMHFYGVSAFAIDWLSMCYMLTYIPLLLPVAWLLEKFGLRTIALTGSALNCLGAWVKLGSLKPHLFPVTVVGQLICSVAQVFILGMPSRIASVWFGANEVSTACSVAVFGNQLGIAIGFLVPPVLVPNIEDRDELAYHISIMFYIIGGVATLLLILVIIVFKEKPKYPPSRAQSLSYALTSPDASYLGSIARLFKNLNFVLLVITYGLNAGAFYALSTLLNRMVIWHYPGEEVNAGRIGLTIVIAGMLGAVISGIWLDRSKTYKETTLVVYIMTLVGMVVYTFTLNLGHLWVVFITAGTMGFFMTGYLPLGFEFAVELTYPESEGISSGLLNISAQVFGIIFTISQGQIIDNYGTKPGNIFLCVFLTLGAALTAFIKADLRRQKANKETLENKLQEEEEESNTSKVPTAVSEDHL

SEQ ID NO: 681 - protein, 736 aa, Homo sapiens
MKEMSANTVLDSQRQQKHYGITSPISLASPKEIDHIYTQKLIDAMKPFGVFEDEEELNHRLVVLGKLNNLVKEWISDVSESKNLPPSVVATVGGKIFTFGSYRLGVHTKGADIDALCVAPRHVERSDFFQSFFEKLKHQDGIRNLRAVEDAFVPVIKFEFDGIEIDLVFARLAIQTISDNLDLRDDSRLRSLDIRCIRSLNGCRVTDEILHLVPNKETFRLTLRAVKLWAKRRGIYSNMLGFLGGVSWAMLVARTCQLYPNAAASTLVHKFFLVFSKWEWPNPVLLKQPEESNLNLPVWDPRVNPSDRYHLMPIITPAYPQQNSTYNVSTSTRTVMVEEFKQGLAVTDEILQGKSDWSKLLEPPNFFQKYRHYIVLTASASTEENHLEWVGLVESKIRVLVGNLERNEFITLAHVNPQSFPGNKEHHKDNNYVSMWFLGIIFRRVENAESVNIDLTYDIQSFTDTVYRQANNINMLKEGMKIEATHVKKKQLHHYLPAEILQKKKKQSLSDVNRSSGGLQSKRLSLDSSCLDSSRDTDNGTPFNSPASKSDSPSVGETERNSAEPAAVIVEKPLSVPPAQGLSIPVIGAKVDSTVKTVSPPTVCTIPTVVGRNVIPRITTPHNPAQGQPHLNGMSNITKTVTPKRSHSPSIDGTPKRLKDVEKFIRLESTFKDPRTAEERKRKSVDAIGGESMPIPTIDTSRKKRLPSKELPDSSSPVPANNIRVIKNSIRLTLNR

SEQ ID NO: 682 - protein, 1458 aa, Homo sapiens
MVNTRKSSLRLLGSKSPGPGPGPGAGAEPGATGGSSHFISSRTRSSKTRAASCPAAKAGGSGGAGVTLDEARKVEVDGSLSDSHVSPPAKRTLKQPDSVCKDKSKSRSTGQREEWNLSTGQARLTSQPGATLPNGHSGLSLRSHPLRGEKKGDGDLSCINGDMEVRKSCRSRKNRFESVNQSLLFDQLVNSTAEAVLQEMDNINIRRNRRSGEVERLRMWTDTEFENMDMYSRVKRRRKSLRRNSYGIQNHHEVSTEGEEEESQEEDGDIEVEEAEGEENDRPYNLRQRKTVDRYQAPPIVPAHQKKRENTLFDIHRSPARRSHIRRKKHAIHSSDTTSSDEERFERRKSKSMARARNRCLPMNFRAEDLASGILRERVKVGASLADVDPMNIDKSVRFDSIGGLSHHIHALKEMVVFPLLYPEIFEKFKIQPPRGCLFYGPPGTGKTLVARALANECSQGDKKVAFFMRKGADCLSKWVGESERQLRLLFDQAYLMRPSIIFFDEIDGLAPVRSSRQDQIHSSIVSTLLALMDGLDNRGEIVVIGATNRLDSIDPALRRPGRFDREFLFNLPDQKARKHILQIHTRDWNPKLSDAFLGELAEKCVGYCGADIKALCTEAALIALRRRYPQIYASSHKLQLDVSSIVLSAQDFYHAMQNIVPASQRAVMSSGHALSPIIRPLLERSFNNILAVLQKVFPHAEISQSDKKEDIETLILEDSEDENALSIFETNCHSGSPKKQSSSAAIHKPYLHFTMSPYHQPTSYRPRLLLSGERGSGQTSHLAPALLHTLERFSVHRLDLPALYSVSAKTPEESCAQIFREARRTVPSIVYMPHIGDWWEAVSETVRATFLTLLQDIPSFSPIFLLSTSETMYSELPEEVKCIFRIQYEEVLYIQRPIEEDRRKFFQELILNQASMAPPRRKHAALCAMEVLPLALPSPPRQLSESEKSRMEDQEENTLRELRLFLRDVTKRLATDKRFNIFSKPVDIEEVSDYLEVIKEPMDLSTVITKIDKHNYLTAKDFLKDIDLICSNALEYNPDKDPGDKIIRHRACTLKDTAHAIIAAELDPEFNKLCEEIKEARIKRGLSVTSEQINPHSTGARKTETRVEEAFRHKQRNPMDVWHNSANKCAFRVRRKSRRRSQWGKGIIKKRKVNNLKKDEEDTKFADYENHTEDRKLLENGEFEVSTDCHEENGEETGDLSMTNDESSCDIMDLDQGQRLNNGAGTKENFASTEEESSNESLLVNSSSSLNPEQTSRKETFLKGNCLNGEASTDSFEGIPVLECQNGKLEVVSFCDSGDKCSSEQKILLEDQSKEKPETSTENHGDDLEKLEALECSNNEKLEPGSDVEVKDAELDKEGASKVKKYRKLILEQAKTTSLELVPEEPSEPVPPLIVDRERLKKLLDLLVDKSNNLAVDQLERLYSLLSQCIYRHRKDYDKSQLVEEMERTVHMFETFL

SEQ ID NO: 683 - protein, 936 aa, Homo sapiens
MEPDIIRMYSSSPPPLDNGAEDDDDDEFGEFGGFSEVSPSGVGFVDFDTPDYTRPKEEFVPSNHFMPIHEFSENVDSLTSFKSIKNGNDKDITAELSAPVKGQSDVLLSTTSKEIISSEMLATSIDGMERPGNLNKVVEQRQNVGTLESFSPGDFRTNMNVVHQNKQLESCNGEKPPCLEILTNGFAVLETVNPQGTDDLDNVADSKGRKPLSTHSTEYNLDSVPSPAEEFADFATFSKKERIQLEEIECAVLNDREALTIRENNKINRVNELNSVKEVALGRSLDNKGDTDGEDQVCVSEISIVTNRGFSVEKQGLPTLQQDEFLQSGVQSKAWSLVDSADNSEAIRREQCKTEEKLDLLTSKCAHLCMDSVKTSDDEVGSPKEESRKFTNFQSPNIDPTEENDLDDSLSVKNGDSSNDFVTCNDINEDDFGDFGDFGSASGSTPPFVTGTQDSMSDATFEESSEHFPHFSEPGDDFGEFGDINAVSCQEETILTKSDLKQTSDNLSEECQLARKSSGTGTEPVAKLKNGQEGEIGHFDSVPNIQDDCNGFQDSDDFADFSSAGPSQVVDWNAFEDEQKDSCSWAAFGDQQATESHHRKEAWQSHRTDENIDTPGTPKTHSVPSATSKGAVASGHLQESATSVQTALLNRLERIFEACFPSILVPDAEEEVTSLKHLLETSTLPIKTREALPESGELLDVWTELQDIHDAHGLRYQWGGSHSNKKLLSSLGIDTRNILFTGNKKQPVIVPMYAAGLGMLEPTKEPLKPLSAAEKIASIGQTATMSPDMNTCTSDQFQESLPPVQFDWSSSGLTNPLDASGGSTLLNLDFFGPVDDSSSSSSTTIPGVDPELYELTTSKLEISTSSLKVTDAFARLMSTVEKTSTSTRKPKREEHLSEEAIKVIAGLPDLTFMHAKVLMFPATLTPSTSSQEKADG

SEQ ID NO: 684 - protein, 909 aa, Homo sapiens
MEPDIIRMYSSSPPPLDNGAEDDDDDEFGEFGGFSEVSPSGVGFVDFDTPDYTRPKEEFVPSNHFMPIHEFSENVDSLTSFKSIKNGNDKDITAELSAPVKGQSDVLLSTTSKEIISSEMLATSIDGMERPGNLNKVVEQRQNVGTLESFSPGDFRTNMNVVHQNKQLESCNGEKPPCLEILTNGFAVLETVNPQGTDDLDNVADSKGRKPLSTHSTEYNLDSVPSPAEEFADFATFSKKERIQLEEIECAVLNDREALTIRENNKINRVNELNSVKEVALGRSLDNKGDTDGEDQVCVSEISIVTNRGFSVEKQGLPTLQQDEFLQSGVQSKAWSLVDSADNSEAIRREQCKTEEKLDLLTSKCAHLCMDSVKTSDDEVGSPKEESRKFTNFQSPNIDPTEENDLDDSLSVKNGDSSNDFVTCNDINEDDFGDFGDFGSASGSTPPFVTGTQDSMSDATFEESSEHFPHFSEPGDDFGEFGDINAVSCQEETILTKSDLKQTSDNLSEECQLARKSSGTGTEPVAKLKNGQEGEIGHFDSVPNIQDDCNGFQDSDDFADFSSAGPSQVVDWNAFEDEQKDSCSWAAFGDQQATESHHRKEAWQSHRTDENIDTPGTPKTHSVPSATSKGAVASGHLQESATSVQTALLNRLERIFEACFPSILVPDAEEEVTSLKHLLETSTLPIKTREALPESGELLDVWTELQDIHDAHGLRYQWGGSHSNKKLLSSLGIDTRNILFTGNKKQPVIVPMYAAGLGMLEPTKEPLKPLSAAEKIASIGQTATMSPDMNTCTSDQFQESLPPVQFDWSSSGLTNPLDGVDPELYELTTSKLEISTSSLKVTDAFARLMSTVEKTSTSTSRKPKREEHLSEEAIKVIAGLPDLTFMHAKVLMFPATLTPSTSSQEKADG

SEQ ID NO: 685 - protein, 728 aa, Homo sapiens
MLLPQGKEAVEGKKCQGRQRRAGLSEVWSRKLRNESLGTWSTQGCKTVLTDASHTKCLCDRLSTFAILAQQPREIIMESSGTPSVTLIVGSGLSCLALITLAVVYAALWRYIRSERSIILINFCLSIISSNILILVGQTQTHNKSICTTTTAFLHFFFLASFCWVLTEAWQSYMAVTGKIRTRLIRKRFLCLGWGLPALVVATSVGFTRTKGYGTDHYCWLSLEGGLLYAFVGPAAAVVLVNMVIGILVFNKLVSRDGILDKKLKHRAGQMSEPHSGLTLKCAKCGVVSTTALSATTASNAMASLWSSCVVLPLLALTWMSAVLAMTDKRSILFQILFAVFDSLQGFVIVMVHCILRREVQDAFRCRLRNCQDPINADSSSSFPNGHAQIMTDFEKDVDIACRSVLHKDIGPCRAATITGTLSRISLNDDEEEKGTNPEGLSYSTLPGNVISKVIIQQPTGLHMPMSMNELSNPCLKKENSELRRTVYLCTDDNLRGADMDIVHPQERMMESDYIVMPRSSVNNQPSMKEESKMNIGMETLPHERLLHYKVNPEFNMNPPVMDQFNMNLEQHLAPQEHMQNLPFEPRTAVKNFMASELDDNAGLSRSETGSTISMSSLERRKSRYSDLDFEKVMHTRKRHMELFQELNQKFQTLDRFRDIPNTSSMENPAPNKNPWDTFKNPSEYPHYTTINVLDTEAKDALELRPAEWEKCLNLPLDVQEGDFQTEV

SEQ ID NO: 686 - protein, 1173 aa, Homo sapiens
MTRRCMPARPGFPSSPAPGSSPPRCHLRPGSTAHAAAGKRTESPGDRKQSIIDFFKPASKQDRHMLDSPQKSNIKYGGSRLSITGTEQFERKLSSPKESKPKRVPPEKSPIIEAFMKGVKEHHEDHGIHESRRPCLSLASKYLAKGTNIYVPSSYHLPKEMKSLKKKHRSPERRKSLFIHENNEKNDRDRGKTNADSKKQTTVAEADIFNNSSRSLSSRSSLSRHHPEESPLGAKFQLSLASYCRERELKRLRKEQMEQRINSENSFSEASSLSLKSSIERKYKPRQEQRKQNDIIPGKNNLSNVENGHLSRKRSSSDSWEPTSAGSKQNKFPEKRKRNSVDSDLKSTRESMIPKARESFLEKRPDGPHQKEKFIKHIALKTPGDVLRLEDISKEPSDETDGSSAGLAPSNSGNSGHHSTRNSDQIQVAGTKETKMQKPHLPLSQEKSAIKKASNLQKNKTASSTTKEKETKLPLLSRVPSAGSSLVPLNAKNCALPVSKKDKERSSSKECSGHSTESTKHKEHKAKTNKADSNVSSGKISGGPLRSEYGTPTKSPPAALEVVPCIPSPAAPSDKAPSEGESSGNSNAGSSALKRKLRGDFDSDEESLGYNLDSDEEEETLKSLEEIMALNFNQTPAATGKPPALSKGLRSQSSDYTGHVHPGTYTNTLERLVKEMEDTQRLDELQKQLQEDIRQGRGIKSPIRIGEEDSTDDEDGLLEEHKEFLKKFSVTIDAIPDHHPGEEIFNFLNSGKIFNQYTLDLRDSGFIGQSAVEKLILKSGKTDQIFLTTQGFLTSAYHYVQCPVPVLKWLFRMMSVHTDCIVSVQILSTLMEITIRNDTFSDSPVWPWIPSLSDVAAVFFNMGIDFRSLFPLENLQPDFNEDYLVSETQTTSRGKESEDSSYKPIFSTLPETNILNVVKFLGLCTSIHPEGYQDREIMLLILMLFKMSLEKQLKQIPLVDFQSLLINLMKNIRDWNTKVPELCLGINELSSHPHNLLWLVQLVPNWTSRGRQLRQCLSLVIISKLLDEKHEDVPNASNLQVSVLHRYLVQMKPSDLLKKMVLKKKAEQPDGIIDDSLHLELEKQAYYLTYILLHLVGEVSCSHSFSSGQRKHFVLLCGALEKHVKCDIREDARLFYRTKVKDLVARIHGKWQEIIQNCRPTQGQLHDFWVPDS

SEQ ID NO: 687 - protein, 398 aa, Homo sapiens
MWLLLTMASLISVLGTTHGLFGKLHPGSPEVTMNISQMITYWGYPNEEYEVVTEDGYILEVNRIPYGKKNSGNTGQRPVVFLQHGLLASATNWISNLPNNSLAFILADAGYDVWLGNSRGNTWARRNLYYSPDSVEFWAFSFDEMAKYDLPATIDFIVKKTGQKQLHYVGHSQGTTIGFIAFSTNPSLAKRIKTFYALAPVATVKYTKSLINKLRFVPQSLFKFIFGDKIFYPHNFFDQFLATEVCSREMLNLLCSNALFIICGFDSKNFNTSRLDVYLSHNPAGTSVQNMFHWTQAVKSGKFQAYDWGSPVQNRMHYDQSQPPYYNVTAMNVPIAVWNGGKDLLADPQDVGLLLPKLPNLIYHKEIPFYNHLDFIWAMDAPQEVYNDIVSMISEDKK

SEQ ID NO: 688 - protein, 317 aa, Homo sapiens
MSCTRMIQVLDPRPLTSSVMPVDVAMRLCLAHSPPVKSFLGPYDEFQRRHFVNKLKPLKSCLNIKHKAKSQNDWKCSHNQAKKRVVFADSKGLSLTAIHVFSDLPEEPAWDLQFDLLDLNDISSALKHHEEKNLILDFPQPSTDYLSFRSHFQKNFVCLENCSLQERTVTGTVKVKNVSFEKKVQIRITFDSWKNYTDVDCVYMKNVYGGTDSDTFSFAIDLPPVIPTEQKIEFCISYHANGQVFWDNNDGQNYRIVHVQWKPDGVQTQMAPQDCAFHQTSPKTELESTIFGSPRLASGLFPEWQSWGRMENLASYR

SEQ ID NO: 689 - protein, 714 aa, Homo sapiens
MRKKRGREDESYNISEVMSKEEILSVAKKNKKENEDENSSSTNLCVEDLQKNKDSNSIIKDRLSETVRQNTKFFFDPVRKCNGQPVPFQQPKHFTGGVMRWYQVEGMEWLRMLWENGINGILADEMGLGKTVQCIATIALMIQRGVPGPFLVCGPLSTLPNWMAEFKRFTPDIPTMLYHGTQEERQKLVRNIYKRKGTLQIHPVVITSFEIAMRDRNALQHCYWKYLIVDEGHRIKNMKCRLIRELKRFNADNKLLLTGTPLQNNLSELWSLLNFLLPDVFDDLKSFESWFDITSLSETAEDIIAKEREQNVLHMLHQILTPFLLRRLKSDVALEVPPKREVVVYAPLSKKQEIFYTAIVNRTIANMFGSSEKETIELSPTGRPKRRTRKSINYSKIDDFPNELEKLISQIQPEVDRERAVVEVNIPVESEVNLKLQNIMMLLRKCCNHPYLIEYPIDPVTQEFKIDEELVTNSGKFLILDRMLPELKKRGHKVLLFSQMTSMLDILMDYCHLRDFNFSRLDGSMSYSEREKNMHSFNTDPEVFIFLVSTRAGGLGINLTAADTVIIYDSDWNPQSDLQAQDRCHRIGQTKPVVVYRLVTANTIDQKIVERAAAKRKLEKLIIHKNHFKGGQSGLNLSKNFLDPKELMELLKSRDYEREIKGSREKVISDKDLELLLDRSDLIDQMNASGPIKEKMGIFKILENSEDSSPECLF

SEQ ID NO: 690 - protein, 838 aa, Homo sapiens
MPAERPAGSGGSEAPAMVEQLDTAVITPAMLEEEEQLEAAGLERERKMLEKARMSWDRESTEIRYRRLQHLLEKSNIYSKFLLTKMEQQQLEEQKKKEKLERKKESLKVKKGKNSIDASEEKPVMRKKRGREDESYNISEVMSKEEILSVAKKNKKENEDENSSSTNLCVEDLQKNKDSNSIIKDRLSETVRQNTKFFFDPVRKCNGQPVPFQQPKHFTGGVMRWYQVEGMEWLRMLWENGINGILADEMGLGKTVQCIATIALMIQRGVPGPFLVCGPLSTLPNWMAEFKRFTPDIPTMLYHGTQEERQKLVRNIYKRKGTLQIHPVVITSFEIAMRDRNALQHCYWKYLIVDEGHRIKNMKCRLIRELKRFNADNKLLLTGTPLQNNLSELWSLLNFLLPDVFDDLKSFESWFDITSLSETAEDIIAKEREQNVLHMLHQILTPFLLRRLKSDVALEVPPKREVVVYAPLSKKQEIFYTAIVNRTIANMFGSSEKETIELSPTGRPKRRTRKSINYSKIDDFPNELEKLISQIQPEVDRERAVVEVNIPVESEVNLKLQNIMMLLRKCCNHPYLIEYPIDPVTQEFKIDEELVTNSGKFLILDRMLPELKKRGHKVLLFSQMTSMLDILMDYCHLRDFNFSRLDGSMSYSEREKNMHSFNTDPEVFIFLVSTRAGGLGINLTAADTVIIYDSDWNPQSDLQAQDRCHRIGQTKPVVVYRLVTANTIDQKIVERAAAKRKLEKLIIHKNHFKGGQSGLNLSKNFLDPKELMELLKSRDYEREIKGSREKVISDKDLELLLDRSDLIDQMNASGPIKEKMGIFKILENSEDSSPECLF

SEQ ID NO: 691 - protein, 370 aa, Homo sapiens
MASSTTRGPRVSDLFSGLPPAVTTPANQSAEASAGNGSVAGADAPAVTPFQSLQLVHQLKGLIVLLYSVVVVVGLVGNCLLVLVIARVRRLHNVTNFLIGNLALSDVLMCTACVPLTLAYAFEPRGWVFGGGLCHLVFFLQPVTVYVSVFTLTTIAVDRYVVLVHPLRRRISLRLSAYAVLAIWALSAVLALPAAVHTYHVELKPHDVRLCEEFWGSQERQRQLYAWGLLLVTYLLPLLVILLSYVRVSVKLRNRVVPGCVTQSQADWDRARRRRTFCLLVVIVVVFAVCWLPLHVFNLLRDLDPHAIDPYAFGLVQLLCHWLAMSSACYNPFIYAWLHDSFREELRKLLVAWPRKIAPHGQNMTVSVVI

SEQ ID NO: 692 - protein, 269 aa, Homo sapiens
MSSYFVNSFSGRYPNGPDYQLLNYGSGSSLSGSYRDPAAMHTGSYGYNYNGMDLSVNRSSASSSHFGAVGESSRAFPAPAQEPRFRQAASSCSLSSPESLPCTNGDSHGAKPSASSPSDQATSASSSANFTEIDEASASSEPEEAASQLSSPSLARAQPEPMATSTAAPEGQTPQIFPWMRKLHISHDMTGPDGKRARTAYTRYQTLELEKEFHFNRYLTRRRRIEIAHALCLSERQIKIWFQNRRMKWKKDNKLKSMSLATAGSAFQP

SEQ ID NO: 693 - protein, 217 aa, Homo sapiens
MSSLYYANTLFSKYPASSSVFATGAFPEQTSCAFASNPQRPGYGAGSGASFAASMQGLYPGGGGMAGQSAAGVYAAGYGLEPSSFNMHCAPFEQNLSGVCPGDSAKAAGAKEQRDSDLAAESNFRIYPWMRSSGTDRKRGRQTYTRYQTLELEKEFHYNRYLTRRRRIEIAHTLCLTERQIKIWFQNRRMKWKKENKTAGPGTTGQDRAEAEEEEEE

SEQ ID NO: 694 - protein, 139 aa, Homo sapiens
MASLFRSYLPAIWLLLSQLLRESLAAELRGCGPRFGKHLLSYCPMPEKTFTTTPGGWLLESGRPKEMVSTSNNKDGQALGTTSEFIPNLSPELKKPLSEGQPSLKKIILSRKKRSGRHRFDPFCCEVICDDGTSVKLCT

SEQ ID NO: 695 - protein, 715 aa, Homo sapiens
MSLDCTSHIALGAASPAPEETYDHLSEVPVTREQLNHYRNVAQNARSELAATLVKFECAQSELQDLRSKMLSKEVSCQELKAEMESYKENNARKSSLLTSLRDRVQELEEESAALSTSKIRTEITAHAAIKENQELKKKVVELNEKLQKCSKENEENKKQVSKNCRKHEEFLTQLRDCLDPDERNDKASDEDLILKLRDLRKENEFVKGQIVILEETINVHEMEAKASRETIMRLASEVNREQKKAASCTEEKEKLNQDLLSAVEAKEALEREVKIFQERLLAGQQVWDASKQEVSLLKKSSSELEKSLKASQDAVTTSQSQYFSFREKIAALLRGRLSMTGSTEDTILEKIREMDSREESRDRMVSQLEAQISELVEQLGKESGFHQKALQRAQKAENMLETLQGQLTHLEAELVSGGVLRDNLNFEKQKYLKFLDQLSQKMKLDQMAAELGFDMRLDVVLARTEQLVRLESNAVIENKTIAHNLQRKLKTQKERLESKELHMSLLRQKIAQLEEEKQARTALVVERDNAHLTIRNLQKKVERLQKELNTCRDLHTELKAKLADTNELKIKTLEQTKAIEDLNKSRDQLEKMKEKAEKKLMSVKSELDTTEHEAKENKERARNMIEVVTSEMKTLKKSLEEAEKREKQLADFREVVSQMLGLNVTSLALPDYEIIKCLERLVHSHQHHFVTCACLKDVTTGQERHPQGHLQLLH

SEQ ID NO: 696 - protein, 1544 aa, Homo sapiens
MAAPQDLDIAVWLATVHLEQYADTFRRHGLATAGAARGLGHEELKQLGISATGHRKRILRLLQTGTEEGSLDPKSDSAMEPSPSPAPQAQPPKPVPKPRTVFGGLSGPATTQRPGLSPALGGPGVSRSPEPSPRPPPLPTSSSEQSSALNTVEMMPNSIYFGLDSRGRAQAAQDKAPDSSQISAPTPALRPTTGTVHIMDPGCLYYGVQPVGTPGAPDRRESRGVCQGRAEHRLSRQDLEAREDAGYASLELPGDSTLLSPTLETEETSDDLISPYASFSFTADRLTPLLSGWLDKLSPQGNYVFQRRFVQFNGRSLMYFGSDKDPFPKGVIPLTAIEMTRSSKDNKFQVITGQRVFVFRTESEAQRDMWCSTLQSCLKEQRLLGHPRPPQPPRPLRTGMLELRGHKAKVFAALSPGELALYKSEQAFSLGIGICFIELQGCSVRETKSRSFDLLTPHRCFSFTAESGGARQSWAAALQEAVTETLSDYEVAEKIWSNRANRQCADCGSSRPDWAAVNLGVVICKQCAGQHRALGSGISKVQSLKLDTSVWSNEIVQLFIVLGNDRANRFWAGTLPPGEGLHPDATPGPRGEFISRKYRLGLFRKPHPQYPDHSQLLQALCAAVARPNLLKNMTQLLCVEAFEGEEPWFPPAPDGSCPGLLPSDPSPGVYNEVVVRATYSGFLYCSPVSNKAGPSPPRRGRDAPPRLWCVLGAALEMFASENSPEPLSLIQPQDIVCLGVSPPPTDPGDRFPFSFELILAGGRIQHFGTDGADSLEAWTSAVGKWFSPLSCHQLLGPGLLRLGRLWLRSPSHTAPAPGLWLSGFGLLRGDHLFLCSAPGPGPPAPEDMVHLRRLQEISVVSAADTPDKKEHLVLVETGRTLYLQGEGRLDFTAWNAAIGGAAGGGGTGLQEQQMSRGDIPIIVDACISFVTQHGLRLEGVYRKGGARARSLRLLAEFRRDARSVKLRPGEHFVEDVTDTLKRFFRELDDPVTSARLLPRWREAAELPQKNQRLEKYKDVIGCLPRVNRRTLATLIGHLYRVQKCAALNQMCTRNLALLFAPSVFQTDGRGEHEVRVLQELIDGYISVFDIDSDQVAQIDLEVSLITTWKDVQLSQAGDLIMEVYIEQQLPDNCVTLKVSPTLTAEELTNQVLEMRGTAAGMDLWVTFEIREHGELERPLHPKEKVLEQALQWCQLPEPCSASLLLKKVPLAQAGCLFTGIRRESPRVGLLRCREEPPRLLGSRFQERFFLLRGRCLLLLKEKKSSKPEREWPLEGAKVYLGIRKKLKPPTPWGFTLILEKMHLYLSCTDEDEMWDWTTSILKAQHDDQQPVVLRRHSSSDLARQKFGTMPLLPIRGDDSGATLLSANQTLRRLHNRRTLSMFFPMKSSQGSVEEQEELEEPVYEEPVYEEVGAFPELIQDTSTSFSTTREWTVKPENPLTSQKSLDQPFLSKSSTLGQEERPPEPPPGPPSKSSPQARGSLEEQLLQELSSLILRKGETTAGLGSPSQPSSPQSPSPTGLPTQTPGFPTQPPCTSSPPSSQPLT

SEQ ID NO: 697 - protein, 801 aa, Homo sapiens
MEASGKLICRQRQVLFSFLLLGLSLAGAAEPRSYSVVEETEGSSFVTNLAKDLGLEQREFSRRGVRVVSRGNKLHLQLNQETADLLLNEKLDREDLCGHTEPCVLRFQVLLESPFEFFQAELQVIDINDHSPVFLDKQMLVKVSESSPPGTAFPLKNAEDLDIGQNNIENYIISPNSYFRVLTRKRSDGRKYPELVLDKALDREEEAELRLTLTALDGGSPPRSGTAQVYIEVVDVNDNAPEFEQPFYRVQISEDSPISFLVVKVSATDVDTGVNGEISYSLFQASDEISKTFKVDFLTGEIRLKKQLDFEKFQSYEVNIEARDAGGFSGKCTVLIQVIDVNDHAPEVTMSAFTSPIPENAPETVVALFSVSDLDSGENGKISCSIQEDLPFLLKSSVGNFYTLLTETPLDRESRAEYNVTITVTDLGTPRLTTHLNMTVLVSDVNDNAPAFTQTSYTLFVRENNSPALHIGSVSATDRDSGTNAQVTYSLLPPQDPHLPLASLVSINTDNGHLFALRSLDYEALQAFEFRVGASDRGSPALSSEALVRVLVLDANDNSPFVLYPLQNGSAPCTELVPRAAEPGYLVTKVVAVDGDSGQNAWLSYQLLKATEPGLFGVWAHNGEVRTARLLSERDAAKQRLVVLVKDNGEPPCSATATLHVLLVDGFSQPYLPLPEAAPAQGQADSLTVYLVVALASVSSLFLFSVLLFVAVLLCRRSRAASVGRCSVPEGPFPGHLVDVRGTGSLSQNYQYEVCLAGGSGTNEFQLLKPVLPNIQGHSFGPEMEQNSNFRNGFGFSLQLK

SEQ ID NO: 698 - protein, 800 aa, Homo sapiens
MAVRELCFPRQRQVLFLFLFWGVSLAGSGFGRYSVTEETEKGSFVVNLAKDLGLAEGELAARGTRVVSDDNKQYLLLDSHTGNLLTNEKLDREKLCGPKEPCMLYFQILMDDPFQIYRAELRVRDINDHAPVFQDKETVLKISENTAEGTAFRLERAQDPDGGLNGIQNYTISPNSFFHINISGGDEGMIYPELVLDKALDREEQGELSLTLTALDGGSPSRSGTSTVRIVVLDVNDNAPQFAQALYETQAPENSPIGFLIVKVWAEDVDSGVNAEVSYSFFDASENIRTTFQINPFSGEIFLRELLDYELVNSYKINIQAMDGGGLSARCRVLVEVLDTNDNPPELIVSSFSNSVAENSPETPLAVFKINDRDSGENGKMVCYIQENLPFLLKPSVENFYILITEGALDREIRAEYNITITVTDLGTPRLKTEHNITVLVSDVNDNAPAFTQTSYTLFVRENNSPALHIGSVSATDRDSGTNAQVTYSLLPPQDPHLPLASLVSINADNGHLFALRSLDYEALQAFEFRVGATDRGSPALSREALVRVLVLDANDNSPFVLYPLQNGSAPCTELVPRAAEPGYLVTKVVAVDGDSGQNAWLSYQLLKATEPGLFGVWAHNGEVRTARLLSERDAAKHRLVVLVKDNGEPPRSATATLHLLLVDGFSQPYLPLPEAAPAQAQAEADLLTVYLVVALASVSSLFLLSVLLFVAVRLCRRSRAASVGRCSVPEGPFPGHLVDVRGAETLSQSYQYEVCLTGGPGTSEFKFLKPVISDIQAQGPGRKGEENSTFRNSFGFNIQ

SEQ ID NO: 699 - protein, 798 aa, Homo sapiens
MEIRGALDLRKRQVLIFLVLLGLSRAGTESAHYSVAEETEIGSFVANLARDLGLGVEELSSREARVVSDDNKKYLHLDLLTGNLLLNEKLDRDELCGSTEPCVLHFQVVLENPLQFFRFELCVKDINDHSPTFLDKEILIKISEGTTVGATFLMESAQDLDVGSNSLQNYTISPNSHFYIKIPDSSDRKIYPELVLDRALDYEQEAELRLTLTAVDGGSPPKSGTTLVLIKVLDINDNAPEFPQSLYEVQVPEDRPLGSWIATISAKDLDAGNYGKISYTFFHASEDIRKTFEINPISGEVNLRSPLDFEVIQSYTINIQATDGGGLSGKCTLLVKVMDINDNPPEVTISSITKRIPENASETLVALFSILDQDSGDNGRMICSIQDNLPFFLKPTFKNFFTLVSEKALDRESQAEYNITITVTDLGTPRLKTEYNITVLLSDVNDNAPTFTQTSYTLFVRENNSPALHIGSVSATDRDSGTNAQVNYSLLPPQDRHLPLASLVSINADNGHLFALRSLDYEALQEFEFRVGATDRGSPALSSEALVRVLVLDANDNSPFVLYPLQNGSAPCTELVPRAAEPGYLVTKVVAVDGDSGQNAWLSYQLLKATEPGLFGVWAHNGEVRTARLLSERDAAKHRLVVLVKDNGEPPRSATATLHVLLVDGFSQPYLPLPEAAPAQAQADSLTVYLVVALASVSSLFLFSVLLFVAVRLCRRSRAASVGRCSVPEGPFPGHLVDVSGTGTLSQSYQYEVCLTGGSGTNEFKFLKPIIPNFQVHDTGRNMGEIENFRNSFGLNIQ

SEQ ID NO: 700 - protein, 795 aa, Homo sapiens
MENGGAGTLQIRQVLLFFVLLGMSQAGSETGNFLVMEELQSGSFVGNLAKTLGLEVSELSSRGARVVSNDNKECLQLDTNTGDLLLREMLDREELCGSNEPCVLYFQVLMKNPTQFLQIELQVRDINDHSPVFLEKEMLLEIPENSPVGAVFLLESAKDLDVGINAVKSYTINPNSHFHVKIRVNPDNRKYPELVLDKALDYEERPELSFILTALDGGSPPRSGTALVRVVVVDINDNSPEFEQAFYEVKILENSILGSLVVTVSAWDLDSGTNSELSYTFSHASEDIRKTFEINQKSGDITLTAPLDFEAIESYSIIIQATDGGGLFGKSTVRIQVMDVNDNAPEITVSSITSPIPENTPETVVMVFRIRDRDSGDNGKMVCSIPEDIPFVLKSSVNNYYTLETERPLDRESRAEYNITITVTDLGTPRLKTEHNITVLVSDVNDNAPAFTQTSYALFVRENNSPALHIGSISATDRDSGTNAQVNYSLLPSQDPHLPLASLVSINADNGHLFALRSLDYEALQGFQFRVGATDHGSPALSSEALVRVLVLDANDNSPFVLYPLQNGSAPCTELVPWAAEPGYLVTKVVAVDGDSGQNAWLSYQLLKATEPGLFGVWAHNGEVRTARLLSERDAAKHRLVVLVKDNGEPPRSATATLHVLLVDGFSQPYLPLPEAAPAQAQADSLTVYLVVALASVSSLFLFSVLLFVAVRLCRRSRAAPVGRCSVPEGPFPGHLVDVSGTGTLSQSYHYEVCVTGGSRSNKFKFLKPIIPNFLPQSTGSEVEENPPFQNNLGF

SEQ ID NO: 701 - protein, 1299 aa, Homo sapiens
MSLQEMFRFPMGLLLGSVLLVASAPATLEPPGCSNKEQQVTVSHTYKIDVPKSALVQVDADPQPLSDDGASLLALGEAREEQNIIFRHNIRLQTPQKDCELAGSVQDLLARVKKLEEEMVEMKEQCSAQRCCQGVTDLSRHCSGHGTFSLETCSCHCEEGREGPACERLACPGACSGHGRCVDGRCLCHEPYVGADCGYPACPENCSGHGECVRGVCQCHEDFMSEDCSEKRCPGDCSGHGFCDTGECYCEEGFTGLDCAQVVTPQGLQLLKNTEDSLLVSWEPSSQVDHYLLSYYPLGKELSGKQIQVPKEQHSYEILGLLPGTKYIVTLRNVKNEVSSSPQHLLATTDLAVLGTAWVTDETENSLDVEWENPSTEVDYYKLRYGPMTGQEVAEVTVPKSSDPKSRYDITGLHPGTEYKITVVPMRGELEGKPILLNGRTEIDSPTNVVTDRVTEDTATVSWDPVQAVIDKYVVRYTSADGDTKEMAVHKDESSTVLTGLKPGEAYKVYVWAERGNQGSKKADTNALTEIDSPANLVTDRVTENTATISWDPVQATIDKYVVRYTSADDQETREVLVGKEQSSTVLTGLRPGVEYTVHVWAQKGDRESKKADTNAPTDIDSPKNLVTDRVTENMATVSWDPVQAAIDKYVVRYTSAGGETREVPVGKEQSSTVLTGLRPGMEYMVHVWAQKGDQESKKADTKAQTDIDSPQNLVTDRVTENMATVSWDPVRATIDRYVVRYTSAKDGETREVPVGKEQSSTVLTGLRPGVEYTVHVWAQKGAQESKKADTKAQTDIDSPQNLVTDWVTENTATVSWDPVQATIDRYVVHYTSANGETREVPVGKEQSSTVLTGLRPGMEYTVHVWAQKGNQESKKADTKAQTEIDGPKNLVTDWVTENMATVSWDPVQATIDKYMVRYTSADGETREVPVGKEHSSTVLTGLRPGMEYMVHVWAQKGAQESKKADTKAQTELDPPRNLRPSAVTQSGGILTWTPPSAQIHGYILTYQFPDGTVKEMQLGREDQRFALQGLEQGATYPVSLVAFKGGRRSRNVSTTLSTVGARFPHPSDCSQVQQNSNAASGLYTIYLHGDASRPLQVYCDMETDGGGWIVFQRRNTGQLDFFKRWRSYVEGFGDPMKEFWLGLDKLHNLTTGTPARYEVRVDLQTANESAYAIYDFFQVASSKERYKLTVGKYRGTAGDALTYHNGWKFTTFDRDNDIALSNCALTHHGGWWYKNCHLANPNGRYGETKHSEGVNWEPWKGHEFSIPYVELKIRPHGYSREPVLGRKKRTLRGRLRTF

SEQ ID NO: 702 - protein, 592 aa, Homo sapiens
MRGRDLCSSTQSQALGSLRTTTPAFTLNIPSEANHTEQPPAGLGARLQEAGVSIPPRRGRPTPTLEKKKKPHLMAEDEPSGALLKPLVFRVDETTPAVVQSVLLERGWNKFDKQEQNAEDWNLYWRTSSFRMTEHNSVKPWQQLNHHPGTTKLTRKDCLAKHLKHMRRMYGTSLYQFIPLTFVMPNDYTKFVAEYFQERQMLGTKHSYWICKPAELSRGRGILIFSDFKDFIFDDMYIVQKYISNPLLIGRYKCDLRIYVCVTGFKPLTIYVYQEGLVRFATEKFDLSNLQNNYAHLTNSSINKSGASYEKIKEVIGHGCKWTLSRFFSYLRSWDVDDLLLWKKIHRMVILTILAIAPSVPFAANCFELFGFDILIDDNLKPWLLEVNYSPALTLDCSTDVLVKRKLVHDIIDLIYLNGLRNEGREASNATHGNSNIDAAKSDRGGLDAPDCLPYDSLSFTSRMYNEDDSVVEKAVSVRPEAAPASQLEGEMSGQDFHLSTREMPQSKPKLRSRHTPHKTLMPYASLFQSHSCKTKTSPCVLSDRGKAPDPQAGNFVLVFPFNEATLGASRNGLNVKRIIQELQKLMNKQHS

SEQ ID NO: 703 - protein, 583 aa, Homo sapiens
MEVAANCSLRVKRPLLDPRFEGYKLSLEPLPCYQLELDAAVAEVKLRDDQYTLEHMHAFGMYNYLHCDSWYQDSVYYIDTLGRIMNLTVMLDTALGKPREVFRLPTDLTACDNRLCASIHFSSSTWVTLSDGTGRLYVIGTGERGNSASEKWEIMFNEELGDPFIIIHSISLLNAEEHSIATLLLRIEKEELDMKGSGFYVSLEWVTISKKNQDNKKYEIIKRDILRGKSVPHYAAIEPDGNGLMIVSYKSLTFVQAGQDLEENMDEDISEKIKEPLYYWQQTEDDLTVTIRLPEDSTKEDIQIQFLPDHINIVLKDHQFLEGKLYSSIDHESSTWIIKESNSLEISLIKKNEGLTWPELVIGDKQGELIRDSAQCAAIAERLMHLTSEELNPNPDKEKPPCNAQELEECDIFFEESSSLCRFDGNTLKTTHVVNLGSNQYLFSVIVDPKEMPCFCLRHDVDALLWQPHSSKQDDMWEHIATFNALGYVQASKRDKKFFACAPNYSYAALCECLRRVFIYRQPAPMSTVLYNRKEGRQVGQVAKQQVASLETNDPILGFQATNERLFVLTTKNLFLIKVNTEN

SEQ ID NO: 704 - protein, 619 aa, Homo sapiens
MAAVVQQNDLVFEFASNVMEDERQLGDPAIFPAVIVEHVPGADILNSYAGLACVEEPNDMITESSLDVAEEEIIDDDDDDITLTVEASCHDGDETIETIEAAEALLNMDSPGPMLDEKRINNNIFSSPEDDMVVAPVTHVSVTLDGIPEVMETQQVQEKYADSPGASSPEQPKRKKGRKTKPPRPDSPATTPNISVKKKNKDGKGNTIYLWEFLLALLQDKATCPKYIKWTQREKGIFKLVDSKAVSRLWGKHKNKPDMNYETMGRALRYYYQRGILAKVEGQRLVYQFKEMPKDLIYINDEDPSSSIESSDPSLSSSATSNRNQTSRSRVSSSPGVKGGATTVLKPGNSKAAKPKDPVEVAQPSEVLRTVQPTQSPYPTQLFRTVHVVQPVQAVPEGEAARTSTMQDETLNSSVQSIRTIQAPTQVPVVVSPRNQQLHTVTLQTVPLTTVIASTDPSAGTGSQKFILQAIPSSQPMTVLKENVMLQSQKAGSPPSIVLGPAQVQQVLTSNVQTICNGTVSVASSPSFSATAPVVTFSPRSSQLVAHPPGTVITSVIKTQETKTLTQEVEKKESEDHLKENTEKTEQQPQPYVMVVSSSNGFTSQVAMKQNELLEPNSF

SEQ ID NO: 705 - protein, 498 aa, Homo sapiens
MFNYERPKHFIQSQNPCGSRLQPPGPETSSFSSQTKQSSIIIQPRQCTEQRFSASSTLSSHITMSSSAFPASPQQHAGSNPGQRVTTTYNQSPASFLSSILPSQPDYNSSKIPSAMDSNYQQSSAGQPINAKPSQTANAKPIPRTPDHEIQGSKEALIQDLERKLKCKDTLLHNGNQRLTYEEKMARRLLGPQNAAAVFQAQDDSGAQDSQQHNSEHARLQVPTSQVRSRSTSRGDVNDQDAIQEKFYPPRFIQVPENMSIDEGRFCRMDFKVSGLPAPDVSWYLNGRTVQSDDLHKMIVSEKGLHSLIFEVVRASDAGAYACVAKNRAGEATFTVQLDVLAKEHKRAPMFIYKPQSKKVLEGDSVKLECQISAIPPPKLFWKRNNEMVQFNTDRISLYQDNTGRVTLLIKDVNKKDAGWYTVSAVNEAGVTTCNTRLDVTARPNQTLPAPKQLRVRPTFSKYLALNGKGLNVKQAFNPEGEFQRLAAQSGLYESEEL

SEQ ID NO: 706 - protein, 543 aa, Homo sapiens
MAAAKAEMQLMSPLQISDPFGSFPHSPTMDNYPKLEEMMLLSNGAPQFLGAAGAPEGSGSNSSSSSSGGGGGGGGGSNSSSSSSTFNPQADTGEQPYEHLTAESFPDISLNNEKVLVETSYPSQTTRLPPITYTGRFSLEPAPNSGNTLWPEPLFSLVSGLVSMTNPPASSSSAPSPAASSASASQSPPLSCAVPSNDSSPIYSAAPTFPTPNTDIFPEPQSQAFPGSAGTALQYPPPAYPAAKGGFQVPMIPDYLFPQQQGDLGLGTPDQKPFQGLESRTQQPSLTPLSTIKAFATQSGSQDLKALNTSYQSQLIKPSRMRKYPNRPSKTPPHERPYACPVESCDRRFSRSDELTRHIRIHTGQKPFQCRICMRNFSRSDHLTTHIRTHTGEKPFACDICGRKFARSDERKRHTKIHLRQKDKKADKSVVASSATSSLSSYPSPVATSYPSPVTTSYPSPATTSYPSPVPTSFSSPGSSTYPSPVHSGFPSPSVATTYSSVPPAFPAQVSSFPSSAVTNSFSASTGLSDMTATFSPRTIEIC

SEQ ID NO: 707 - protein, 666 aa, Homo sapiens
MAMTWIVFSLWPLTVFMGHIGGHSLFSCEPITLRMCQDLPYNTTFMPNLLNHYDQQTAALAMEPFHPMVNLDCSRDFRPFLCALYAPICMEYGRVTLPCRRLCQRAYSECSKLMEMFGVPWPEDMECSRFPDCDEPYPRLVDLNLAGEPTEGAPVAVQRDYGFWCPRELKIDPDLGYSFLHVRDCSPPCPNMYFRREELSFARYFIGLISIICLSATLFTFLTFLIDVTRFRYPERPIIFYAVCYMMVSLIFFIGFLLEDRVACNASIPAQYKASTVTQGSHNKACTMLFMILYFFTMAGSVWWVILTITWFLAAVPKWGSEAIEKKALLFHASAWGIPGTLTIILLAMNKIEGDNISGVCFVGLYDVDALRYFVLAPLCLYVVVGVSLLLAGIISLNRVRIEIPLEKENQDKLVKFMIRIGVFSILYLVPLLVVIGCYFYEQAYRGIWETTWIQERCREYHIPCPYQVTQMSRPDLILFLMKYLMALIVGIPSVFWVGSKKTCFEWASFFHGRRKKEIVNESRQVLQEPDFAQSLLRDPNTPIIRKSRGTSTQGTSTHASSTQLAMVDDQRSKAGSIHSKVSSYHGSLHRSRDGRYTPCSYRGMEERLPHGSMSRLTDHSRHSSSHRLNEQSRHSSIRDLSNNPMTHITHGTSMNRVIEEDGTSA

SEQ ID NO: 708 - protein, 394 aa, Homo sapiens
MVTMEELREMDCSVLKRLMNRDENGGGAGGSGSHGTLGLPSGGKCLLLDCRPFLAHSAGYILGSVNVRCNTIVRRRAKGSVSLEQILPAEEEVRARLRSGLYSAVIVYDERSPRAESLREDSTVSLVVQALRRNAERTDICLLKGGYERFSSEYPEFCSKTKALAAIPPPVPPSATEPLDLGCSSCGTPLHDQGGPVEILPFLYLGSAYHAARRDMLDALGITALLNVSSDCPNHFEGHYQYKCIPVEDNHKADISSWFMEAIEYIDAVKDCRGRVLVHCQAGISRSATICLAYLMMKKRVRLEEAFEFVKQRRSIISPNFSFMGQLLQFESQVLATSCAAEAASPSGPLRERGKTPATPTSQFVFSFPVSVGVHSAPSSLPYLHSPITTSPSC

SEQ ID NO: 709 - protein, 474 aa, Homo sapiens
MSIQAPPRLLELAGQSLLRDQALSISAMEELPRVLYLPLFREAFSRRHFQTLTVMVQAWPFTCLPLVSLMKTLHLEPLKALLEGLHMLLTQKDRPRRWKLQVLDLRDVDENFWARWPGAWALSCFPEAMSKRQTAEDCPRTGEHQPLKVFIDICLKEIPQDECLRYLFQWVYQRRGLVHLCCSKLVNYLTPIKYLRKSLKIIYINSIGELEIHNTCWPHLIRKLYCYLKEMKTLCKLVFSRCHHYTSDNELEGWLVTRFTSVFLRLEHLQLLKIKLITFFSGHLEQLIRCLQNPLENLELTCGNLLEEDLKCLSQFPSLGYLKHLNLSYVLLFRISLEPLGALLEKIAASLETLVLEGCQIHYSQLSAILPGLSCCSQLTTFYFGSNCMSIDALKDLLRHTSGLSKLSLETYPAPEESLNSLVRVNWEIFTPLRAELMCTLREFRQPKRIFIGPTPCPSCGSSPSEELELHLCC

SEQ ID NO: 710 - protein, 374 aa, Homo sapiens
MSRVPSPPPPAEMSSGPVAESWCYTQIKVVKFSYMWTINNFSFCREEMGEVIKSSTFSSGANDKLKWCLRVNPKGLDEESKDYLSLYLLLVSCPKSEVRAKFKFSILNAKGEETKAMESQRAYRFVQGKDWGFKKFIRRDFLLDEANGLLPDDKLTLFCEVSVVQDSVNISGQNTMNMVKVPECRLADELGGLWENSRFTDCCLCVAGQEFQAHKAILAARSPVFSAMFEHEMEESKKNRVEINDVEPEVFKEMMCFIYTGKAPNLDKMADDLLAAADKYALERLKVMCEDALCSNLSVENAAEILILADLHSADQLKTQAVDFINYHASDVLETSGWKSMVVSHPHLVAEAYRSLASAQCPFLGPPRKRLKQS

SEQ ID NO: 711 - protein, 712 aa, Homo sapiens
MREPALAASAMAYHPFHAPRPADFPMSAFLAAAQPSFFPALALPPGALAKPLPDPGLAGAAAAAAAAAAAAEAGLHVSALGPHPPAAHLRSLKSLEPEDEVEDDPKVTLEAKELWDQFHKLGTEMVITKSGRRMFPPFKVRVSGLDKKAKYILLMDIVAADDCRYKFHNSRWMVAGKADPEMPKRMYIHPDSPATGEQWMAKPVAFHKLKLTNNISDKHGFTILNSMHKYQPRFHIVRANDILKLPYSTFRTYVFPETDFIAVTAYQNDKITQLKIDNNPFAKGFRDTGNGRREKRKQLTLPSLRLYEEHCKPERDGAESDASSCDPPPAREPPTSPGAAPSPLRLHRARAEEKSCAADSDPEPERLSEERAGAPLGRSPAPDSASPTRLTEPERARERRSPERGKEPAESGGDGPFGLRSLEKERAEARRKDEGRKEAAEGKEQGLAPLVVQTDSASPLGAGHLPGLAFSSHLHGQQFFGPLGAGQPLFLHPGQFTMGPGAFSAMGMGHLLASVAGGGNGGGGGPGTAAGLDAGGLGPAASAASTAAPFPFHLSQHMLASQGIPMPTFGGLFPYPYTYMAAAAAAASALPATSAAAAAAAAAGSLSRSPFLGSARPRLRFSPYQIPVTIPPSTSLLTTGLASEGSKAAGGNSREPSPLPELALRKVGAPSRGALSPSGSAKEAANELQSIQRLVSGLESQRALSPGRESPK

SEQ ID NO: 712 - protein, 1497 aa, Homo sapiens
MSRAVRLPVPCPVQLGTLRNDSLEAQLHEYVKQGNYVKVKKILKKGIYVDAVNSLGQTALFVAALLGLRKFVDVLVDYGSDPNHRCFDGSTPVHAAAFSGNQWILSKLLDAGGDLRLHDERGQNPKTWALTAGKERSTQIVEFMQRCASHMQAIIQGFSYDLLKKIDSPQRLVYSPSWCGGLVQGNPNGSPNRLLKAGVISAQNIYSFGFGKAMPWFQFYLTGATQMAYLGSLPVIGEKEVIQADDEPTFSFFSGPYMVMTNLVWNGSRVTVKELNLPTHPHCSRLRLADLLIAEQEHSSKLRHPYLLQLMAVCLSQDLEKTRLVYERITIGTLFSVLHERRSQFPVLHMEVIVHLLLQISDALRYLHFQGFIHRSLSSYAVHIISPGEARLTNLEYMLESEDRGVQRDLTRVPLPTQLYNWAAPEVILQKAATVKSDIYSFSMIMQEILTDDIPWKGLDGSVVKKAVVSGNYLEADVRLPKPYYDIVKSGIHVKQKDRTMNLQDIRYILKNDLKDFTGAQRTQPTESPRVQRYGLHPDVNVYLGLTSEHPRETPDMEIIELKEMGSQPHSPRVHSLFTEGTLDPQAPDPCLMARETQNQDAPCPAPFMAEEASSPSTGQPSLCSFEINEIYSGCLILEDDIEEPPGAASSLEADGPNQVDELKSMEEELDKMEREACCFGSEDESSSKAETEYSFDDWDWQNGSLSSLSLPESTREAKSNLNNMSTTEEYLISKCVLDLKIMQTIMHENDDRLRNIEQILDEVEMKQKEQEERMSLWATSREFTNAYKLPLAVGPPSLNYIPPVLQLSGGQKPDTSGNYPTLPRFPRMLPTLCDPGKQNTDEQFQCTQGAKDSLETSRIQNTSSQGRPRESTAQAKATQFNSALFTLSSHRQGPSASPSCHWDSTRMSVEPVSSEIYNAESRNKDDGKVHLKWKMEVKEMAKKAATGQLTVPPWHPQSSLTLESEAENEPDALLQPPIRSPENTDWQRVIEYHRENDEPRGNGKFDKTGNNDCDSDQHGRQPRLGSFTSIRHPSPRQKEQPEHSEAFQASSDTLVAVEKSYSHQSMQSTCSPESSEDITDEFLTPDGEYFYSSTAQENLALETSSPIEEDFEGIQGAFAQPQVSGEEKFQMRKILGKNAEILPRSQFQPVRSTEDEQEETSKESPKELKEKDISLTDIQDLSSISYEPDSSFKEASCKTPKINHAPTSVSTPLSPGSVSSAASQYKDCLESITFQVKTEFASCWNSQEFIQTLSDDFISVRERAKKLDSLLTSSETPPSRLTGLKRLSSFIGAGSPSLVKACDSSPPHATQRRSLPKVEAFSQHHIDELPPPSQELLDDIELLKQQQGSSTVLHENTASDGGGTANDQRHLEEQETDSKKEDSSMLLSKETEDLGEDTERAHSTLDEDLERWLQPPEESVELQDLPKGSERETNIKDQKVGEEKRKREDSITPERRKSEGVLGTSEEDELKSCFWKRLGWSESSRIIVLDQSDLSD

SEQ ID NO: 713 - protein, 1387 aa, Homo sapiens
PVPCRVIPAMGKTSFRIIFLPTEEGSIESSLFINTSSYGVLSYHVSGIGTRRISTEGSAKQLPNAYFLLPKVQSIQLSQMQAETTNTSLLQVQLECSLHNKVCQQLKGCYLESDDVLRLQMSIMVTMENFSKEFEENTQHLLDHLSIVYVATDESETSDDSAVNMYILHSGNSLIWIQDIRHFSQRDALSLQFEPVLLPTSTTNFTKIASFTCKAATSCDSGIIEDVKKTTHTPTLKACLFSSVAQGYFRMDSSATQFHIETHENTSGLWSIWYRNHFDRSVVLNDVFLSKETKHMLKILNFTGPLFLPPGCWNIFSLKLAVKDIAINLFTNVFLTTNIGAIFAIPLQIYSAPTKEGSLGFEVIAHCGMHYFMGKSKAGNPNWNGSLSLDQSTWNVDSELANKLYERWKKYKNGDVCKFGTDMQMINFTTGEFQLTEACPYLGTHSEESRFGILHLHLQPLEMKRVGVVFTPADYGKVTSLILIRNNLTVIDMIGVEGFGARELLKVGGRLPGAGGSLRFKVPESTLMDCRRQLKDSKQILSITKNFKVENIGPLPITVSSLKINGYNCQGYGFEVLDCHQFSLDPNTSRDISIVFTPDFTSSWVIRDLSLVTAADLEFRFTLNVTLPHHLLPLCADVVPGPSWEESFWRLTVFFVSLSLLGVILIAFQQAQYILMEFMKTRQRQNASSSSQQNNGPMDVISPHSYKSNCKNFLDTYGPSDKGRGKNCLPVNTPQSRIQNAAKRSPATYGHSQKKHKCSVYYSKHKTSTAAASSTSTTTEEKQTSPLGSSLPAAKEDICTDAMRENWISLRYASGINVNLQKNLTLPKNLLNKEENTLKNTIVFSNPSSECSMKEGIQTCMFPKETDIKTSENTAEFKERELCPLKTSKKLPENHLPRNSPQYHQPDLPEISRKNNGNNQQVPVKNEVDHCENLKKVDTKPSSEKKIHKTSREDMFSEKQDIPFVEQEDPYRKKKLQEKREGNLQNLNWSKSRTCRKNKKRGVAPVSRPPEQSDLKLVCSDFERSELSSDINVRSWCIQESTREVCKADAEIASSLPAAQREAEGYYQKPEKKCVDKFCSDSSSDCGSSSGSVRASRGSWGSWSSTSSSDGDKKPMVDAQHFLPAGDSVSQNDFPSEAPISLNLSHNICNPMTVNSLPQYAEPSCPSLPAGPTGVEEDKGLYSPGDLWPTPPVCVTSSLNCTLENGVPCVIQESAPVHNSFIDWSATCEGQFSSAYCPLELNDYNAFPEENMNYANGFPCPADVQTDFIDHNSQSTWNTPPNMPAAWGHASFISSPPYLTSTRSLSPMSGLFGSIWAPQSDVYENCCPINPTTEHSTHMENQAVVCKEYYPGFNPFRAYMNLDIWTTTANRNANFPLSRDSSYCGNV

SEQ ID NO: 714 - protein, 1081 aa, Homo sapiens
MPRRKQQAPRRAAAYVSEELKAAALVDEGLDPEEHTADGEPSAKYMCPEKELARACPSYQNSPAAEFSCHEMDSESHISETSDRMADFESGSIKNEEETKEVTVPLEDTTVSDSLEQMKAVYNNFLSNSYWSNLNLNLHQPSSEKNNGSSSSSSSSSSSCGSGSFDWHQSAMAKTLQQVSQSRMLPEPSLFSTVQLYRQSSKLYGSIFTGASKFRCKDCSAAYDTLVELTVHMNETGHYRDDNHETDNNNPKRWSKPRKRSLLEMEGKEDAQKVLKCMYCGHSFESLQDLSVHMIKTKHYQKVPLKEPVTPVAAKIIPATRKKASLELELPSSPDSTGGTPKATISDTNDALQKNSNPYITPNNRYGHQNGASYAWHFEARKSQILKCMECGSSHDTLQELTAHMMVTGHFIKVTNSAMKKGKPIVETPVTPTITTLLDEKVQSVPLAATTFTSPSNTPASISPKLNVEVKKEVDKEKAVTDEKPKQKDKPGEEEEKCDISSKYHYLTENDLEESPKGGLDILKSLENTVTSAINKAQNGTPSWGGYPSIHAAYQLPNMMKLSLGSSGKSTPLKPMFGNSEIVSPTKNQTLVSPPSSQTSPMPKTNFHAMEELVKKVTEKVAKVEEKMKEPDGKLSPPKRATPSPCSSEVGEPIKMEASSDGGFRSQENSPSPPRDGCKDGSPLAEPVENGKELVKPLASSLSGSTAIITDHPPEQPFVNPLSALQSVMNIHLGKAAKPSLPALDPMSMLFKMSNSLAEKAAVATPPPLQSKKADHLDRYFYHVNNDQPIDLTKGKSDKGCSLGSVLLSPTSTAPATSSSTVTTAKTSAVVSFMSNSPLRENALSDISDMLKNLTESHTSKSSTPSSISEKSDIDGATLEEAEESTPAQKRKGRQSNWNPQHLLILQAQFAASLRQTSEGKYIMSDLSPQERMHISRFTGLSMTTISHWLANVKYQLRRTGGTKFLKNLDTGHPVFFCNDCASQIRTPSTYISHLESHLGFRLRDLSKLSTEQINSQIAQTKSPSEKMVTSSPEEDLGTSYQCKLCNRTFASKHAVKLHLSKTHGKSPEDHLLYVSELEKQ

SEQ ID NO: 715 - protein, 216 aa, Homo sapiens
MGWIRGRRSRHSWEMSEFHNYNLDLKKSDFSTRWQKQRCPVVKSKCRENASPFFFCCFIAVAMGIRFIIMVTIWSAVFLNSLFNQEVQIPLTESYCGPCPKNWICYKNNCYQFFDESKNWYESQASCMSQNASLLKVYSKEDQDLLKLVKSYHWMGLVHIPTNGSWQWEDGSILSPNLLTIIEMQKGDCALYASSFKGYIENCSTPNTYICMQRTV

SEQ ID NO: 716 - protein, 307 aa, Homo sapiens
MLRVVEGIFIFVVVSESVFGVLGNGFIGLVNCIDCAKNKLSTIGFILTGLAISRIFLIWIIITDGFIQIFSPNIYASGNLIEYISYFWVIGNQSSMWFATSLSIFYFLKIANFSNYIFLWLKSRTNMVLPFMIVFLLISSLLNFAYIAKILNDYKTKNDTVWDLNMYKSEYFIKQILLNLGVIFFFTLSLITCIFLIISLWRHNRQMQSNVTGLRDSNTEAHVKAMKVLISFIILFILYFIGMAIEISCFTVRENKLLLMFGMTTTAIYPWGHSFILILGNSKLKQASLRVLQQLKCCEKRKNLRVT

SEQ ID NO: 717 - protein, 424 aa, Homo sapiens
MLARKSIIPEEYVLARIAAENLRKPRIRDRLPKARFIAKSGACNLAHKNIREQGRFLQDIFTTLVDLKWRHTLVIFTMSFLCSWLLFAIMWWLVAFAHGDIYAYMEKSGMEKSGLESTVCVTNVRSFTSAFLFSIEVQVTIGFGGRMMTEECPLAITVLILQNIVGLIINAVMLGCIFMKTAQAHRRAETLIFSRHAVIAVRNGKLCFMFRVGDLRKSMIISASVRIQVVKKTTTPEGEVVPIHQLDIPVDNPIESNNIFLVAPLIICHVIDKRSPLYDISATDLANQDLEVIVILEGVVETTGITTQARTSYIAEEIQWGHRFVSIVTEEEGVYSVDYSKFGNTVKVAAPRCSARELDEKPSILIQTLQKSELSHQNSLRKRNSMRRNNSMRRNNSIRRNNSSLMVPKVQFMTPEGNQNTSES

SEQ ID NO: 718 - protein, 627 aa, Homo sapiens
MAEAALVITPQGHVTFEDIAVYFSQEEWGLLDEAQRCLYHDVMLENFSLMASVGCLHGIEAEEAPSEQTLSAQGVSQARTPKLGPSIPNAHSCEMCILVMKDILYLSEHQGTLPWQKPYTSVASGKWFSFGSNLQQHQNQDSGEKHIRKEESSALLLNSCKIPLSDNLFPCKDVEKDFPTILGLLQHQTTHSRQEYAHRSRETFQQRRYKCEQVFNEKVHVTEHQRVHTGEKAYKRREYGKSLNSKYLFVEHQRTHNAEKPYVCNICGKSFLHKQTLVGHQQRIHTRERSYVCIECGKSLSSKYSLVEHQRTHNGEKPYVCNVCGKSFRHKQTFVGHQQRIHTGERPYVCMECGKSFIHSYDRIRHQRVHTGEGAYQCSECGKSFIYKQSLLDHHRIHTGERPYECKECGKAFIHKKRLLEHQRIHTGEKPYVCIICGKSFIRSSDYMRHQRIHTGERAYECSDCGKAFISKQTLLKHHKIHTRERPYECSECGKGFYLEVKLLQHQRIHTREQLCECNECGKVFSHQKRLLEHQKVHTGEKPCECSECGKCFRHRTSLIQHQKVHSGERPYNCTACEKAFIYKNKLVEHQRIHTGEKPYECGKCGKAFNKRYSLVRHQKVHITEEP

SEQ ID NO: 719 - protein, 510 aa, Homo sapiens
MLPLEKAFASPRSSPAPPDLPTPGSAAGVQQEEPETIPERTPADLEFSRLRFREFVYQEAAGPHQTLARLHELCRQWLMPEARSKEQMLELLVLEQFLGILPDKVRPWVVAQYPESCKKAASLVEGLADVLEEPGMLLGSPAGSSSILSDGVYERHMDPLLLPGELASPSQALGAGEIPAPSETPWLSPDPLFLEQRRVREAKTEEDGPANTEQKLKSFPEDPQHLGEWGHLDPAEENLKSYRKLLLWGYQLSQPDAASRLDTEELRLVERDPQGSSLPEGGRRQESAGCACEEAAPAGVLPELPTEAPPGDALADPPSGTTEEEEEQPGKAPDPQDPQDAESDSATGSQRQSVIQQPAPDRGTAKLGTKRPHPEDGDGQSLEGVSSSGDSAGLEAGQGPGADEPGLSRGKPYACGECGEAFAWLSHLMEHHSSHGGRKRYACQGCWKTFHFSLALAEHQKTHEKEKSYALGGARGPQPSTREAQAGARAGGPPESVEGEAPPAPPEAQR

SEQ ID NO: 720 - protein, 1663 aa, Homo sapiens
MTDRFWDQWYLWYLRLLRLLDRGSFRNDGLKASDVLPILKEKVAFVSGGRDKRGGPILTFPARSNHDRIRQEDLRKLVTYLASVPSEDVCKRGFTVIIDMRGSKWDLIKPLLKTLQEAFPAEIHVALIIKPDNFWQKQKTNFGSSKFIFETSMVSVEGLTKLVDPSQLTEEFDGSLDYNHEEWIELRLSLEEFFNSAVHLLSRLEDLQEMLARKEFPVDVEGSRRLIDEHTQLKKKVLKAPVEELDREGQRLLQCIRCSDGFSGRNCIPGSADFQSLVPKITSLLDKLHSTRQHLHQMWHVRKLKLDQCFQLRLFEQDAEKMFDWISHNKELFLQSHTEIGVSYQYALDLQTQHNHFAMNSMNAYVNINRIMSVASRLSEAGHYASQQIKQISTQLDQEWKSFAAALDERSTILAMSAVFHQKAEQFLSGVDAWCKMCSEGGLPSEMQDLELAIHHHQTLYEQVTQAYTEVSQDGKALLDVLQRPLSPGNSESLTATANYSKAVHQVLDVVHEVLHHQRRLESIWQHRKVRLHQRLQLCVFQQDVQQVLDWIENHGEAFLSKHTGVGKSLHRARALQKRHDDFEEVAQNTYTNADKLLEAAEQLAQTGECDPEEIYKAARHLEVRIQDFVRRVEQRKLLLDMSVSFHTHTKELWTWMEDLQKEMLEDVCADSVDAVQELIKQFQQQQTATLDATLNVIKEGEDLIQQLRSAPPSLGEPSEARDSAVSNNKTPHSSSISHIESVLQQLDDAQVQMEELFHERKIKLDIFLQLRIFEQYTIEVTAELDAWNEDLLRQMNDFNTEDLTLAEQRLQRHTERKLAMNNMTFEVIQQGQDLHQYITEVQASGIELICEKDIDLAAQVQELLEFLHEKQHELELNAEQTHKRLEQCLQLRHLQAEVKQVLGWIRNGESMLNASLVNASSLSEAEQLQREHEQFQLAIESLFHATSLQKTHQSALQVQQKAEVLLQAGHYDADAIRECAEKVALHWQQLMLKMEDRLKLVNASVAFYKTSEQVCSVLESLEQEYRRDEDWCGGRDKLGPAAEIDHVIPLISKHLEQKEAFLKACTLARRNAEVFLKYIHRNNVSMPSVASHTRGPEQQVKAILSELLQRENRVLHFWTLKKRRLDQCQQYVVFERSAKQALDWIQETGEFYLSTHTSTGETTEETQELLKEYGEFRVPAKQTKEKVKLLIQLADSFVEKGHIHATEIRKWVTTVDKHYRDFSLRMGKYRYSLEKALGVNTEDNKDLELDIIPASLSDREVKLRDANHEVNEEKRKSARKKEFIMAELLQTEKAYVRDLHECLETYLWEMTSGVEEIPPGILNKEHIIFGNIQEIYDFHNNIFLKELEKYEQLPEDVGHCFVTWADKFQMYVTYCKNKPDSNQLILEHAGTFFDEIQQRHGLANSISSYLIKPVQRITKYQLLLKELLTCCEEGKGELKDGLEVMLSVPKKANDAMHVSMLEGFDENLDVQGELILQDAFQVWDPKSLIRKGRERHLFLFEISLVFSKEIKDSSGHTKYVYKNKLLTSELGVTEHVEGDPCKFALWSGRTPSSDNKTVLKASNIETKQEWIKNIREVIQERIIHLKGALKEPLQLPKTPAKQRNNSKRDGVEDIDSQGDGSSQPDTISIASRTSQNTVDSDKDGNLVPRWHLGPGDPFSTYV

SEQ ID NO: 721 - protein, 422 aa, Homo sapiens [sequence omitted]

SEQ ID NO: 722 - protein, 711 aa, Homo sapiens
MAERESGGLGGGAASPPAASPFLGLHIASPPNFRLTHDISLEEFEDEDLSEITDECGISLQCKDTLSLRPPRAGLLSAGGGGAGSRLQAEMLQMDLIDATGDTPGAEDDEEDDDEERAARRPGAGPPKAESGQEPASRGQGQSQGQSQGPGSGDTYRPKRPTTLNLFPQVPRSQDTLNNNSLGKKHSWQDRVSRSSSPLKTGEQTPPHEHICLSDELPPQSGPAPTTDRGTSTDSPCRRSTATQMAPPGGPPAAPPGGRGHSHRDRIHYQADVRLEATEEIYLTPVQRPPDAAEPTSAFLPPTESRMSVSSDPDPAAYPSTAGRPHPSISEEEEGFDCLSSPERAEPPGGGWRGSLGEPPPPPRASLSSDTSALSYDSVKYTLVVDEHAQLELVSLRPCFGDYSDESDSATVYDNCASVSSPYESAIGEEYEEAPRPQPPACLSEDSTPDEPDVHFSKKFLNVFMSGRSRSSSAESFGLFSCIINGEEQEQTHRAIFRFVPRHEDELELEVDDPLLVELQAEDYWYEAYNMRTGARGVFPAYYAIEVTKEPEHMAALAKNSDWVDQFRVKFLGSVQVPYHKGNDVLCAAMQKIATTRRLTVHFNPPSSCVLEISVRGVKIGVKADDSQEAKGNKCSHFFQLKNISFCGYHPKNNKYFGFITKHPADHRFACHVFVSEDSTKALAESVGRAFQQFYKQFVEYTCPTEDIYLE

SEQ ID NO: 723 - protein, 511 aa, Homo sapiens
MATVQEKAAALNLSALHSPAHRPPGFSVAQKPFGATYVWSSIINTLQTQVEVKKRRHRLKRHNDCFVGSEAVDVIFSHLIQNKYFGDVDIPRAKVVRVCQALMDYKVFEAVPTKVFGKDKKPTFEDSSCSLYRFTTIPNQDSQLGKENKLYSPARYADALFKSSDIRSASLEDLWENLSLKPANSPHVNISATLSPQVINEVWQEETIGRLLQLVDLPLLDSLLKQQEAVPKIPQPKRQSTMVNSSNYLDRGILKAYSDSQEDEWLSAAIDCLEYLPDQMVVEISRSFPEQPDRTDLVKELLFDAIGRYYSSREPLLNHLSDVHNGIAELLVNGKTEIALEATQLLLKLLDFQNREEFRRLLYFMAVAANPSEFKLQKESDNRMVVKRIFSKAIVDNKNLSKGKTDLLVLFLMDHQKDVFKIPGTLHKIVSVKLMAIQNGRDPNRDAGYIYCQRIDQRDYSNNTEKTTKDELLNLLKTLDEDSKLSAKEKKKLLGQFYKCHPDIFIEHFGD

SEQ ID NO: 724 - protein, 527 aa, Homo sapiens
MADSRDPASDQMQHWKEQRAAQKADVLTTGAGNPVGDKLNVITVGPRGPLLVQDVVFTDEMAHFDRERIPERVVHAKGAGAFGYFEVTHDITKYSKAKVFEHIGKKTPIAVRFSTVAGESGSADTVRDPRGFAVKFYTEDGNWDLVGNNTPIFFIRDPILFPSFIHSQKRNPQTHLKDPDMVWDFWSLRPESLHQVSFLFSDRGIPDGHRHMNGYGSHTFKLVNANGEAVYCKFHYKTDQGIKNLSVEDAARLSQEDPDYGIRDLFNAIATGKYPSWTFYIQVMTFNQAETFPFNPFDLTKVWPHKDYPLIPVGKLVLNRNPVNYFAEVEQIAFDPSNMPPGIEASPDKMLQGRLFAYPDTHRHRLGPNYLHIPVNCPYRARVANYQRDGPMCMQDNQGGAPNYYPNSFGAPEQQPSALEHSIQYSGEVRRFNTANDDNVTQVRAFYVNVLNEEQRKRLCENIAGHLKDAQIFIQKKAVKNFTEVHPDYGSHIQALLDKYNAEKPKNAIHTFVQSGSHLAAREKANL

SEQ ID NO: 725 - protein, 614 aa, Homo sapiens
MRPPQCLLHTPSLASPLLLLLLWLLGGGVGAEGREDAELLVTVRGGRLRGIRLKTPGGPVSAFLGIPFAEPPMGPRRFLPPEPKQPWSGVVDATTFQSVCYQYVDTLYPGFEGTEMWNPNRELSEDCLYLNVWTPYPRPTSPTPVLVWIYGGGFYSGASSLDVYDGRFLVQAERTVLVSMNYRVGAFGFLALPGSREAPGNVGLLDQRLALQWVQENVAAFGGDPTSVTLFGESAGAASVGMHLLSPPSRGLFHRAVLQSGAPNGPWATVGMGEARRRATQLAHLVGCPPGGTGGNDTELVACLRTRPAQVLVNHEWHVLPQESVFRFSFVPVVDGDFLSDTPEALINAGDFHGLQVLVGVVKDEGSYFLVYGAPGFSKDNESLISRAEFLAGVRVGVPQVSDLAAEAVVLHYTDWLHPEDPARLREALSDVVGDHNVVCPVAQLAGRLAAQGARVYAYVFEHRASTLSWPLWMGVPHGYEIEFIFGIPLDPSRNYTAEEKIFAQRLMRYWANFARTGDPNEPRDPKAPQWPPYTAGAQQYVSLDLRPLEVRRGLRAQACAFWNRFLPKLLSATDTLDEAERQWKAEFHRWSSYMVHWKNQFDHYSKQDRCSDL

SEQ ID NO: 726 - protein, 580 aa, Homo sapiens
MGEKAVPLLRRRRVKRSCPSCGSELGVEEKRGKGNPISIQLFPPELVEHIISFLPVRDLVALGQTCRYFHEVCDGEGVWRRICRRLSPRLQDQGSGVRPWKRAAILNYTKGLYFQAFGGRRRCLSKSVAPLLAHGYRRFLPTKDHVFILDYVGTLFFLKNALVSTLGQMQWKRACRYVVLCRGAKDFASDPRCDTVYRKYLYVLATREPQEVVGTTSSRACDCVEVYLQSSGQRVFKMTFHHSMTFKQIVLVGQETQRALLLLTEEGKIYSLVVNETQLDQPRSYTVQLALRKVSHYLPHLRVACMTSNQSSTLYVTDQGGVYFEVHTPGVYRDLFGTLQAFDPLDQQMPLALSLPAKILFCALGYNHLGLVDEFGRIFMQGNNRYGQLGTGDKMDRGEPTQVCYLQRPITLWCGLNHSLVLSQSSEFSKELLGCGCGAGGRLPGWPKGSASFVKLQVKVPLCACALCATRECLYILSSHDIEQHAPYRHLPASRVVGTPEPSLGARAPQDPGGMAQACEEYLSQIHSCQTLQDRTEKMKEIVGWMPLMAAQKDFFWEALDMLQRAEGGGGGVGPPAPET

SEQ ID NO: 727 - protein, 366 aa, Homo sapiens
MWNATPSEEPGFNLTLADLDWDASPGNDSLGDELLQLFPAPLLAGVTATCVALFVVGIAGNLLTMLVVSRFRELRTTTNLYLSSMAFSDLLIFLCMPLDLVRLWQYRPWNFGDLLCKLFQFVSESCTYATVLTITALSVERYFAICFPLRAKVVVTKGRVKLVIFVIWAVAFCSAGPIFVLVGVEHENGTDPWDTNECRPTEFAVRSGLLTVMVWVSSIFFFLPVFCLTVLYSLIGRKLWRRRRGDAVVGASLRDQNHKQTVKMLAVVVFAFILCWLPFHVGRYLFSKSFEPGSLEIAQISQYCNLVSFVLFYLSAAINPILYNIMSKKYRVAVFRLLGFEPFSQRKLSTLKDESSRAWTESSINT

SEQ ID NO: 728 - protein, 977 aa, Homo sapiens
MKPSIAEMLHRGRMLWIILLSTIALGWTTPIPLIEDSEEIDEPCFDPCYCEVKESLFHIHCDSKGFTNISQITEFWSRPFKLYLQRNSMRKLYTNSFLHLNNAVSINLGNNALQDIQTGAFNGLKILKRLYLHENKLDVFRNDTFLGLESLEYLQADYNVIKRIESGAFRNLSKLRVLILNDNLIPMLPTNLFKAVSLTHLDLRGNRLKVLFYRGMLDHIGRSLMELQLEENPWNCTCEIVQLKSWLERIPYTALVGDITCETPFHFHGKDLREIRKTELCPLLSDSEVEASLGIPHSSSSKENAWPTKPSSMLSSVHFTASSVEYKSSNKQPKPTKQPRTPRPPSTSQALYPGPNQPPIAPYQTRPPIPIICPTGCTCNLHINDLGLTVNCKERGFNNISELLPRPLNAKKLYLSSNLIQKIYRSDFWNFSSLDLLHLGNNRISYVQDGAFINLPNLKSLFLNGNDIEKLTPGMFRGLQSLHYLYFEFNVIREIQPAAFSLMPNLKLLFLNNNLLRTLPTDAFAGTSLARLNLRKNYFLYLPVAGVLEHLNAIVQIDLNENPWDCTCDLVPFKQWIETISSVSVVGDVLCRSPENLTHRDVRTIELEVLCPEMLHVAPAGESPAQPGDSHLIGAPTSASPYEFSPPGGPVPLSVLILSLLVLFFSAVFVAAGLFAYVLRRRRKKLPFRSKRQEGVDLTGIQMQCHRLFEDGGGGGGGSGGGGRPTLSSPEKAPPVGHVYEYIPHPVTQMCNNPIYKPREEEEVAVSSAQEAGSAERGGPGTQPPGMGEALLGSEQFAETPKENHSNYRTLLEKEKEWALAVSSSQLNTIVTVNHHHPHHPAVGGVSGVVGGTGGDLAGFRHHEKNGGVVLFPPGGGCGSGSMLLDRERPQPAPCTVGFVDCLYGTVPKLKELHVHPPGMQYPDLQQDARLKETLLFSAGKGFTDHQTQKSDYLELRAKLQTKPDYLEVLEKTTYRF

SEQ ID NO: 729 - protein, 756 aa, Homo sapiens
MSRPGTATPALALVLLAVTLAGVGAQGAALEDPDYYGQEIWSREPYYARPEPELETFSPPLPAGPGEEWERRPQEPRPPKRATKPKKAPKREKSAPEPPPPGKHSNKKVMRTKSSEKAANDDHSVRVAREDVRESCPPLGLETLKITDFQLHASTVKRYGLGAHRGRLNIQAGINENDFYDGAWCAGRNDLQQWIEVDARRLTRFTGVITQGRNSLWLSDWVTSYKVMVSNDSHTWVTVKNGSGDMIFEGNSEKEIPVLNELPVPMVARYIRINPQSWFDNGSICMRMEILGCPLPDPNNYYHRRNEMTTTDDLDFKHHNYKEMRQLMKVVNEMCPNITRIYNIGKSHQGLKLYAVEISDHPGEHEVGEPEFHYIAGAHGNEVLGRELLLLLVQFVCQEYLARNARIVHLVEETRIHVLPSLNPDGYEKAYEGGSELGGWSLGRWTHDGIDINNNFPDLNTLLWEAEDRQNVPRKVPNHYIAIPEWFLSENATVAAETRAVIAWMEKIPFVLGGNLQGGELVVAYPYDLVRSPWKTQEHTPTPDDHVFRWLAYSYASTHRLMTDARRRVCHTEDFQKEEGTVNGASWHTVAGSLNDFSYLHTNCFELSIYVGCDKYPHESQLPEEWENNRESLIVFMEQVHRGIKGLVRDSHGKGIPNAIISVEGINHDIRTANDGDYWRLLNPGEYVVTAKAEGFTASTKNCMVGYDMGATRCDFTLSKTNMARIREIMEKFGKQPVSLPARRLKLRGQKRRQRG

SEQ ID NO: 730 - protein, 3487 aa, Homo sapiens
MRLISIAPGPRWQVQSHHPRSAGQNCTFQLHGPNGTVESPGFPYGYPNYANCTWTITAEEQHRIQLVFQSFALEEDFDVLSVFDGPPQPENLRTRLTGFQLPATIVSAATTLSLRLISDYAVSAQGFHATYEVLPSHTCGNPGRLPNGIQQGSTFNLGDKVRYSCNLGFFLEGHAVLTCHAGSENSATWDFPLPSCRADDACGGTLRGQSGIISSPHFPSEYHNNADCTWTILAELGDTIALVFIDFQLEDGYDFLEVTGTEGSSLWFTGASLPAPVISSKNWLRLHFTSDGNHRQRGFSAQYQVKKQIELKSRGVKLMPSKDNSQKTSVLTQVGVSQGHNMCPDPGIPERGKRLGSDFRLGSSVQFTCNEGYDLQGSKRITCMKVSDMFAAWSDHRPVCRARMCDAHLRGPSGIITSPNFPIQYDNNAHCVWIITALNPSKVIKLAFEEFDLERGYDTLTVGDGGQDGDQKTVLYILTGTSVPDLIVSTNHQMWLLFQTDGSGSSLGFKASYEEIEQGSCGDPGIPAYGRREGSRFHHGDTLKFECQPAFELVGQKAITCQKNNQWSAKKPGCVFSCFFNFTSPSGVVLSPNYPEDYGNHLHCVWLILARPESRIHLAFNDIDVEPQFDFLVIKDGATAEAPVLGTFSGNQLPSSITSSGHVARLEFQTDHSTGKRGFNITFTTFRHNECPDPGVPVNGKRFGDSLQLGSSISFLCDEGFLGTQGSETITCVLKEGSVVWNSAVLRCEAPCGGHLTSPSGTILSPGWPGFYKDALSCAWVIEAQPGYPIKITFDRFKTEVNYDTLEVRDGRTYSAPLIGVYHGTQVPQFLISTSNYLYLLFSTDKSHSDIGFQLRYETITLQSDHCLDPGIPVNGQRHGNDFYVGALVTFSCDSGYTLSDGEPLECEPNFQWSRALPSCEALCGGFIQGSSGTILSPGFPDFYPNNLNCTWIIETSHGKGVFFTFHTFHLESGHDYLLITENGSFTQPLRQLTGSRLPAPISAGLYGNFTAQVRFISDFSMSYEGFNITFSEYDLEPCEEPEVPAYSIRKGLQFGVGDTLTFSCFPGYRLEGTARITCLGGRRRLWSSPLPRCVAECGNSVTGTQGTLLSPNFPVNYNNNHECIYSIQTQPGKGIQLKARAFELSEGDVLKVYDGNNNSARLLGVFSHSEMMGVTLNSTSSSLWLDFITDAENTSKGFELHFSSFELIKCEDPGTPKFGYKVHDEGHFAGSSVSFSCDPGYSLRGSEELLCLSGERRTWDRPLPTCVAECGGTVRGEVSGQVLSPGYPAPYEHNLNCIWTIEAEAGCTIGLHFLVFDTEEVHDVLRIWDGPVESGVLLKELSGPALPKDLHSTFNSVVLQFSTDFFTSKQGFAIQFSVSTATSCNDPGIPQNGSRSGDSWEAGDSTVFQCDPGYALQGSAEISCVKIENRFFWQPSPPTCIAPCGGDLTGPSGVILSPNYPEPYPPGKECDWKVTVSPDYVIALVFNIFNLEPGYDFLHIYDGRDSLSPLIGSFYGSQLPGRIESSSNSLFLAFRSDASVSNAGFVIDYTENPRESCFDPGSIKNGTRVGSDLKLGSSVTYYCHGGYEVEGTSTLSCILGPDGKPVWNNPRPVCTAPCGGQYVGSDGVVLSPNYPQNYTSGQICLYFVTVPKDYVVFGQFAFFHTALNDVVEVHDGHSQHSRLLSSLSGSHTGESLPLATSNQVLIKFSAKGLAPARGFHFVYQAVPRTSATQCSSVPEPRYGKRLGSDFSVGAIVRFECNSGYALQGSPEIECLPVPGALAQWNVSAPTCVVPCGGNLTERRGTILSPGFPEPYLNSLNCVWKIVVPEGAGIQIQVVSFVTEQNWDSLEVFDGADNTVTMLGSFSGTTVPALLNSTSNQLYLHFYSDISVSAAGFHLEYKTVGLSSCPEPAVPSNGVKTGERYLVNDVVSFQCEPGYALQGHAHISCMPGTVRRWNYPPPLCIAQCGGTVEEMEGVILSPGFPGNYPSNMDCSWKIALPVGFGAHIQFLNFSTEPNHDYIEIRNGPYETSRMMGRFSGSELPSSLLSTSHETTVYFHSDHSQNRPGFKLEYQDLTYSHQISSFLRGFDLSELERTNSTPPVAASYVWDLDPGCEAYELQECPDPEPFANGIVRGAGYNVGQSVTFECLPGYQLTGHPVLTCQHGTNRNWDHPLPKCEVPCGGNITSSNGTVYSPGFPSPYSSSQDCVWLITVPIGHGVRLNLSLLQTEPSGDFITIWDGPQQTAPRLGVFTRSMAKKTVQSSSNQVLLKFHRDAATGGIFAIAFSAYPLTKCPPPTILPNAEVVTENEEFNIGDIVRYRCLPGFTLVGNEILTCKLGTYLQFEGPPPICEVHCPTNELLTDSTGVILSQSYPGSYPQFQTCSWLVRVEPDYNISLTVEYFLSEKQYDEFEIFDGPSGQSPLLKALSGNYSAPLIVTSSSNSVYLRWSSDHAYNRKGFKIRYSAPYCSLPRAPLHGFILGQTSTQPGGSIHFGCNAGYRLVGHSMAICTRHPQGYHLWSEAIPLCQALSCGLPEAPKNGMVFGKEYTVGTKAMYSCSEGYHLQAGAEATAECLDTGLWSNRNVPPQCVPVTCPDVSSISVEHGRWRLIFETQYQFQAQLMLICDPGYYYTGQRVIRCQANGKWSLGDSTPTCRIISCGELPIPPNGHRIGTLSVYGATAIFSCNSGYTLVGSRVRECMANGLWSGSEVRCLAGHCGTPEPIVNGHINGENYSYRGSVVYQCNAGFRLIGMSVRICQQDHHWSGKTPFCVLVSCGHPGSPPHSQMSGDSYTVGAVVRYSCIGKRTLVGNSTRMCGLDGHWTGSLPHCSGTSVGVCGDPGIPAHGIRLGDSFDPGTVMRFSCEAGHVLRGSSERTCQANGSWSGSQPECGVISCGNPGTPSNARVVFSDGLVFSSSIVYECREGYYATGLLSRHCSVNGTWTGSDPECLVINCGDPGIPANGLRLGNDFRYNKTVTYQCVPGYMMESHRVSVLSCTKDRTWNGTKPVCKALMCKPPPLIPNGKVVGSDFMWGSSVTYACLEGYQLSLPAVFTCEGNGSWTGELPQCFPVFCGDPGVPSRGRREDRGFSYRSSVSFSCHPPLVLVGSPRRFCQSDGTWSGTQPSCIDPTLTTCADPGVPQFGIQNNSQGYQVGSTVLFRCQKGYLLQGSTTRTCLPNLTWSGTPPDCVPHHCRQPETPTHANVGALDLPSMGYTLIYSCQEGFSLKGGSEHRTCKADGSWTGKPPICLEVRPSGRPINTAREPPLTQALIPGDVFAKNSLWKGAYEYQGKKQPAMLRVTGFQVANSKVNATMIDHSGVELHLAGTYKKEDFHLLLQVYQITGPVEIFMNKFKDDHWALDGHVSSESSGATFIYQGSVKGQGFGQFGFQRLDLRLLESDPESIGRHFASNSSSVAAAILVPFIALIIAGFVLYLYKHRRRPKVPFNGYAGHENTNVRATFENPMYDRNIQPTDIMASEAEFTVSTVCTAV

SEQ ID NO: 731 - protein, 376 aa, Homo sapiens
MSILIIEAFYGGSHKQLVDLLQEELGDCVVYTLPAKKWHWRARTSALYFSQTIPISEHYRTLFASSVLNLTELAALRPDLGKLKKILYFHENQLIYPVKKCQERDFQYGYNQILSCLVADVVVFNSVFNMESFLTSMGKFMKLIPDHRPKDLESIIRPKCQVIYFPIRFPDVSRFMPKHKTTHLKKMLGLKGNGGAVLSMALPFQPEQRDSEDLLKNFNSECDTHCGLDTARQEYLGNSLRQESDLKKSTSSDNSSSHHGENKQNLTVDPCDILGGVDNQQRLLHIVWPHRWEHDKDPESFFKVLMHLKDLGLNFHVSVLGETFTDVPGWKLCTVGVTHFVLKIWFIPKYFQLNICILHLNSFQKGSRISARDQIL

SEQ ID NO: 732 - protein, 513 aa, Homo sapiens
MGAAAKLAFAVFLISCSSGAILGRSETQECLFFNANWEKDRTNQTGVEPCYGDKDKRRHCFATWKNISGSIEIVKQGCWLDDINCYDRTDCVEKKDSPEVYFCCCEGNMCNEKFSYFPEMEVTQPTSNPVTPKPPYYNILLYSLVPLMLIAGIVICAFWVYRHHKMAYPPVLVPTQDPGPPPPSPLLGLKPLQLLEVKARGRFGCVWKAQLLNEYVAVKIFPIQDKQSWQNEYEVYSLPGMKHENILQFIGAEKRGTSVDVDLWLITAFHEKGSLSDFLKANVVSWNELCHIAETMARGLAYLHEDIPGLKDGHKPAISHRDIKSKNVLLKNNLTACIADFGLALKFEAGKSAGDTHGQVGTRRYMAPEVLEGAINFQRDAFLRIDMYAMGLVLWELASRCTAADGPVDEYMLPFEEEIGQHPSLEDMQEVVVHKKKRPVLRDYWQKHAGMAMLCETIEECWDHDAEARLSAGCVGERITQMQRLTNIITTEDIVTVVTMVTNVDFPPKESSL

SEQ ID NO: 733 - protein, 870 aa, Homo sapiens
MDSTKEKCDSYKDDLLLRMGLNDNKAGMEGLDKEKINKIIMEATKGSRFYGNELKKEKQVNQRIENMMQQKAQITSQQLRKAQLQVDRFAMELEQSRNLSNTIVHIDMDAFYAAVEMRDNPELKDKPIAVGSMSMLSTSNYHARRFGVRAAMPGFIAKRLCPQLIIVPPNFDKYRAVSKEVKEILADYDPNFMAMSLDEAYLNITKHLEERQNWPEDKRRYFIKMGSSVENDNPGKEVNKLSEHERSISPLLFEESPSDVQPPGDPFQVNFEEQNNPQILQNSVVFGTSAQEVVKEIRFRIEQKTTLTASAGIAPNTMLAKVCSDKNKPNGQYQILPNRQAVMDFIKDLPIRKVSGIGKVTEKMLKALGIITCTELYQQRALLSLLFSETSWHYFLHISLGLGSTHLTRDGERKSMSVERTFSEINKAEEQYSLCQELCSELAQDLQKERLKGRTVTIKLKNVNFEVKTRASTVSSVVSTAEEIFAIAKELLKTEIDADFPHPLRLRLMGVRISSFPNEEDRKHQQRSIIGFLQAGNQALSATECTLEKTDKDKFVKPLEMSHKKSFFDKKRSERKWSHQDTFKCEAVNKQSFQTSQPFQVLKKKMNENLEISENSDDCQILTCPVCFRAQGCISLEALNKHVDECLDGPSISENFKMFSCSHVSATKVNKKENVPASSLCEKQDYEAHPKIKEISSVDCIALVDTIDNSSKAESIDALSNKHSKEECSSLPSKSFNIEHCHQNSSSTVSLENEDVGSFRQEYRQPYLCEVKTGQALVCPVCNVEQKTSDLTLFNVHVDVCLNKSFIQELRKDKFNPVNQPKESSRSTGSSSGVQKAVTRTKRPGLMTKYSTSKKIKPNNPKHTLDIFFK

SEQ ID NO: 734 - protein, 993 aa, Homo sapiens
MPALARDGGQLPLLVVFSAMIFGTITNQDLPVIKCVLINHKNNDSSVGKSSSYPMVSESPEDLGCALRPQSSGTVYEAAAVEVDVSASITLQVLVDAPGNISCLWVFKHSSLNCQPHFDLQNRGVVSMVILKMTETQAGEYLLFIQSEATNYTILFTVSIRNTLLYTLRRPYFRKMENQDALVCISESVPEPIVEWVLCDSQGESCKEESPAVVKKEEKVLHELFGTDIRCCARNELGRECTRLFTIDLNQTPQTTLPQLFLKVGEPLWIRCKAVHVNHGFGLTWELENKALEEGNYFEMSTYSTNRTMIRILFAFVSSVARNDTGYYTCSSSKHPSQSALVTIVEKGFINATNSSEDYEIDQYEEFCFSVRFKAYPQIRCTWTFSRKSFPCEQKGLDNGYSISKFCNHKHQPGEYIFHAENDDAQFTKMFTLNIRRKPQVLAEASASQASCFSDGYPLPSWTWKKCSDKSPNCTEEITEGVWNRKANRKVFGQWVSSSTLNMSEAIKGFLVKCCAYNSLGTSCETILLNSPGPFPFIQDNISFYATIGVCLLFIVVLTLLICHKYKKQFRYESQLQMVQVTGSSDNEYFYVDFREYEYDLKWEFPRENLEFGKVLGSGAFGKVMNATAYGISKTGVSIQVAVKMLKEKADSSEREALMSELKMMTQLGSHENIVNLLGACTLSGPIYLIFEYCCYGDLLNYLRSKREKFHRTWTEIFKEHNFSFYPTFQSHPNSSMPGSREVQIHPDSDQISGLHGNSFHSEDEIEYENQKRLEEEEDLNVLTFEDLLCFAYQVAKGMEFLEFKSCVHRDLAARNVLVTHGKVVKICDFGLARDIMSDSNYVVRGNARLPVKWMAPESLFEGIYTIKSDVWSYGILLWEIFSLGVNPYPGIPVDANFYKLIQNGFKMDQPFYATEEIYIIMQSCWAFDSRKRPSFPNLTSFLGCQLADAEEAMYQNVDGRVSECPHTYQNRRPFSREMDLGLLSPQAQVEDS

SEQ ID NO: 735 - protein, 1224 aa, Homo sapiens
MLTKFETKSARVKGLSFHPKRPWILTSLHNGVIQLWDYRMCTLIDKFDEHDGPVRGIDFHKQQPLFVSGGDDYKIKVWNYKLRRCLFTLLGHLDYIRTTFFHHEYPWILSASDDQTIRVWNWQSRTCVCVLTGHNHYVMCAQFHPTEDLVVSASLDQTVRVWDISGLRKKNLSPGAVESDVRGITGVDLFGTTDAVVKHVLEGHDRGVNWAAFHPTMPLIVSGADDRQVKIWRMNESKAWEVDTCRGHYNNVSCAVFHPRQELILSNSEDKSIRVWDMSKRTGVQTFRRDHDRFWVLAAHPNLNLFAAGHDGGMIVFKLERERPAYAVHGNMLHYVKDRFLRQLDFNSSKDVAVMQLRSGSKFPVFNMSYNPAENAVLLCTRASNLENSTYDLYTIPKDADSQNPDAPEGKRSSGLTAVWVARNRFAVLDRMHSLLIKNLKNEITKKVQVPNCDEIFYAGTGNLLLRDADSITLFDVQQKRTLASVKISKVKYVIWSADMSHVALLAKHAIVICNRKLDALCNIHENIRVKSGAWDESGVFIYTTSNHIKYAVTTGDHGIIRTLDLPIYVTRVKGNNVYCLDRECRPRVLTIDPTEFKFKLALINRKYDEVLHMVRNAKLVGQSIIAYLQKKGYPEVALHFVKDEKTRFSLALECGNIEIALEAAKALDDKNCWEKLGEVALLQGNHQIVEMCYQRTKNFDKLSFLYLITGNLEKLRKMMKIAEIRKDMSGHYQNALYLGDVSERVRILKNCGQKSLAYLTAATHGLDEEAESLKETFDPEKETIPDIDPNAKLLQPPAPIMPLDTNWPLLTVSKGFFEGTIASKGKGGALAADIDIDTVGTEGWGEDAELQLDEDGFVEATEGLGDDALGKGQEEGGGWDVEEDLELPPELDISPGAAGGAEDGFFVPPTKGTSPTQIWCNNSQLPVDHILAGSFETAMRLLHDQVGVIQFGPYKQLFLQTYARGRTTYQALPCLPSMYGYPNRNWKDAGLKNGVPAVGLKLNDLIQRLQLCYQLTTVGKFEEAVEKFRSILLSVPLLVVDNKQEIAEAQQLITICREYIVGLSVETERKKLPKETLEQQKRICEMAAYFTHSNLQPVHMILVLRTALNLFFKLKNFKTAATFARRLLELGPKPEVAQQTRKILSACEKNPTDAYQLNYDMHNPFDICAASYRPIYRGKPVEKCPLSGACYSPEFKGQICRVTTVTEIGKDVIGLRISPLQFR

SEQ ID NO: 736 - protein, 414 aa, Homo sapiens
MAAAPPSYCFVAFPPRAKDGLVVFGKNSARPRDEVQEVVYFSAADHEPESKVECTYISIDQVPRTYAIMISRPAWLWGAEMGANEHGVCIANEAINTREPAAEIEALLGMDLVRLGLERGETAKEALDVIVSLLEEHGQGGNYFEDANSCHSFQSAYLIVDRDEAWVLETIGKYWAAEKVTEGVRCICSQLSLTTKMDAEHPELRSYAQSQGWWTGEGEFNFSEVFSPVEDHLDCGAGKDSLEKQEESITVQTMMNTLRDKASGVCIDSEFFLTTASGVSVLPQNRSSPCIHYFTGTPDPSRSIFKPFIFVDDVKLVPKTQSPCFGDDDPAKKEPRFQEKPDRRHELYKAHEWARAIIESDQEQGRKLRSTMLELEKQGLEAMEEILTSSEPLDPAEVGDLFYDCVDTEIKFFK

SEQ ID NO: 737 - protein, 459 aa, Homo sapiens
MDGFYDQQVPYMVTNSQRGRNCNEKPTNVRKRKFINRDLAHDSEELFQDLSQLQETWLAEVAFHGLPLKIKKEPHSPCSEISSACSQEQPFKFSYGEKCLYNVSAYDQKPQVGMRPSNPPTPSSTPVSPLHHASPNSTHTPKPDRAFPAHLPPSQSIPDSSYPMDHRFRRQLSEPCNSFPPLPTMPREGRPMYQRQMSEPNIPFPPQGFKQEYHDPVYEHNTMVGSAASQSFPPPLMIKQEPRDFAYDSEVPSCHSIYMRQEGFLAHPSRTEGCMFEKGPRQFYDDTCVVPEKFDGDIKQEPGMYREGPTYQRRGSLQLWQFLVALLDDPSNSHFIAWTGRGMEFKLIEPEEVARRWGIQKNRPAMNYDKLSRSLRYYYEKGIMQKVAGERYVYKFVCDPEALFSMAFPDNQRPLLKTDMERHINEEDTVPLSHFDESMAYMPEGGCCNPHPYNEGYVY

SEQ ID NO: 738 - protein, 887 aa, Homo sapiens
MSLFKARDWWSTILGDKEEFDQGCLCLANVDNSGNGQDKIIVGSFMGYLRIFSPHPAKTGDGAQAEDLLLEVDLRDPVLQVEVGKFVSGTEMLHLAVLHSRKLCVYSVSGTLGNVEHGNQCQMKLMYEHNLQRTACNMTYGSFGGVKGRDLICIQSMDGMLMVFEQESYAFGRFLPGFLLPGPLAYSSRTDSFLTVSSCQQVESYKYQVLAFATDADKRQETEQQKLGSGKRLVVDWTLNIGEQALDICIVSFNQSASSVFVLGERNFFCLKDNGQIRFMKKLDWSPSCFLPYCSVSEGTINTLIGNHNNMLHIYQDVTLKWATQLPHIPVAVRVGCLHDLKGVIVTLSDDGHLQCSYLGTDPSLFQAPNVQSRELNYDELDVEMKELQKIIKDVNKSQGVWPMTEREDDLNVSVVVSPNFDSVSQATDVEVGTDLVPSVTVKVTLQNRVILQKAKLSVYVQPPLELTCDQFTFEFMTPDLTRTVSFSVYLKRSYTPSELEGNAVVSYSRPTDRNPDGIPRVIQCKFRLPLKLICLPGQPSKTASHKITIDTNKSPVSLLSLFPGFASQSDDDQVNVMGFHFLGGARITVLASKTSQRYRIQSEQFEDLWLITNELILRLQEYFEKQGVKDFACSFSGSIPLQEYFELIDHHFELRINGEKLEELLSERAVQFRAIQRRLLARFKDKTPAPLQHLDTLLDGTYKQVIALADAVEENQGNLFQSFTRLKSATHLVILLIALWQKLSADQVAILEAAFLPLQEDTQELGWEETVDAAISHLLKTCLSKSSKEQALNLNSQLNIPKDTSQLKKHITLLCDRLSKGGRLCLSTDAAAPQTMVMPGGCTTIPESDLEERSVEQDSTELFTNHRHLTAETPRPEVSPLQGVSE

SEQ ID NO: 739 - protein, 426 aa, Homo sapiens
MPLLWLRGFLLASCWIIVRSSPTPGSEGHSAAPDCPSCALAALPKDVPNSQPEMVEAVKKHILNMLHLKKRPDVTQPVPKAALLNAIRKLHVGKVGENGYVEIEDDIGRRAEMNELMEQTSEIITFAESGTARKTLHFEISKEGSDLSVVERAEVWLFLKVPKANRTRTKVTIRLFQQQKHPQGSLDTGEEAEEVGLKGERSELLLSEKVVDARKSTWHVFPVSSSIQRLLDQGKSSLDVRIACEQCQESGASLVLLGKKKKKEEEGEGKKKGGGEGGAGADEEKEQSHRPFLMLQARQSEDHPHRRRRRGLECDGKVNICCKKQFFVSFKDIGWNDWIIAPSGYHANYCEGECPSHIAGTSGSSLSFHSTVINHYRMRGHSPFANLKSCCVPTKLRPMSMLYYDDGQNIIKKDIQNMIVEECGCS

SEQ ID NO: 740 - protein, 494 aa, Homo sapiens
MLPKRRRARVGSPSGDAASSTPPSTRFPGVAIYLVEPRMGRSRRAFLTGLARSKGFRVLDACSSEATHVVMEETSAEEAVSWQERRMAAAPPGCTPPALLDISWLTESLGAGQPVPVECRHRLEVAGPRKGPLSPAWMPAYACQRPTPLTHHNTGLSEALEILAEAAGFEGSEGRLLTFCRAASVLKALPSPVTTLSQLQGLPHFGEHSSRVVQELLEHGVCEEVERVRRSERYQTMKLFTQIFGVGVKTADRWYREGLRTLDDLREQPQKLTQQQKAGLQHHQDLSTPVLRSDVDALQQVVEEAVGQALPGATVTLTGGFRRGKLQGHDVDFLITHPKEGQEAGLLPRVMCRLQDQGLILYHQHQHSCCESPTRLAQQSHMDAFERSFCIFRLPQPPGAAVGGSTRPCPSWKAVRVDLVVAPVSQFPFALLGWTGSKLFQRELRRFSRKEKGLWLNSHGLFDPEQKTFFQAASEEDIFRHLGLEYLPPEQRNA

SEQ ID NO: 741 - protein, 246 aa, Homo sapiens
MAGYLKLVCVSFQRQGFHTVGSRCKNRTGAEHLWLTRHLRDPFVKAAKVESYRCRSAFKLLEVNERHQILRPGLRVLDCGAAPGAWSQVAVQKVNAAGTDPSSPVGFVLGVDLLHIFPLEGATFLCPADVTDPRTSQRILEVLPGRRADVILSDMAPNATGFRDLDHDRLISLCLTLLSVTPDILQPGGTFLCKTWAGSQSRRLQRRLTEEFQNVRIIKPEASRKESSEVYFLATQYHGRKGTVKQ

SEQ ID NO: 742 - protein, 400 aa, Homo sapiens
MGVLMSKRQTVEQVQKVSLAVSAFKDGLRDRPSIRRTGELPGSRRGTVEGSVQEVQEEKEAEAGTSVVQEESSAGRAAWERLRDGRGVEPEEFDRTSRFTPPAFIRPTRKLDDDKPPEICLEPREPVVNDEMCDVCEVWTAESLFPCRVCTRVFHDGCLRRMGYIQGDSAAEVTEMAHTETGWSCHYCDNINLLLTEEEMYSLTETFQRCKVIPDCSLTLEDFLRYRHQAAKRGDRDRALSEEQEEQAARQFAALDPEHRGHIEWPDFLSHESLLLLQQLRPQNSLLRLLTVKERERARAAFLARGSGSTVSEAECRRAQHSWFCKRFPEAPSCSVSISHVGPIADSSPASSSSKSQDKTLLPTEQESRFVDWPTFLQENVLYILAARPNSAAIHLKPPG

SEQ ID NO: 743 - protein, 699 aa, Homo sapiens
MIPASAKAPHKQPHKQSISIGRGTRKRDEDSGTEVGEGTDEWAQSKATVRPPDQLELTDAELKEEFTRILTANNPHAPQNIVRYSFKEGTYKPIGFVNQLAVHYTQVGNLIPKDSDEGRRQHYRDELVAGSQESVKVISETGNLEEDEEPKELETEPGSQTDVPAAGAAEKVTEEELMTPKQPKERKLTNQFNFSERASQTYNNPVRDRECQTEPPPRTNFSATANQWEIYDAYVEELEKQEKTKEKEKAKTPVAKKSGKMAMRKLTSMESQTDDLIKLSQAAKIMERMVNQNTYDDIAQDFKYYDDAADEYRDQVGTLLPLWKFQNDKAKRLSVTALCWNPKYRDLFAVGYGSYDFMKQSRGMLLLYSLKNPSFPEYMFSSNSGVMCLDIHVDHPYLVAVGHYDGNVAIYNLKKPHSQPSFCSSAKSGKHSDPVWQVKWQKDDMDQNLNFFSVSSDGRIVSWTLVKRKLVHIDVIKLKVEGSTTEVPEGLQLHPVGCGTAFDFHKEIDYMFLVGTEEGKIYKCSKSYSSQFLDTYDAHNMSVDTVSWNPYHTKVFMSCSSDWTVKIWDHTIKTPMFIYDLNSAVGDVAWAPYSSTVFAAVTTDGKAHIFDLAINKYEAICNQPVAAKKNRLTHVQFNLIHPIIIVGDDRGHIISLKLSPNLRKMPKEKKGQEVQKGPAVEIAKLDKLLNLVREVKIKT

SEQ ID NO: 744 - protein, 326 aa, Homo sapiens
MDLSAASHRIPLSDGNSIPIIGLGTYSEPKSTPKGACATSVKVAIDTGYRHIDGAYIYQNEHEVGEAIREKIAEGKVRREDIFYCGKLWATNHVPEMVRPTLERTLRVLQLDYVDLYIIEVPMAFKPGDEIYPRDENGKWLYHKSNLCATWEAMEACKDAGLVKSLGVSNFNRRQLELILNKPGLKHKPVSNQVECHPYFTQPKLLKFCQQHDIVITAYSPLGTSRNPIWVNVSSPPLLKDALLNSLGKRYNKTAAQIVLRFNIQRGVVVIPKSFNLERIKENFQIFDFSLTEEEMKDIEALNKNVRFVELLMWRDHPEYPFHDEY

SEQ ID NO: 745 - protein, 214 aa, Homo sapiens
MTPQPSGAPTVQVTRETERSFPRASEDEVTCPTSAPPSPTRTRGNCAEAEEGGCRGAPRKLRARRGGRSRPKSELALSKQRRSRRKKANDRERNRMHNLNSALDALRGVLPTFPDDAKLTKIETLRFAHNYIWALTQTLRIADHSLYALEPPAPHCGELGSPGGSPGDWGSLYSPVSQAGSLSPAASLEERPGLLGATFSACLSPGSLAFSDFL

SEQ ID NO: 746 - protein, 476 aa, Homo sapiens
MMTAKAVDKIPVTLSGFVHQLSDNIYPVEDLAATSVTIFPNAELGGPFDQMNGVAGDGMINIDMTGEKRSLDLPYPSSFAPVSAPRNQTFTYMGKFSIDPQYPGASCYPEGIINIVSAGILQGVTSPASTTASSSVTSASPNPLATGPLGVCTMSQTQPDLDHLYSPPPPPPPYSGCAGDLYQDPSAFLSAATTSTSSSLAYPPPPSYPSPKPATDPGLFPMIPDYPGFFPSQCQRDLHGTAGPDRKPFPCPLDTLRVPPPLTPLSTIRNFTLGGPSAGVTGPGASGGSEGPRLPGSSSAAAAAAAAAAYNPHHLPLRPILRPRKYPNRPSKTPVHERPYPCPAEGCDRRFSRSDELTRHIRIHTGHKPFQCRICMRNFSRSDHLTTHIRTHTGEKPFACDYCGRKFARSDERKRHTKIHLRQKERKSSAPSASVPAPSTASCSGGVQPGGTLCSSNSSSLGGGPLAPCSSRTRTP

SEQ ID NO: 747 - protein, 582 aa, Homo sapiens
MISRYTRKAVPQSLELKGITKHALNHHPPPEKLEEISPTSDSHEKDTSSQSKSDITRESSFTSADTGNSLSAFPSYTGAGISTEGSSDFSWGYGELDQNATEKVQTMFTAIDELLYEQKLSVHTKSLQEECQQWTASFPHLRILGRQIITPSEGYRLYPRSPSAVSASYETTLSQERDSTIFGIRGKKLHFSSSYAHKASSIAKSSSFCSMERDEEDSIIVSEGIIEEYLAFDHIDIEEGFHGKKSEAATEKQKLGYPPIAPFYCMKEDVLAYVFDSVWCKVVSCMEQLTRSHWEGFASDDESNVAVTRPDSESSCVLSELHPLVLPRVPQSKVLYITSNPMSLCQASRHQPNVNDLLVHGMPLQPRNLSLMDKLLDLDDKLLMRPGSSTILSTRNWPNRAVEFSTSSLSYTVQSTRRRNPPPRTLHPISTSHSCAETPRSVEEILRGARVPVAPDSLSSPSPTPLSRNNLLPPIGTAEVEHVSTVGPQRQMKPHGDSSRAQSAVVDEPNYQQPQERLLLPDFFPRPNTTQSFLLDTQYRRSCAVEYPHQARPGRGSAGPQLHGSTKSQSGGRPVSRTRQGP

SEQ ID NO: 748 - protein, 676 aa, Homo sapiens
MSDQIKFIMDSLNKEPFRKNYNLITFDSLEPMQLLQVLSDVLAEIDPKQLVDIREEMPEQTAKRMLSLLGILKYKPSGNATDMSTFRQGLVIGSKPVIYPVLHWLLQRTNELKKRAYLARFLIKLEVPSEFLQDETVADTNKQYEELMEAFKTLHKEYEQLKISGFSTAEIRKDISAMEEEKDQLIKRVEHLKKRVETAQNHQWMLKIARQLRVEKEREEYLAQQKQEQKNQLFHAVQRLQRVQNQLKSMRQAAADAKPESLMKRLEEEIKFNLYMVTEKFPKELENKKKELHFLQKVVSEPAMGHSDLLELESKINEINTEINQLIEKKMMRNEPIEGKLSLYRQQASIISRKKEAKAEELQEAKEKLASLEREASVKRNQTREFDGTEVLKGDEFKRYVNKLRSKSTVFKKKHQIIAELKAEFGLLQRTEELLKQRHENIQQQLQTMEEKKGISGYSYTQEELERVSALKSEVDEMKGRTLDDMSEMVKKLYSLVSEKKSALASVIKELRQLRQKYQELTQECDEKKSQYDSCAAGLESNRSKLEQEVRRLREECLQEESRYHYTNCMIKNLEVQLRRATDEMKAYISSDQQEKRKAIREQYTKNTAEQENLGKKLREKQKVIRESHGPNMKQAKMWRDLEQLMECKKQCFLKQQSQTSIGQVIQEGGEDRLIL

SEQ ID NO: 749 - protein, 482 aa, Homo sapiens
MDEGIPHLQERQLLEHRDFIGLDYSSLYMCKPKRSMKRDDTKDTYKLPHRLIEKKRRDRINECIAQLKDLLPEHLKLTTLGHLEKAVVLELTLKHLKALTALTEQQHQKIIALQNGERSLKSPIQSDLDAFHSGFQTCAKEVLQYLSRFESWTPREPRCVQLINHLHAVATQFLPTPQLLTQQVPLSKGTGAPSAAGSAAAPCLERAGQKLEPLAYCVPVIQRTQPSAELAAENDTDTDSGYGGEAEARPDREKGKGAGASRVTIKQEPPGEDSPAPKRMKLDSRGGGSGGGPGGGAAAAAAALLGPDPAAAAALLRPDAALLSSLVAFGGGGGAPFPQPAAAAAPFCLPFCFLSPSAAAAYVQPFLDKSGLEKYLYPAAAAAPFPLLYPGIPAPAAAAAAAAAAAAAAAAFPCLSSVLSPPPEKAGAAAATLLPHEVAPLGAPHPQHPHGRTHLPFAGPREPGNPESSAQEDPSQPGKEAP

SEQ ID NO: 750 - protein, 942 aa, Homo sapiens
MASDAVQSEPRSWSLLEQLGLAGADLAAPGVQQQLELERERLRREIRKELKLKEGAENLRRATTDLGRSLGPVELLLRGSSRRLDLLHQQLQELHAHVVLPDPAATHDGPQSPGAGGPTCSATNLSRVAGLEKQLAIELKVKQGAENMIQTYSNGSTKDRKLLLTAQQMLQDSKTKIDIIRMQLRRALQAGQLENQAAPDDTQGSPDLGAVELRIEELRHHFRVEHAVAEGAKNVLRLLSAAKAPDRKAVSEAQEKLTESNQKLGLLREALERRLGELPADHPKGRLLREELAAASSAAFSTRLAGPFPATHYSTLCKPAPLTGTLEVRVVGCRDLPETIPWNPTPSMGGPGTPDSRPPFLSRPARGLYSRSGSLSGRSSLKAEAENTSEVSTVLKLDNTVVGQTSWKPCGPNAWDQSFTLELERARELELAVFWRDQRGLCALKFLKLEDFLDNERHEVQLDMEPQGCLVAEVTFRNPVIERIPRLRRQKKIFSKQQGKAFQRARQMNIDVATWVRLLRRLIPNATGTGTFSPGASPGSEARTTGDISVEKLNLGTDSDSSPQKSSRDPPSSPSSLSSPIQESTAPELPSETQETPGPALCSPLRKSPLTLEDFKFLAVLGRGHFGKVLLSEFRPSGELFAIKALKKGDIVARDEVESLMCEKRILAAVTSAGHPFLVNLFGCFQTPEHVCFVMEYSAGGDLMLHIHSDVFSEPRAIFYSACVVLGLQFLHEHKIVYRDLKLDNLLLDTEGYVKIADFGLCKEGMGYGDRTSTFCGTPEFLAPEVLTDTSYTRAVDWWGLGVLLYEMLVGESPFPGDDEEEVFDSIVNDEVRYPRFLSAEAIGIMRRLLRRNPERRLGSSERDAEDVKKQPFFRTLGWEALLARRLPPPFVPTLSGRTDVSNFDEEFTGEAPTLSPPRDARPLTAAEQAAFLDFDFVAGGC

SEQ ID NO: 751 - protein, 835 aa, Homo sapiens
MGGRVFLAFCVWLTLPGAETQDSRGCARWCPQNSSCVNATACRCNPGFSSFSEIITTPTETCDDINECATPSKVSCGKFSDCWNTEGSYDCVCSPGYEPVSGAKTFKNESENTCQDVDECQQNPRLCKSYGTCVNTLGSYTCQCLPGFKFIPEDPKVCTDVNECTSGQNPCHSSTHCLNNVGSYQCRCRPGWQPIPGSPNGPNNTVCEDVDECSSGQHQCDSSTVCFNTVGSYSCRCRPGWKPRHGIPNNQKDTVCEDMTFSTWTPPPGVHSQTLSRFFDKVQDLGRDSKTSSAEVTIQNVIKLVDELMEAPGDVEALAPPVRHLIATQLLSNLEDIMRILAKSLPKGPFTYISPSNTELTLMIQERGDKNVTMGQSSARMKLNWAVAAGAEDPGPAVAGILSIQNMTTLLANASLNLHSKKQAELEEIYESSIRGVQLRRLSAVNSIFLSHNNTKELNSPILFAFSHLESSDGEAGRDPPAKDVMPGPRQELLCAFWKSDSDRGGHWATEGCQVLGSKNGSTTCQCSHLSSFAILMAHYDVEDWKLTLITRVGLALSLFCLLLCILTFLLVRPIQGSRTTIHLHLCICLFVGSTIFLAGIENEGGQVGLRCRLVAGLLHYCFLAAFCWMSLEGLELYFLVVRVFQGQGLSTRWLCLIGYGVPLLIVGVSAAIYSKGYGRPRYCWLDFEQGFLWSFLGPVTFIILCNAVIFVTTVWKLTQKFSEINPDMKKLKKARALTITAIAQLFLLGCTWVFGLFIFDDRSLVLTYVFTILNCLQGAFLYLLHCLLNKKVREEYRKWACLVAGGSKYSEFTSTTSGTGHNQTRALRASESGI

SEQ ID NO: 752 - protein, 627 aa, Homo sapiens
MIVFGGEDRSDLFLPDSQTNEERKQYDSVAFEDVAVNFTQEEWALLGPSQKSLYRDVMWETIRNLDCIGMKWEDTNIEDQHRNPRRSLRCHIIERFSESRQPDSTVNEKPPGVDPCKSSVCGEIMGCSFLNCYITFDAGHKPDECQEYGEKPHTHKQCGTAFNYHHSFQTQERPHTGKKRYDCKECGKTFSSSGNLRRHIIVQRGGGPYICKLCGKAFFWPSLFRMHERTHTGEKPYECKQCCKAFPIYSSYLRHERTHTGEKPYECKHCSKAFPDYSSYVRHERTHTGEKPYKCKRCGRAFSVSSSLRIHERTHTGEKPYECKQCGKAFHHLGSFQRHMIRHTGDGPHKCKICGKGFDCPSSLQSHERTHTGEKPYECKQCGKALSHHSSFRSHMIMHTGDGPHKCKVCGKAFIYPSVFQGHERTHTGEKPYECKECGKAFRISSSLRRHETTHTGEKPYKCKCGKAFIDFYSFQNHETTHTGEKPYECKECGKAFSCFTYLSQHRRTHMAEKPYECKTCKKAFSHFGNLKVHERIHTGEKPYECKECRKAFSWLTCLLRHERIHTGKKSYECQQCGKAFTRSRFLRGHEKTHTGEKMHECKECGKALSSLSSLHRHKRTHWRDTL

SEQ ID NO: 753 - protein, 600 aa, Homo sapiens
MVLILGRRLNREDLGVRDSPATKRKVFEMDPKSLTGHEFFDFSSGSSHAENILQIFNEFRDSRLFTDVIICVEGKEFPCHRAVLSACSSYFRAMFCNDHRESREMLVEINGILAEAMECFLQYVYTGKVKITTENVQYLFETSSLFQISVLRDACAKFLEEQLDPCNCLGIQRFADTHSLKTLFTKCKNFALQTFEDVSQHEEFLELDKDELIDYICSDELVIGKEEMVFEAVMRWVYRAVDLRRPLLHELLTHVRLPLLHPNYFVQTVEVDQLIQNSPECYQLLHEARRYHILGNEMMSPRTRPRRSTGYSEVIVVVGGCERVGGFNLPYTECYDPVTGEWKSLAKLPEFTKSEYAVCALRNDILVSGGRINSRDVWIYNSQLNIWIRVASLNKGRWRHKMAVLLGKVYVVGGYDGQNRLSSVECYDSFSNRWTEVAPLKEAVSSPAVTSCVGKLFVIGGGPDDNTCSDKVQSYDPETNSWLLRAAIPIAKRCITAVSLNNLIYVAGGLTKAIYCYDPVEDYWMHVQNTFSRQENCGMSVCNGKIYILGGRRENGEATDTILCYDPATSIITGVAAMPRPVSYHGCVTIHRYNEKCFKL

SEQ ID NO: 754 - protein, 1465 aa, Homo sapiens
MPEQERQITAREGASRKILSKLSLPTRAWEPAMKKSFAFDNVGYEGGLDGLGPSSQVATSTVRILGMTCQSCVKSIEDRISNLKGIISMKVSLEQGSATVKYVPSVVCLQQVCHQIGDMGFEASIAEGKAASWPSRSLPAQEAVVKLRVEGMTCQSCVSSIEGKVRKLQGVVRVKVSLSNQEAVITYQPYLIQPEDLRDHVNDMGFEAAIKSKVAPLSLGPIDIERLQSTNPKRPLSSANQNFNNSETLGHQGSHVVTLQLRIDGMHCKSCVLNIEENIGQLLGVQSIQVSLENKTAQVKYDPSCTSPVALQRAIEALPPGNFKVSLPDGAEGSGTDHRSSSSHSPGSPPRNQVQGTCSTTLIAIAGMTCASCVHSIEGMISQLEGVQQISVSLAEGTATVLYNPSVISPEELRAAIEDMGFEASVVSESCSTNPLGNHSAGNSMVQTTDGTPTSVQEVAPHTGRLPANHAPDILAKSPQSTRAVAPQKCFLQIKGMTCASCVSNIERNLQKEAGVLSVLVALMAGKAEIKYDPEVIQPLEIAQFIQDLGFEAAVMEDYAGSDGNIELTITGMTCASCVHNIESKLTRTNGITYASVALATSKALVKFDPEIIGPRDIIKIIEEIGFHASLAQRNPNAHHLDHKMEIKQWKKSFLCSLVFGIPVMALMIYMLIPSNEPHQSMVLDHNIIPGLSILNLIFFILCTFVQLLGGWYFYVQAYKSLRHRSANMDVLIVLATSIAYVYSLVILVVAVAEKAERSPVTFFDTPPMLFVFIALGRWLEHLAKSKTSEALAKLMSLQATEATVVTLGEDNLIIREEQVPMELVQRGDIVKVVPGGKFPVDGKVLEGNTMADESLITGEAMPVTKKPGSTVIAGSINAHGSVLIKATHVGNDTTLAQIVKLVEEAQMSKAPIQQLADRFSGYFVPFIIIMSTLTLVVWIVIGFIDFGVVQRYFPNPNKHISQTEVIIRFAFQTSITVLCIACPCSLGLATPTAVMVGTGVAAQNGILIKGGKPLEMAHKIKTVMFDKTGTITHGVPRVMRVLLLGDVATLPLRKVLAVVGTAEASSEHPLGVAVTKYCKEELGTETLGYCTDFQAVPGCGIGCKVSNVEGILAHSERPLSAPASHLNEAGSLPAEKDAVPQTFSVLIGNREWLRRNGLTISSDVSDAMTDHEMKGQTAILVAIDGVLCGMIAIADAVKQEAALAVHTLQSMGVDVVLITGDNRKTARAIATQVGINKVFAEVLPSHKVAKVQELQNKGKKVAMVGDGVNDSPALAQADMGVAIGTGTDVAIEAADVVLIRNDLLDVVASIHLSKRTVRRIRINLVLALIYNLVGIPIAAGVFMPIGIVLQPWMGSAAMAASSVSVVLSSLQLKCYKKPDLERYEAQAHGHMKPLTASQVSVHIGMDDRWRDSPRATPWDQVSYVSQVSLSSLTSDKPSRHSAAADDDGDKWSLLLNGRDEEQYI

SEQ ID NO: 755 - protein, 1668 aa, Homo sapiens
MSKIRRKVTVENTKTISDSTSRRPSVFERLGPSTGSTAETQCRNWLKTGNCLYGNTCRFVHGPSPRGKGYSSNYRRSPERPTGDLRERMKNKRQDVDTEPQKRNTEESSSPVRKESSRGRHREKEDIKITKERTPESEEENVEWETNRDDSDNGDINYDYVHELSLEMKRQKIQRELMKLEQENMEKREEIIIKKEVSPEVVRSKLSPSPSLRKSSKSPKRKSSPKSSSASKKDRKTSAVSSPLLDQQRNSKTNQSKKKGPRTPSPPPPIPEDIALGKKYKEKYKVKDRIEEKTRDGKDRGRDFERQREKRDKPRSTSPAGQHHSPISSRHHSSSSQSGSSIQRHSPSPRRKRTPSPSYQRTLTPPLRRSASPYPSHSLSSPQRKQSPPRHRSPMREKGRHDHERTSQSHDRRHERREDTRGKRDREKDSREEREYEQDQSSSRDHRDDREPRDGRDRRDARDTRDRRELRDSRDMRDSREMRDYSRDTKESRDPRDSRSTRDAHDYRDREGRDTHRKEDTYPEESRSYGRNHLREESSRTEIRNESRNESRSEIRNDRMGRSRGRVPELPEKGSRGSRGSQIDSHSSNSNYHDSWETRSSYPERDRYPERDNRDQARDSSFERRHGERDRRDNRERDQRPSSPIRHQGRNDELERDERREERRVDRVDDRRDERARERDRERERDRERERERERERDREREKERELERERAREREREREKERDRERDRDRDHDRERERERERDREKEREREREERERERERERERERERERERERARERDKERERQRDWEDKDKGRDDRREKREEIREDRNPRDGHDERKSKKRYRNEGSPSPRQSPKRRREHSPDSDAYNSGDDKNEKHRLLSQVVRPQESRSLSPSHLTEDRQGRWKEEDRKPERKESSRRYEEQELKEKVSSVDKQREQTEILESSRMRAQDIIGHHQSEDRETSDRAHDENKKKAKIQKKPIKKKKEDDVGIERGNIETTSEDGQVFSPKKGQKKKSIEKKRKKSKGDSDISDEEAAQQSKKKRGPRTPPITTKEELVEMCNGKNGILEDSQKKEDTAFSDWSDEDVPDRTEVTEAEHTATATTPGSTPSPLSSLLPPPPPVATATATTVPATLAATTAAAATSFSTSAITISTSATPTNTTNNTFANEDSHRKCHRTRVEKVETPHVTIEDAQHRKPMDQKRSSSLGSNRSNRSHTSGRLRSPSNDSAHRSGDDQSGRKRVLHSGSRDREKTKSLEITGERKSRIDQLKRGEPSRSTSSDRQDSRSHSSRRSSPESDRQVHSRSGSFDSRDRLQERDRYEHDRERERERRDTRQREWDRDADKDWPRNRDRDRLRERERERERDKRRDLDRERERLISDSVERDRDRDRDRTFESSQIESVKRCEAKLEGEHERDLESTSRDSLALDKERMDKDLGSVQGFEETNKSERTESLEGDDESKLDDAHSLGSGAGEGYEPISDDELDEILAGDAEKREDQQDEEKMPDPLDVIDVDWSGLMPKHPKEPREPGAALLKFTPGAVMLRVGISKKLAGSELFAKVKETCQRLLEKPKDADNLFEHELGALNMAALLRKEERASLLSNLGPCCKALCFRRDSAIRKQLVKNEKGTIKQAYTSAPMVDNELLRLSLRLFKRKTTCHAPGHEKTEDNKLSQSSIQQELCVS

SEQ ID NO: 756 - protein, 331 aa, Homo sapiens
MSKTFVKSKEMGELVNTPSWMDKGLGSQNEVKEEESRPGTYGMLSSLTEEHDSIEEEEEEEEDGEKPKRRGPKKKKMTKARLERFRARRVKANARERTRMHGLNDALDNLRRVMPCYSKTQKLSKIETLRLARNYIWALSEVLETGQTPEGKGFVEMLCKGLSQPTSNLVAGCLQLGPQSVLLEKHEDKSPICDSAISVHNFNYQSPGLPSPPYGHMETHLLHLKPQVFKSLGESSFGSHLPDCSTPPYEGPLTPPLSISGNFSLKQDGSPDLEKSYSFMPHYPSSSLSSGHVHSTPFQAGTPRYDVPIDMSYDSYPHHGIGTQLNTVFTE

SEQ ID NO: 757 - protein, 598 aa, Homo sapiens
MPCIQAQYGTPAPSPGPRDHLASDPLTPEFIKPTMDLASPEAAPAAPTALPSFSTFMDGYTGEFDTFLYQLPGTVQPCSSASSSASSTSSSSATSPASASFKFEDFQVYGCYPGPLSGPVDEALSSSGSDYYGSPCSAPSPSTPSFQPPQLSPWDGSFGHFSPSQTYEGLRAWTEQLPKASGPPQPPAFFSFSPPTGPSPSLAQSPLKLFPSQATHQLGEGESYSMPTAFPGLAPTSPHLEGSGILDTPVTSTKARSGAPGGSEGRCAVCGDNASCQHYGVRTCEGCKGFFKRTVQKNAKYICLANKDCPVDKRRRNRCQFCRFQKCLAVGMVKEVVRTDSLKGRRGRLPSKPKQPPDASPANLLTSLVRAHLDSGPSTAKLDYSKFQELVLPHFGKEDAGDVQQFYDLLSGSLEVIRKWAEKIPGFAELSPADQDLLLESAFLELFILRLAYRSKPGEGKLIFCSGLVLHRLQCARGFGDWIDSILAFSRSLHSLLVDVPAFACLSALVLITDRHGLQEPRRVEELQNRIASCLKEHVAAVAGEPQPASCLSRLLGKLPELRTLCTQGLQRIFYLKLEDLVPPPPIIDKIFMDTLPF

SEQ ID NO: 758 - protein, 536 aa, Homo sapiens
MELSPRSPPEMLEESDCPSPLELKSAPSKKMWIKLRSLLRYMVKQLENGEINIEELKKNLEYTASLLEAVYIDETRQILDTEDELQELRSDAVPSEVRDWLASTFTQQARAKGRRAEEKPKFRSIVHAVQAGIFVERMFRRTYTSVGPTYSTAVLNCLKNLDLWCFDVFSLNQAADDHALRTIVFELLTRHNLISRFKIPTVFLMSFLDALETGYGKYKNPYHNQIHAADVTQTVHCFLLRTGMVHCLSEIELLAIIFAAAIHDYEHTGTTNSFHIQTKSECAIVYNDRSVLENHHISSVFRLMQDDEMNIFINLTKDEFVELRALVIEMVLATDMSCHFQQVKTMKTALQQLERIDKPKALSLLLHAADISHPTKQWLVHSRWTKALMEEFFRQGDKEAELGLPFSPLCDRTSTLVAQSQIGFIDFIVEPTFSVLTDVAEKSVQPLADEDSKSKNQPSFQWRQPSLDVEVGDPNPDVVSFRSTWVKRIQENKQKWKERAASGITNQMSIDELSPCEEEAPPSPAEDEHNQNGNLD

SEQ ID NO: 759 - protein, 4544 aa, Homo sapiens
MLTPPLLLLLPLLSALVAAAIDAPKTCSPKQFACRDQITCISKGWRCDGERDCPDGSDEAPEICPQSKAQRCQPNEHNCLGTELCVPMSRLCNGVQDCMDGSDEGPHCRELQGNCSRLGCQHHCVPTLDGPTCYCNSSFQLQADGKTCKDFDECSVYGTCSQLCTNTDGSFICGCVEGYLLQPDNRSCKAKNEPVDRPPVLLIANSQNILATYLSGAQVSTITPTSTRQTTAMDFSYANETVCWVHVGDSAAQTQLKCARMPGLKGFVDEHTINISLSLHHVEQMAIDWLTGNFYFVDDIDDRIFVCNRNGDTCVTLLDLELYNPKGIALDPAMGKVFFTDYGQIPKVERCDMDGQNRTKLVDSKIVFPHGITLDLVSRLVYWADAYLDYIEVVDYEGKGRQTIIQGILIEHLYGLTVFENYLYATNSDNANAQQKTSVIRVNRFNSTEYQVVTRVDKGGALHIYHQRRQPRVRSHACENDQYGKPGGCSDICLLANSHKARTCRCRSGFSLGSDGKSCKKPEHELFLVYGKGRPGIIRGMDMGAKVPDEHMIPIENLMNPRALDFHAETGFIYFADTTSYLIGRQKIDGTERETILKDGIHNVEGVAVDWMGDNLYWTDDGPKKTISVARLEKAAQTRKTLIEGKMTHPRAIVVDPLNGWMYWTDWEEDPKDSRRGRLERAWMDGSHRDIFVTSKTVLWPNGLSLDIPAGRLYWVDAFYDRIETILLNGTDRKIVYEGPELNHAFGLCHHGNYLFWTEYRSGSVYRLERGVGGAPPTVTLLRSERPPIFEIRMYDAQQQQVGTNKCRVNNGGCSSLCLATPGSRQCACAEDQVLDADGVTCLANPSYVPPPQCQPGEFACANSRCIQERWKCDGDNDCLDNSDEAPALCHQHTCPSDRFKCENNRCIPNRWLCDGDNDCGNSEDESNATCSARTCPPNQFSCASGRCIPISWTCDLDDDCGDRSDESASCAYPTCFPLTQFTCNNGRCININWRCDNDNDCGDNSDEAGCSHSCSSTQFKCNSGRCIPEHWTCDGDNDCGDYSDETHANCTNQATRPPGGCHTDEFQCRLDGLCIPLRWRCDGDTDCMDSSDEKSCEGVTHVCDPSVKFGCKDSARCISKAWVCDGDNDCEDNSDEENCESLACRPPSHPCANNTSVCLPPDKLCDGNDDCGDGSDEGELCDQCSLNNGGCSHNCSVAPGEGIVCSCPLGMELGPDNHTCQIQSYCAKHLKCSQKCDQNKFSVKCSCYEGWVLEPDGESCRSLDPFKPFIIFSNRHEIRRIDLHKGDYSVLVPGLRNTIALDFHLSQSALYWTDVVEDKIYRGKLLDNGALTSFEVVIQYGLATPEGLAVDWIAGNIYWVESNLDQIEVAKLDGTLRTTLLAGDIEHPRAIALDPRDGILFWTDWDASLPRIEAASMSGAGRRTVHRETGSGGWPNGLTVDYLEKRILWIDARSDAIYSARYDGSGHMEVLRGHEFLSHPFAVTLYGGEVYWTDWRTNTLAKANKWTGHNVTVVQRTNTQPFDLQVYHPSRQPMAPNPCEANGGQGPCSHLCLINYNRTVSCACPHLMKLHKDNTTCYEFKKFLLYARQMEIRGVDLDAPYYNYIISFTVPDIDNVTVLDYDAREQRVYWSDVRTQAIKRAFINGTGVETVVSADLPNAHGLAVDWVSRNLFWTSYDTNKKQINVARLDGSFKNAVVQGLEQPHGLVVHPLRGKLYWTDGDNISMANMDGSNRTLLFSGQKGPVGLAIDFPESKLYWISSGNHTINRCNLDGSGLEVIDAMRSQLGKATALAIMGDKLWWADQVSEKMGTCSKADGSGSVVLRNSTTLVMHMKVYDESIQLDHKGTNPCSVNNGDCSQLCLPTSETTRSCMCTAGYSLRSGQQACEGVGSFLLYSVHEGIRGIPLDPNDKSDALVPVSGTSLAVGIDFHAENDTIYWVDMGLSTISRAKRDQTWREDVVTNGIGRVEGIAVDWIAGNIYWTDQGFDVIEVARLNGSFRYVVISQGLDKPRAITVHPEKGYLFWTEWGQYPRIERSRLDGTERVVLVNVSISWPNGISVDYQDGKLYWCDARTDKIERIDLETGENREVVLSSNNMDMFSVSVFEDFIYWSDRTHANGSIKRGSKDNATDSVPLRTGIGVQLKDIKVFNRDRQKGTNVCAVANGGCQQLCLYRGRGQRACACAHGMLAEDGASCREYAGYLLYSERTILKSIHLSDERNLNAPVQPFEDPEHMKNVIALAFDYRAGTSPGTPNRIFFSDIHFGNIQQINDDGSRRITIVENVGSVEGLAYHRGWDTLYWTSYTTSTITRHTVDQTRPGAFERETVITMSGDDHPRAFVLDECQNLMFWTNWNEQHPSIMRAALSGANVLTLIEKDIRTPNGLAIDHRAEKLYFSDATLDKIERCEYDGSHRYVILKSEPVHPFGLAVYGEHIFWTDWVRRAVQRANKHVGSNMKLLRVDIPQQPMGIIAVANDTNSCELSPCRINNGGCQDLCLLTHQGHVNCSCRGGRILQDDLTCRAVNSSCRAQDEFECANGECINFSLTCDGVPHCKDKSDEKPSYCNSRRCKKTFRQCSNGRCVSNMLWCNGADDCGDGSDEIPCNKTACGVGEFRCRDGTCIGNSSRCNQFVDCEDASDEMNCSATDCSSYFRLGVKGVLFQPCERTSLCYAPSWVCDGANDCGDYSDERDCPGVKRPRCPLNYFACPSGRCIPMSWTCDKEDDCEHGEDETHCNKFCSEAQFECQNHRCISKQWLCDGSDDCGDGSDEAAHCEGKTCGPSSFSCPGTHVCVPERWLCDGDKDCADGADESIAAGCLYNSTCDDREFMCQNRQCIPKHFVCDHDRDCADGSDESPECEYPTCGPSEFRCANGRCLSSRQWECDGENDCHDQSDEAPKNPHCTSQEHKCNASSQFLCSSGRCVAEALLCNGQDDCGDSSDERGCHINECLSRKLSGCSQDCEDLKIGFKCRCRPGFRLKDDGRTCADVDECSTTFPCSQRCINTHGSYKCLCVEGYAPRGGDPHSCKAVTDEEPFLIFANRYYLRKLNLDGSNYTLLKQGLNNAVALDFDYREQMIYWTDVTTQGSMIRRMHLNGSNVQVLHRTGLSNPDGLAVDWVGGNLYWCDKGRDTIEVSKLNGAYRTVLVSSGLREPRALVVDVQNGYLYWTDWGDHSLIGRIGMDGSSRSVIVDTKITWPNGLTLDYVTERIYWADAREDYIEFASLDGSNRHVVLSQDIPHIFALTLFEDYVYWTDWETKSINRAHKTTGTNKTLLISTLHRPMDLHVFHALRQPDVPNHPCKVNNGGCSNLCLLSPGGGHKCACPTNFYLGSDGRTCVSNCTASQFVCKNDKCIPFWWKCDTEDDCGDHSDEPPDCPEFKCRPGQFQCSTGICTNPAFICDGDNDCQDNSDEANCDIHVCLPSQFKCTNTNRCIPGIFRCNGQDNCGDGEDERDCPEVTCAPNQFQCSITKRCIPRVWVCDRDNDCVDGSDEPANCTQMTCGVDEFRCKDSGRCIPARWKCDGEDDCGDGSDEPKEECDERTCEPYQFRCKNNRCVPGRWQCDYDNDCGDNSDEESCTPRPCSESEFSCANGRCIAGRWKCDGDHDCADGSDEKDCTPRCDMDQFQCKSGHCIPLRWRCDADADCMDGSDEEACGTGVRTCPLDEFQCNNTLCKPLAWKCDGEDDCGDNSDENPEECARFVCPPNRPFRCKNDRVCLWIGRQCDGTDNCGDGTDEEDCEPPTAHTTHCKDKKEFLCRNQRCLSSSLRCNMFDDCGDGSDEEDCSIDPKLTSCATNASICGDEARCVRTEKAAYCACRSGFHTVPGQPGCQDINECLRFGTCSQLCNNTKGGHLCSCARNFMKTHNTCKAEGSEYQVLYIADDNEIRSLFPGHPHSAYEQAFQGDESVRIDAMDVHVKAGRVYWTNWHTGTISYRSLPPAAPPTTSNRHRRQIDRGVTHLNISGLKMPRGIAIDWVAGNVYWTDSGRDVIEVAQMKGENRKTLISGMIDEPHAIVVDPLRGTMYWSDWGNHPKIETAAMDGTLRETLVQDNIQWPTGLAVDYHNERLYWADAKLSVIGSIRLNGTDPIVAADSKRGLSHPFSIDVFEDYIYGVTYINNRVFKIHKFGHSPLVNLTGGLSHASDVVLYHQHKQPEVTNPCDRKKCEWLCLLSPSGPVCTCPNGKRLDNGTCVPVPSPTPPPDAPRPGTCNLQCFNGGSCFLNARRQPKCRCQPRYTGDKCELDQCWEHCRNGGTCAASPSGMPTCRCPTGFTGPKCTQQVCAGYCANNSTCTVNQGNQPQCRCLPGFLGDRCQYRQCSGYCENFGTCQMAADGSRQCRCTAYFEGSRCEVNKCSRCLEGACVVNKQSGDVTCNCTDGRVAPSCLTCVGHCSNGGSCTMNSKMMPECQCPPHMTGPRCEEHVFSQQQPGHIASILIPLLLLLLLVLVAGVVFWYKRRVQGAKGFQHQRMTNGAMNVEIGNPTYKMYEGGEPDDVGGLLDADFALDPDKPTNFTNPVYATLYMGGHGSRHSLASTDEKRELLGRGPEDEIGDPLA

SEQ ID NO: 760 - protein, 290 aa, Homo sapiens
MSNYVNDMWPGSPQEKDSPSTSRSGGSSRLSSRSRSRSFSRSSRSHSRVSSRFSSRSRRSKSRSRSRRRHQRKYRRYSRSYSRSRSRSRSRRYRERRYGFTRRYYRSPSRYRSRSRSRSRSRGRSYCGRAYAIARGQRYYGFGRTVYPEEHSRWRDRSRTRSRSRTPFRLSEKDRMELLEIAKTNAAKALGTTNIDLPASLRTVPSAKETSRGIGVSSNGAKPELSEKVTEDGTRNPNEKPTQQRSIAFSSNNSVAKPIQKSAKAATEEASSRSPKIDQKKSPYGLWIPI

SEQ ID NO: 761 - protein, 380 aa, Homo sapiens
MAFVCLAIGCLYTFLISTTFGCTSSSDTEIKVNPPQDFEIVDPGYLGYLYLQWQPPLSLDHFKECTVEYELKYRNIGSETWKTIITKNLHYKDGFDLNKGIEAKIHTLLPWQCTNGSEVQSSWAETTYWISPQGIPETKVQDMDCVYYNWQYLLCSWKPGIGVLLDTNYNLFYWYEGLDHALQCVDYIKADGQNIGCRFPYLEASDYKDFYICVNGSSENKPIRSSYFTFQLQNIVKPLPPVYLTFTRESSCEIKLKWSIPLGPIPARCFDYEIEIREDDTTLVTATVENETYTLKTTNETRQLCFVVRSKVNIYCSDDGIWSEWSDKQCWEGEDLSKKTLLRFWLPFGFILILVIFVTGLLLRKPNTYPKMIPEFFCDT

SEQ ID NO: 762 - protein, 680 aa, Homo sapiens
MLPQIPFLLLVSLNLVHGVFYAERYQMPTGIKGPLPNTKTQFFIPYTIKSKGIAVRGEQGTPGPPGPAGPRGHPGPSGPPGKPGYGSPGLQGEPGLPGPPGPSAVGKPGVPGLPGKPGERGPYGPKGDVGPAGLPGPRGPPGPPGIPGPAGISVPGKPGQQGPTGAPGPRGFPGEKGAPGVPGMNGQKGEMGYGAPGRPGERGLPGPQGPTGPSGPPGVGKRGENGVPGQPGIKGDRGFPGEMGPIGPPGPQGPPGERGPEGIGKPGAAGAPGQPGIPGTKGLPGAPGIAGPPGPPGFGKPGLPGLKGERGPAGLPGGPGAKGEQGPAGLPGKPGLTGPPGNMGPQGPKGIPGSHGLPGPKGETGPAGPAGYPGAKGERGSPGSDGKPGYPGKPGLDGPKGNPGLPGPKGDPGVGGPPGLPGPVGPAGAKGMPGHNGEAGPRGAPGIPGTRGPIGPPGIPGFPGSKGDPGSPGPPGPAGIATKGLNGPTGPPGPPGPRGHSGEPGLPGPPGPPGPPGQAVMPEGFIKAGQRPSLSGTPLVSANQGVTGMPVSAFTVILSKAYPAIGTPIPFDKILYNRQQHYDPRTGIFTCQIPGIYYFSYHVHVKGTHVWVGLYKNGTPVMYTYDEYTKGYLDQASGSAIIDLTENDQVWLQLPNAESNGLYSSEYVHSSFSGFLVAPM

SEQ ID NO: 763 - protein, 2472 aa, Homo sapiens
MTARGQSPLAPLLETLEDPSASHGGQTDAYLTLTSRMTGEEGKEVITEIEKKLPRLYKVLKTHISSQNSELSSAALQALGFCLYNPKITSELSEANALELLSKLNDTIKNSDKNVRTRALWVISKQTFPSEVVGKMVSSIIDSLEILFNKGETHSAVVDFEALNVIVRLIEQAPIQMGEEAVRWAKLVIPLVVHSAQKVHLRGATALEMGMPLLLQKQQEIASITEQLMTTKLISELQKLFMSKNETYVLKLWPLFVKLLGRTLHRSGSFINSLLQLEELGFRSGAPMIKKIAFIAWKSLIDNFALNPDILCSAKRLKLLMQPLSSIHVRTETLALTKLEVWWYLLMRLGPHLPANFEQVCVPLIQSTISIDSNASPQGNSCHVATSPGLNPMTPVHKGASSPYGAPGTPRMNLSSNLGGMATIPSIQLLGLEMLLHFLLGPEALSFAKQNKLVLSLEPLEHPLISSPSFFSKHANTLITAVHDSFVAVGKDAPDVVVSAIWKELISLVKSVTESGNKKEKPGSEVLTLLLKSLESIVKSEVFPVSKTLVLMEITIKGLPQKVLGSPAYQVANMDILNGTPALFLIQLIFNNFLECGVSDERFFLSLESLVGCVLSGPTSPLAFSDSVLNVINQNAKQLENKEHLWKMWSVIVTPLTELINQTNEVNQGDALEHNFSAIYGALTLPVNHIFSEQRFPVATMKTLLRTWSELYRAFARCAALVATAEENLCCEELSSKIMSSLEDEGFSNLLFVDRIIYIITVMVDCIDFSPYNIKYQPKVKSPQRPSDWSKKKNEPLGKLTSLFKLIVKVIYSFHTLSFKEAHSDTLFTIGNSITGIISSVLGHISLPSMIRKIFATLTRPLALFYENSKLDEVPKVYSCLNNKLEKLLGEIIACLQFSYTGTYDSELLEQLSPLLCIIFLHKNKQIRKQSAQFWNATFAKVMMLVYPEELKPVLTQAKQKFLLLLPGLETVEMMEESSGPYSDGTENSQLNVKISGMERKSNGKRDSFLAQTKNKKENMKPAAKLKLESSSLKVKGEILLEEEKSTDFVFIPPEGKDAKERILTDHQKEVLKTKRCDIPAMYNNLDVSQDTLFTQYSQEEPMEIPTLTRKPKEDSKMMITEEQMDSDIVIPQDVTEDCGMAEHLEKSSLSNNECGSLDKTSPEMSNSNNDERKKALISSRKTSTECASSTENSFVVSSSSVSNTTVAGTPPYPTSRRQTFITLEKFDGSENRPFSPSPLNNISSTVTVKNNQETMIKTDFLPKAKQREGTFSKSDSEKIVNGTKRSSRRAGKAEQTGNKRSKPLMRSEPEKNTEESVEGIVVLENNPPGLLNQTECVSDNQVHLSESTMEHDNTKLKAATVENAVLLETNTVEEKNVEINLESKENTPPVVISADQMVNEDSQVQITPNQKTLRRSSRRRSEVVESTTESQDKENSHQKKERRKEEEKPLQKSPLHIKDDVLPKQKLIAEQTLQENLIEKGSNLHEKTLGETSANAETEQNKKKADPENIKSEGDGTQDIVDKSSEKLVRGRTRYQTRRASQGLLSSIENSESDSSEAKEEGSRKKRSGKWKNKSNESVDIQDQEEKVVKQECIKAENQSHDYKATSEEDVSIKSPICEKQDESNTVICQDSTVTSDLLQVPDDLPNVCEEKNETSKYAEYSFTSLPVPESNLRTRNAIKRLHKRDSFDNCSLGESSKIGISDISSLSEKTFQTLECQHKRSRRVRRSKGCDCCGEKSQPQEKSLIGLKNTENNDVEISETKKADVQAPVSPSETSQANPYSEGQFLDEHHSVNFHLGLKEDNDTINDSLIVSETKSKENTMQESLPSGIVNFREEICDMDSSEAMSLESQESPNENFKTVGPCLGDSKNVSQESLETKEEKPEETPKMELSLENVTVEGNACKVTESNLEKAKTMELNVGNEASFHGQERTKTGISEEAAIEENKRNDDSEADTAKLNAKEVATEEFNSDISLSDNTTPVKLNAQTEISEQTAAGELDGGNDVSDLHSSEETNTKMKNNEEMMIGEAMAETGHDGETENEGITTKTSKPDEAETNMLTAEMDNFVCDTVEMSTEEGIIDANKTETNTEYSKSEEKLDNNQMVMESDILQEDHHTSQKVEEPSQCLASGTAISELIIEDNNASPQKLRELDPSLVSANDSPSGMQTRCVWSPLASPSTSILKRGLKRSQEDEISSPVNKVRRVSFADPIYQAGLADDIDRRCSIVRSHSSNSSPIGKSVKTSPTTQSKHNTTSAKGFLSPGSRSPKFKSSKKCLISEMAKESIPCPTESVYPPLVNCVAPVDIILPQITSNMWARGLGQLIRAKNIKTIGDLSTLTASEIKTLPIRSPKVSNVKKALRIYHEQQVKTRGLEEIPVFDISEKTVNGIENKSLSPDEERLVSDIIDPVALEIPLSKNLLAQISALALQLDSEDLHNYSGSQLFEMHEKLSCMANSVIKNLQSRWRSPSHENSI

SEQ ID NO: 764 - protein, 1316 aa, Homo sapiens
MDSQELKTLINYYCQERYFHHVLLVASEGIKRYGSDPVFRFYHAYGTLMEGKTQEALREFEAIKNKQDVSLCSLLALIYAHKMSPNPDREAILESDARVKEQRKGAGEKALYHAGLFLWHIGRHDKAREYIDRMIKISDGSKQGHVLKAWLDITRGKEPYTKKALKYFEEGLQDGNDTFALLGKAQCLEMRQNYSGALETVNQIIVNFPSFLPAFVKKMKLQLALQDWDQTVETAQRLLLQDSQNVEALRMQALYYVCREGDIEKASTKLENLGNTLDAMEPQNAQLFYNITLAFSRTCGRSQLILQKIQTLLERAFSLNPQQSEFATELGYQMILQGRVKEALKWYKTAMTLDETSVSALVGFIQCQLIEGQLQDADQQLEFLNEIQQSIGKSAELIYLHAVLAMKKNKRQEEVINLLNDVLDTHFSQLEGLPLGIQYFEKLNPDFLLEIVMEYLSFCPMQPASPGQPLCPLLRRCISVLETVVRTVPGLLQTVFLIAKVKYLSGDIEAAFNNLQHCLEHNPSYADAHLLLAQVYLSQEKVKLCSQSLELCLSYDFKVRDYPLYHLIKAQSQKKMGEIADAIKTLHMAMSLPGMKRIGASTKSKDRKTEVDTSHRLSIFLELIDVHRLNGEQHEATKVLQDAIHEFSGTSEEVRVTIANADLALAQGDIERALSILQNVTAEQPYFIEAREKMADIYLKHRKDKMLYITCFREIAERMANPRSFLLLGDAYMNILEPEEAIVAYEQALNQNPKDGTLASKMGKALIKTHNYSMAITYYEAALKTGQKNYLCYDLAELLLKLKWYDKAEKVLQHALAHEPVNELSALMEDGRCQVLLAKVYSKMEKLGDAITALQQARELQARVLKRVQMEQPDAVPAQKHLAAEICAEIAKHSVAQRDYEKAIKFYREALVHCETDNKIMLELARLYLAQDDPDSCLRQCALLLQSDQDNEAATMMMADLMFRKQDYEQAVFHLQQLLERKPDNYMTLSRLIDLLRRCGKLEDVPRFFSMAEKRNSRAKLEPGFQYCKGLYLWYTGEPNDALRHFNKARKDRDWGQNALYNMIEICLNPDNETVGGEVFENLDGDLGNSTEKQESVQLAVRTAEKLLKELKPQTVQGHVQLRIMENYCLMATKQKSNVEQALNTFTEIAASEKEHIPALLGMATAYMILKQTPRARNQLKRIAKMNWNAIDAEEFEKSWLLLADIYIQSAKYDMAEDLLKRCLRHNRSCCKAYEYMGYIMEKEQAYTDAALNYEMAWKYSNRTNPAVGYKLAFNYLKAKRYVDSIDICHQVLEAHPTYPKIRKDILDKARASLRP

SEQ ID NO: 765 - protein, 277 aa, Homo sapiens
MIILIYLFLLLWEDTQGWGFKDGIFHNSIWLERAAGVYHREARSGKYKLTYAEAKAVCEFEGGHLATYKQLEAARKIGFHVCAAGWMAKGRVGYPIVKPGPNCGFGKTGIIDYGIRLNRSERWDAYCYNPHAKECGGVFTDPKQIFKSPGFPNEYEDNQICYWHIRLKYGQRIHLSFLDFDLEDDPGCLADYVEIYDSYDDVHGFVGRYCGDELPDDIISTGNVMTLKFLSDASVTAGGFQIKYVAMDPVSKSSQGKNTSTTSTGNKNFLAGRFSHL

SEQ ID NO: 766 - protein, 493 aa, Homo sapiens
MTRALCSALRQALLLLAAAAELSPGLKCVCLLCDSSNFTCQTEGACWASVMLTNGKEQVIKSCVSLPELNAQVFCHSSNNVTKTECCFTDFCNNITLHLPTASPNAPKLGPMELAIIITVPVCLLSIAAMLTVWACQGRQCSYRKKKRPNVEEPLSECNLVNAGKTLKDLIYDVTASGSGSGLPLLVQRTIARTIVLQEIVGKGRFGEVWHGRWCGEDVAVKIFSSRDERSWFREAEIYQTVMLRHENILGFIAADNKDNGTWTQLWLVSEYHEQGSLYDYLNRNIVTVAGMIKLALSIASGLAHLHMEIVGTQGKPAIAHRDIKSKNILVKKCETCAIADLGLAVKHDSILNTIDIPQNPKVGTKRYMAPEMLDDTMNVNIFESFKRADIYSVGLVYWEIARRCSVGGIVEEYQLPYYDMVPSDPSIEEMRKVVCDQKFRPSIPNQWQSCEALRVMGRIMRECWYANGAARLTALRIKKTISQLCVKEDCKA

SEQ ID NO: 767 - protein, 127 aa, Homo sapiens
MSQGLPAAGSVLQRSVAAPGNQPQPQPQQQSPEDDDRKVRRREKNRVAAQRSRKKQTQKADKLHEEYESLEQENTMLRREIGKLTEELKHLTEALKEHEKMCPLLLCPMNFVPVPPRPDPVAGCLPR

SEQ ID NO: 768 - protein, 439 aa, Homo sapiens
MKETPLSNCERRFLLRAIEEKKRLDGRQTYDYRNIRISFGTDYGCCIVELGKTRVLGQVSCELVSPKLNRATEGILFFNLELSQMAAPAFEPGRQSDLLVKLNRLMERCLRNSKCIDTESLCVVAGEKVWQIRVDLHLLNHDGNIIDAASIAAIVALCHFRRPDVSVQGDEVTLYTPEERDPVPLSIHHMPICVSFAFFQQGTYLLVDPNEREERVMDGLLVIAMNKHREICTIQSSGGIMLLKDQVLRCSKIAGVKVAEITELILKALENDQKVRKEGGKFGFAESIANQRITAFKMEKAPIDTSDVEEKAEEIIAEAEPPSEVVSTPVLWTPGTAQIGEGVENSWGDLEDSEKEDDEGGGDQAIILDGIKMDTGVEVSDIGSQDAPIILSDSEEEEMIILEPDKNPKKIRTQTTSAKQEKAPSKKPVKRRKKKRAAN

SEQ ID NO: 769 - protein, 956 aa, Homo sapiens
VDECRRVPPPCAPGRCENSPGSFRCVCGPGFRAGPRAAECLDVDECHRVPPPCDLGRCENTPGSFLCVCPAGYQAAPHGASCQDVDECARSPPPCTYGRCENTEGSFQCVCPMGFQPNTAGSECEDVDECENHLACPGQECVNSPGSFQCRTCPSGHHLHRGRCTDVDECSSGAPPCGPHGHCTNTEGSFRCSCAPGYRAPSGRPGPCADVNECLEGDFCFPHGECLNTDGSFACTCAPGYRPGPRGASCLDVDECSEEDLCQSGICTNTDGSFECICPPGHRAGPDLASCLDVDECRERGPALCGSQRCENSPGSYRCVRDCDPGYHAGPEGTCDDVDECQEYGPEICGAQRCENTPGSYRCTPACDPGYQPTPGGGCQDVDECRNRSFCGAHAVCQNLPGSFQCLCDQGYEGARDGRHCVDVNECETLQGVCGAALCENVEGSFLCVCPNSPEEFDPMTGRCVPPRTSAGTFPGSQPQAPASPVLPARPPPPPLPRRPSTPRQGPVGSGRRECYFDTAAPDACDNILARNVTWQECCCTVGEGWGSGCRIQQCPGTETAEYQSLCPHGRGYLAPSGDLSLRRDVDECQLFRDQVCKSGVCVNTAPGYSCYCSNGYYYHTQRLECIDNDECADEEPACEGGRCVNTVGSYHCTCEPPLVLDGSQRRCVSNESQSLDDNLGVCWQEVGADLVCSHPRLDRQATYTECCCLYGEAWGMDCALCPAQDSDDFEALCNVLRPPAYSPPRPGGFGLPYEYGPDLGPPYQGLPYGPELYPPPALPYDPYPPPPGPFARREAPYGAPRFDMPDFEDDGGPYGESEAPAPPGPGTRWPYRSRDTRRSFPEPEEPPEGGSYAGSLAEPYEELEAEECGILDGCTNGRCVRVPEGFTCRCFDGYRLDMTRMACVDINECDEAEAASPLCVNARCLNTDGSFRCICRPGFAPTHQPHHCAPARPRA

SEQ ID NO: 770 - protein, 175 aa, Homo sapiens
MAEVHVIGQIIGASGFSESSLFCKWGIHTGAAWKLLSGVREGQTQVDTPQIGDMAYWSHPIDLHFATKGLQGWPRLHFQVWSQDSFGRCQLAGYGFCHVPSSPGTHQLACPTWRPLGSWREQLARAFVGGGPQLLHGDTIYSGADRYRLHTAAGGTVHLEIGLLLRNFDRYGVEC

SEQ ID NO: 771 - protein, 555 aa, Homo sapiens
MAFTQLTFRDVAIEFSQDEWKCLNSTQRTLYRDVMLENYRNLVSLDLSRNCVIKELAPQQEGNPGEVFHTVTLEQHEKHDIEEFCFREIKKKIHDFDCQWRDDERNCNKVTTAPKENLTCRRDQRDRRGIGNKSIKHQLGLSFLPHPHELQQFQAEGKIYECNHVEKSVNHGSSVSPPQIISSTIKTHVSNKYGTDFICSSLLTQEQKSCIREKPYRYIECDKALNHGSHMTVRQVSHSGEKGYKCDLCGKVFSQKSNLARHWRVHTGEKPYKCNECDRSFSRNSCLALHRRVHTGEKPYKCYECDKVFSRNSCLALHQKTHIGEKPYTCKECGKAFSVRSTLTNHQVIHSGKKPYKCNECGKVFSQTSSLATHQRIHTGEKPYKCNECGKVFSQTSSLARHWRIHTGEKPYKCNECGKVFSYNSHLASHRRVHTGEKPYKCNECGKAFSVHSNLTTHQVIHTGEKPYKCNQCGKGFSVHSSLTTHQVIHTGEKPYKCNECGKSFSVRPNLTRHQIIHTGKKPYKCSDCGKSFSVRPNLFRHQIIHTKEKPYKRN

SEQ ID NO: 772 - protein, 532 aa, Homo sapiens
MIQAQESITLEDVAVDFTWEEWQLLGAAQKDLYRDVMLENYSNLVAVGYQASKPDALFKLEQGEQLWTIEDGIHSGACSDIWKVDHVLERLQSESLVNRRKPCHEHDAFENIVHCSKSQFLLGQNHDIFDLRGKSLKSNLTLVNQSKGYEIKNSVEFTGNGDSFLHANHERLHTAIKFPASQKLISTKSQFISPKHQKTRKLEKHHVCSECGKAFIKKSWLTDHQVMHTGEKPHRCSLCEKAFSRKFMLTEHQRTHTGEKPYECPECGKAFLKKSRLNIHQKTHTGEKPYICSECGKGFIQKGNLIVHQRIHTGEKPYICNECGKGFIQKTCLIAHQRFHTGKTPFVCSECGKSCSQKSGLIKHQRIHTGEKPFECSECGKAFSTKQKLIVHQRTHTGERPYGCNECGKAFAYMSCLVKHKRIHTREKQEAAKVENPPAERHSSLHTSDVMQEKNSANGATTQVPSVAPQTSLNISGLLANRNVVLVGQPVVRCAASGDNRGFAQDRNLVNAVNVVVPSVINYVLFYVTENP

SEQ ID NO: 773 - protein, 603 aa, Homo sapiens
MSCGNEFVETLKKIGYPKADNLNGEDFDWLFEGVEDESFLKWFCGNVNEQNVLSERELEAFSILQKSGKPILEGAALDEALKTCKTSDLKTPRLDDKELEKLEDEVQTLLKLKNLKIQRRNKCQLMASVTSHKSLRLNAKEEEATKKLKQSQGILNAMITKISNELQALTDEVTQLMMFFRHSNLGQGTNPLVFLSQFSLEKYLSQEEQSTAALTLYTKKQFFQGIHEVVESSNEDNFQLLDIQTPSICDNQEILEERRLEMARLQLAYICAQHQLIHLKASNSSMKSSIKWAEESLHSLTSKAVDKENLDAKISSLTSEIMKLEKEVTQIKDRSLPAVVRENAQLLNMPVVKGDFDLQIAKQDYYTARQELVLNQLIKQKASFELLQLSYEIELRKHRDIYRQLENLVQELSQSNMMLYKQLEMLTDPSVSQQINPRNTIDTKDYSTHRLYQVLEGENKKKELFLTHGNLEEVAEKLKQNISLVQDQLAVSAQEHSFFLSKRNKDVDMLCDTLYQGGNQLLLSDQELTEQFHKVESQLNKLNHLLTDILADVKTKRKTLANNKLHQMEREFYVYFLKDEDYLKDIVENLETQSKIKAVSLED

SEQ ID NO: 774 - protein, 555 aa, Homo sapiens
MAGGGSDLSTRLFTEDQDVDEGLVYDTVFKHFKRHKLEISNAIKKTFPFLEGLRDRELITNKMFEDSEDSCRNLVPVQRVVYNVLSELEKTFNLSVLEALFSEVNMQEYPDLIHIYKSFKNAIQDKLSFQESDRKEREERPDIKLSLKQGEVPESPEARKESDQACGKMDTVDIANNSTLGKPKRKRRKKKGHGWSRMGTRTQKNNQQNDNSKADGQLVSSEKKANMNLKDLSKIRGRKRGKPGTHFTQSDRAPQKRVRSRASRKHKDETVDFQAPLLPVTCGGVKGILHKEKLEQGTLAKCIQTEDGKWFTPMEFEIKGGYARSKNWRLSVRCGGWPLRRLMEEGSLPNPPRIYYRNKKRILKSQNNSSVDPCMRNLDECEVCRDGGELFCCDTCSRVFHEDCHIPPVESEKTPWNCIFCRMKESPGSQQCCQESEVLERQMCPEEQLKCEFLLLKVYCCSESSFFAKIPYYYYIREACQGLKEPMWLDKIKKRLNEHGYPQVEGFVQDMRLIFQNHRASYKYKDFGQMGLRLEAEFEKDFKEVFAIQETNGNS

SEQ ID NO: 775 - protein, 346 aa, Homo sapiens
MCEGPSRISGPIPPDPTLCPDNYRRPTSAQGRLEGNALKLDLLTSDRALDTTAPRGPCIGPGAGEILERGQRGVGDVLLQLEGISLGPGASLKRKDPKDHEKENLRRIREIQKRFREQERSREQGQPRPLKALWRSPKYDKVESRVKAQLQEPGPASGTESAHFLRAHSRCGPGLPPPHVSSPQPTPPGPEAKEPGLGVDFIRHNARAAKRAPRRHSCSLQVLAQVLEQQRQAQEHYNATQKGHVPHYLLERRDLWRREAEARKQSQPDPAMPPGHTRMPENQRLETLTKLLQSQSQLLRELVLLPAGADSLRAQSHRAELDRKLVQVEEAIKIFSRPKVFVKMDD

SEQ ID NO: 776 - protein, 365 aa, Homo sapiens
MGRWALDVAFLWKAVLTLGLVLLYYCFSIGITFYNKWLTKSFHFPLFMTMLHLAVIFLFSALSRALVQCSSHRARVVLSWADYLRRVAPTALATALDVGLSNWSFLYVTVSLYTMTKSSAVLFILIFSLIFKLEELRAALVLVVLLIAGGLFMFTYKSTQFNVEGFALVLGASFIGGIRWTLTQMLLQKAELGLQNPIDTMFHLQPLMFLGLFPLFAVFEGLHLSTSEKIFRFQDTGLLLRVLGSLFLGGILAFGLGFSEFLLVSRTSSLTLSIAGIFKEVCTLLLAAHLLGDQISLLNWLGFALCLSGISLHVALKALHSRGDGGPKALKGLGSSPDLELLLRSSQREEGDNEEEEYFVAQGQQ

SEQ ID NO: 777 - protein, 607 aa, Homo sapiens
MAANVFPFRDARAAPDPVLEAGPVAHGPLPVPLVLDNGSFQVRAGWACPGQDPGPEPRLQFRAVCARGRGGARGASGPQVGNALGSLEPLRWMLRSPFDRNVPVNLELQELLLDYSFQHLGVSSQGCVDHPIVLTEAVCNPLYSRQMMSELLFECYGIPKVAYGIDSLFSFYHNKPKNSMCSGLIISSGYQCTHVLPILEGRLDAKNCKRINLGGSQAAGYLQRLLQLKYPGHLAAITLSRMEEILHEHSYIAEDYVEELHKWRCPDYYENNVHKMQLPFSSKLLGSTLTSEEKQERRQQQLRRLQELNARRREEKLQLDQERLDRLLYVQELLEDGQMDQFHKALIELNMDSPEELQSYIQKLSIAVEQAKQKILQAEVNLEVDVVDSKPETPDLEQLEPSLEDVESMNDFDPLFSEETPGVEKPVTTVQPVFNLAAYHQLFVGTERIRAPEIIFQPSLIGEEQAGIAETLQYILDRYPKDIQEMLVQNVFLTGGNTMYPGMKARMEKELLEMRPFRSSFQVQLASNPVLDAWYGARDWALNHLDDNEVWITRKEYEEKGGEYLKEHCASNIYVPIRLPKQASRSSDAQASSKGSAAGGGGAGEQA

SEQ ID NO: 778 - protein, 663 aa, Homo sapiens
MAATEISVLSEQFTKIKELELMPEKGLKEEEKDGVCREKDHRSPSELEAERTSGAFQDSVLEEEVELVLAPSEESEKYILTLQTVHFTSEAVELQDMSLLSIQQQEGVQVVVQQPGPGLLWLEEGPRQSLQQCVAISIQQELYSPQEMEVLQFHALEENVMVASEDSKLAVSLAETTGLIKLEEEQEKNQLLAERTKEQLFFVETMSGDERSDEIVLTVSNSNVEEQEDQPTAGQADAEKAKSTKNQRKTKGAKGTFHCDVCMFTSSRMSSFNRHMKTHTSEKPHLCHLCLKTFRTVTLLRNHVNTHTGTRPYKCNDCNMAFVTSGELVRHRRYKHTHEKPFKCSMCKYASVEASKLKRHVRSHTGERPFQCCQCSYASRDTYKLKRHMRTHSGEKPYECHICHTRFTQSGTMKIHILQKHGENVPKYQCPHCATIIARKSDLRVHMRNLHAYSAAELKCRYCSAVFHERYALIQHQKTHKNEKRFKCKHCSYACKQERHMTAHIRTHTGEKPFTCLSCNKCFRQKQLLNAHFRKYHDANFIPTVYKCSKCGKGFSRWINLHRHSEKCGSGEAKSAASGKGRRTRKRKQTILKEATKGQKEAAKGWKEAANGDEAAAEEASTTKGEQFPGEMFPVACRETTARVKEEVDEGVTCEMLLNTMDK

SEQ ID NO: 779 - protein, 1116 aa, Homo sapiens
MLNNLTDCEDGDGGANPGDGNPKESSPFINSTDTEKGKEYDGKNMALFEEEMDTSPMVSSLLSGLANYTNLPQGSREHEEAENNEGGKKKPVQAPRMGTFMGVYLPCLQNIFGVILFLRLTWVVGIAGIMESFCMVFICCSCTMLTAISMSAIATNGVVPAGGSYYMISRSLGPEFGGAVGLCFYLGTTFAGAMYILGTIEILLAYLFPAMAIFKAEDASGEAAAMLNNMRVYGTCVLTCMATVVFVGVKYVNKFALVFLGCVILSILAIYAGVIKSAFDPPNFPICLLGNRTLSRHGFDVCAKLAWEGNETVTTRLWGLFCSSRFLNATCDEYFTRNNVTEIQGIPGAASGLIKENLWSSYLTKGVIVERSGMTSVGLADGTPIDMDHPYVFSDMTSYFTLLVGIYFPSVTGIMAGSNRSGDLRDAQKSIPTGTILAIATTSAVYISSVVLFGACIEGVVLRDKFGEAVNGNLVVGTLAWPSPWVIVIGSFFSTCGAGLQSLTGAPRLLQAISRDGIVPFLQVFGHGKANGEPTWALLLTACICEIGILIASLDEVAPILSMFFLMCYMFVNLACAVQTLLRTPNWRPRFRYYHWTLSFLGMSLCLALMFICSWYYALVAMLIAGLIYKYIEYRGAEKEWGDGIRGLSLSAARYALLRLEEGPPHTKNWRPQLLVLVRVDQDQNVVHPQLLSLTSQLKAGKGLTIVGSVLEGTFLENHPQAQRAEESIRRLMEAEKVKGFCQVVISSNLRDGVSHLIQSGGLGGLQHNTVLVGWPRNWRQKEDHQTWRNFIELVRETTAGHLALLVTKNVSMFPGNPERFSEGSIDVWWIVHDGGMLMLLPFLLRHHKVWRKCKMRIFTVAQMDDNSIQMKKDLTTFLYHLRITAEVEVVEMHESDISAYTYEKTLVMEQRSQILKQMHLTKNEREREIQSITDESRGSIRRKNPANTRLRLNVPEETAGDSEEKPEEEVQLIHDQSAPSCPSSSPSPGEEPEGEGETDPEKVHLTWTKDKSVAEKNKGPSPVSSEGIKDFFSMKPEWENLNQSNVRRMHTAVRLNEVIVKKSRDAKLVLLNMPGPPRNRNGDENYMEFLEVLTEHLDRVMLVRGGGREVITIYS

SEQ ID NO: 780 - protein, 591 aa, Homo sapiens
GEAESQWLQDTGLSGLLGGLGLDGDHQELLSTLTQTQVAAVCRRLDIYARSVRRQHKTPVRDVRDVFGVFNSGKMSSENGDSGMKGAQLSSGASKFPPAAEPGGLQEQAGREEAFNMDSAYSEQAAVLLQRSRPSRGGTSAWGKCSLPKFTVPKGRLGVTRIGDLSLQDMRKVPSLALIELTALCDILGLDLKRSKAGKWKAAETRLFGVPLDSLLEADHKVLPSTQVPLVLQALLSCLEKRGLDMEGILRVPGSQARVKGLEQKLERDFYAGLFSWDEVHHNDASDLLKRFIRKLPTPLLTAEYLPAFAVVPNIPNLKQRLQVLHLLILILPEPNRNALKALLEFLRKVVAREQHNKMTLRNVSTVMAPNLFLHQGRPPKLPKGKEKQLAEGAAEVVQIMVHYQDLLWTVASFLVAQVRKLNDSSSRRPQLCDAGLKTWLRRMHADRDKAGDGLEATPKVAKIQVVWPIKDPLKVPLTPSTKVAHVLRQFTEHLSPGSKGQEDSEDMDSLLLHHRSMESANILLYEVGGNINEHRLDPDAYLLDLYRANPHGKIVSKVALQCVVAAAPETKPGELCDLGQAPCPLRILSG

SEQ ID NO: 781 - protein, 499 aa, Homo sapiens
MRGLLCWPVLLLLLQPWETQLQLTGPRCHTGPLDLVFVIDSSRSVRPFEFETMRQFLMGLLRGLNVGPNATRVGVIQYSSQVQSVFPLRAFSRREDMERAIRDLVPLAQGTMTGLAIQYAMNVAFSVAEGARPPEERVPRVAVIVTDGRPQDRVAEVAAQARARGIEIYAVGVQRADVGSLRAMASPPLDEHVFLVESFDLIQEFGLQFQSRLCVRDLCNGVDHGCEFQCVSEGLSYRCLCPEGRQLQADGKSCNRCREGHVDLVLLVDGSKSVRPQNFELVKRFVNQIVDFLDVSPEGTRVGLVQFSSRVRTEFPLGRYGTAAEVKQAVLAVEYMERGTMTGLALRHMVEHSFSEAQGARPRALNVPRVGLVFTDGRSQDDISVWAARAKEEGIVMYAVGVGKAVEAELREIASEPAELHVSYAPDFGTMTHLLENLRGSICPEEGISAGTELRSPCECESLVEFQGRTLGALESLTLNLAQLTARLEDLENQLANQK

SEQ ID NO: 782 - protein, 1291 aa, Homo sapiens
MAGAASPCANGCGPGAPSDAEVLHLCRSLEVGTVMTLFYSKKSQRPERKTFQVKLETRQITWSRGADKIEGAIDIREIKEIRPGKTSRDFDRYQEDPAFRPDQSHCFVILYGMEFRLKTLSLQATSEDEVNMWIKGLTWLMEDTLQAPTPLQIERWLRKQFYSVDRNREDRISAKDLKNMLSQVNYRVPNMRFLRERLTDLEQRSGDITYGQFAQLYRSLMYSAQKTMDLPFLEASTLRAGERPELCRVSLPEFQQFLLDYQGELWAVDRLQVQEFMLSFLRDPLREIEEPYFFLDEFVTFLFSKENSVWNSQLDAVCPDTMNNPLSHYWISSSHNTYLTGDQFSSESSLEAYARCLRMGCRCIELDCWDGPDGMPVIYHGHTLTTKIKFSDVLHTIKEHAFVASEYPVILSIEDHCSIAQQRNMAQYFKKVLGDTLLTKPVEISADGLPSPNQLKRKILIKHKKLAEGSAYEEVPTSMMYSENDISNSIKNGILYLEDPVNHEWYPHYFVLTSSKIYYSEETSSDQGNEDEEEPKEVSSSTELHSNEKWFHGKLGAGRDGRHIAERLLTEYCIETGAPDGSFLVRESETFVGDYTLSFWRNGKVQHCRIHSRQDAGTPKFFLTDNLVFDSLYDLITHYQQVPLRCNEFEMRLSEPVPQTNAHESKEWYHASLTRAQAEHMLMRVPRDGAFLVRKRNEPNSYAISFRAEGKIKHCRVQQEGQTVMLGNSEFDSLVDLISYYEKHPLYRKMKLRYPINEEALEKIGTAEPDYGALYEGRNPGFYVEANPMPTFKCAVKALFDYKAQREDELTFIKSAIIQNVEKQEGGWWRGDYGGKKQLWFPSNYVEEMVNPVALEPEREHLDENSPLGDLLRGVLDVPACQIAIRPEGKNNRLFVFSISMASVAHWSLDVAADSQEELQDWVKKIREVAQTADARLTEGKIMERRKKIALELSELVVYCRPVPFDEEKIGTERACYRDMSSFPETKAEKYVNKAKGKKFLQYNRLQLSRIYPKGQRLDSSNYDPLPMWICGSQLVALNFQTPDKPMQMNQALFMTGRHCGYVLQPSTMRDEAFDPFDKSSLRGLEPCAISIEVLGARHLPKNGRGIVCPFVEIEVAGAEYDSTKQKTEFVVDNGLNPVWPAKPFHFQISNPEFAFLRFVVYEEDMFSDQNFLAQATFPVKGLKTGYRAVPLKNNYSEDLELASLLIKIDIFPAKQENGDLSPFSGTSLRERGSDASGQLFHGRAREGSFESRYQQPFEDFRISQEHLADHFDSRERRAPRRTRVNGDNRL

SEQ ID NO: 783 - protein, 344 aa, Homo sapiens
MPRVYIGRLSYNVREKDIQRFFSGYGRLLEVDLKNGYGFVEFEDSRDADDAVYELNGKELCGERVIVEHARGPRRDRDGYSYGSRSGGGGYSSRRTSGRDKYGPPVRTEYRLIVENLSSRCSWQDLKDFMRQAGEVTYADAHKERTNEGVIEFRSYSDMKRALDKLDGTEINGRNIRLIEDKPRTSHRRSYSGSRSRSRSRRRSRSRSRRSSRSRSRSISKSRSRSRSRSKGRSRSRSKGRKSRSKSKSKPKSDRGSHSHSRSRSKDEYEKSRSRSRSRSPKENGKGDIKSKSRSRSQSRSNSPLPVPPSKARSVSPPPKRATSRSRSRSRSKSRSRSRSSSRD

SEQ ID NO: 784 - protein, 500 aa, Homo sapiens
MAWAALLGLLAALLLLLLLSRRRTRRPGEPPLDLGSIPWLGYALDFGKDAASFLTRMKEKHGDIFTILVGGRYVTVLLDPHSYDAVVWEPRTRLDFHAYAIFLMERIFDVQLPHYSPSDEKARMKLTLLHRELQALTEAMYTNLHAVLLGDATEAGSGWHEMGLLDFSYSFLLRAGYLTLYGIEALPRTHESQAQDRVHSADVFHTFRQLDRLLPKLARGSLSVGDKDHMCSVKSRLWKLLSPARLARRAHRSKWLESYLLHLEEMGVSEEMQARALVLQLWATQGNMGPAAFWLLLFLLKNPEALAAVRGELESILWQAEQPVSQTTTLPQKVLDSTPVLDSVLSESLRLTAAPFITREVVVDLAMPMADGREFNLRRGDRLLLFPFLSPQRDPEIYTDPEVFKYNRFLNPDGSEKKDFYKDGKRLKNYNMPWGAGHNHCLGRSYAVNSIKQFVFLVLVHLDLELINADVEIPEFDLSRYGFGLMQPEHDVPVRYRIRP

SEQ ID NO: 785 - protein, 460 aa, Homo sapiens
MASREEVLALQAEVAQREEELNSLKQKLASALLAEQEPQPERLVPVSPLPPKAALSRDEILRYSRQLVLPELGVHGQLRLGTACVLIVGCGGLGCPLAQYLAAAGVGRLGLVDYDVVEMSNLARQVLHGEALAGQAKAFSAAASLRRLNSAVECVPYTQALTPATALDLVRRYDVVADCSDNVPTRYLVNDACVLAGRPLVSASALRFEGQITVYHYDGGPCYRCIFPQPPPAETVTNCADGGVLGVVTGVLGCLQALEVLKIAAGLGPSYSGSLLLFDALRGHFRSIRLRSRRLDCAACGERPTVTDLLDYEAFCGSSATDKCRSLQLLSPEERVSVTDYKRLLDSGAFHLLLDVRPQVEVDICRLPHALHIPLKHLERRDAESLKLLKEAIWEEKQGTQEGAAVPIYVICKLGNDSQKAVKILQSLSAAQELDPLTVRDVVGGLMAWAAKIDGTFPQY

SEQ ID NO: 786 - protein, 369 aa, Homo sapiens
MPRAPKRQRCMPEEDLQSQSETQGLEGAQAPLAVEEDASSSTSTSSSFPSSFPSSSSSSSSSCYPLIPSTPEEVSADDETPNPPQSAQIACSSPSVVASLPLDQSDEGSSSQKEESPSTLQVLPDSESLPRSEIDEKVTDLVQFLLFKYQMKEPITKAEILESVIRNYEDHFPLLFSEASECMLLVFGIDVKEVDPTGHSFVLVTSLGLTYDGMLSDVQSMPKTGILILILSIVFIEGYCTPEEVIWEALNMMGLYDGMEHLIYGEPRKLLTQDWVQENYLEYRQVPGSDPARYEFLWGPRAHAEIRKMSLLKFLAKVNGSDPRSFPLWYEEALKDEEERAQDRIATTDDTTAMASASSSATGSFSYPE

SEQ ID NO: 787 - protein, 493 aa, Homo sapiens
MAAATGPSFWLGNETLKVPLALFALNRQRLCERLRKNPAVQAGSIVVLQGGEETQRYCTDTGVLFRQESFFHWAFGVTEPGCYGVIDVDTGKSTLFVPRLPASHATWMGKIHSKEHFKEKYAVDDVQYVDEIASVLTSQKPSVLLTLRGVNTDSGSVCREASFDGISKFEVNNTILHPEIVECRVFKTDMELEVLRYTNKISSEAHREVMKAVKVGMKEYELESLFEHYCYSRGGMRHSSYTCICGSGENSAVLHYGHAGAPNDRTIQNGDMCLFDMGGEYYCFASDITCSFPANGKFTADQKAVYEAVLRSSRAVMGAMKPGVWWPDMHRLADRIHLEELAHMGILSGSVDAMVQAHLGAVFMPHGLGHFLGIDVHDVGGYPEGVERIDEPGLRSLRTARHLQPGMVLTVEPGIYFIDHLLDEALADPARASFLNREVLQRFRGFGGVRIEEDVVVTDSGIELLTCVPRTVEEIEACMAGCDKAFTPFSGPK

SEQ ID NO: 788 - protein, 344 aa, Homo sapiens
MAAIYGGVEGGGTRSEVLLVSEDGKILAEADGLSTNHWLIGTDKCVERINEMVNRAKRKAGVDPLVPLRSLGLSLSGGDQEDAGRILIEELRDRFPYLSESYLITTDAAGSIATATPDGGVVLISGTGSNCRLINPDGSESGCGGWGHMMGDEGSAYWIAHQAVKIVFDSIDNLEAAPHDIGYVKQAMFHYFQVPDRLGILTHLYRDFDKCRFAGFCRKIAEGAQQGDPLSRYIFRKAGEMLGRHIVAVLPEIDPVLFQGKIGLPILCVGSVWKSWELLKEGFLLALTQGREIQAQNFFSSFTLMKLRHSSALGGASLGARHIGHLLPMDYSANAIAFYSYTFS

SEQ ID NO: 789 - protein, 681 aa, Homo sapiens
MAPQVWRRRTLERCLTEVGKATGRPECFLTIQEGLASKFTSLTKVLYDFNKILENGRIHGSPLQKLVIENFDDEQIWQQLELQNEPILQYFQNAVSETINDEDISLLPESEEQEREEDGSEIEADDKEDLEDLEEEEVSDMGNDDPEMGERAENSSKSDLRKSPVFSDEDSDLDFDISKLEQQSKVQNKGQGKPREKSIVDDKFFKLSEMEAYLENIEKEEERKDDNDEEEEDIDFFEDIDSDEDEGGLFGSKKLKSGKSSRNLKYKDFFDPVESDEDITNVHDDELDSNKEDDEIAEEEAEELSISETDEDDDLQENEDNKQHKESLKRVTFALPDDAETEDTGVLNVKKNSDEVKSSFEKRQEKMNEKIASLEKELLEKKPWQLQGEVTAQKRPENSLLEETLHFDHAVRMAPVITEETTLQLEDIIKQRIRDQAWDDVVRKEKPKEDAYEYKKRLTLDHEKSKLSLAEIYEQEYIKLNQQKTAEEENPEHVEIQKMMDSLFLKLDALSNFHFIPKPPVPEIKVVSNLPAITMEEVAPVSVSDAALLAPEEIKEKNKAGDIKTAAEKTATDKKRERRKKKYQKRMKIKEKEKRRKLLEKSSVDQAGKYSKTVASEKLKQLTKTGKASFIKDEGKDKALKSSQAFFSKLQDQVKMQINDAKKTEKKKKKRQDISVHKLKL

SEQ ID NO: 790 - protein, 1076 aa, Homo sapiens
MEPGSKSVSRSDWQPEPHQRPITPLEPGPEKTPIAQPESKTLQGSNTQQKPASNQRPLTQQETPAQHDAESQKEPRAQQKSASQEEFLAPQKPAPQQSPYIQRVLLTQQEAASQQGPGLGKESITQQEPALRQRHVAQPGPGPGEPPPAQQEAESTPAAQAKPGAKREPSAPTESTSQETPEQSDKQTTPVQGAKSKQGSLTELGFLTKLQELSIQRSALEWKALSEWVTDSESESDVGSSSDTDSPATMGGMVAQGVKLGFKGKSGYKVMSGYSGTSPHEKTSARNHRHYQDTASRLIHNMDLRTMTQSLVTLAEDNIAFFSSQGPGETAQRLSGVFAGVREQALGLEPALGRLLGVAHLFDLDPETPANGYRSLVHTARCCLAHLLHKSRYVASNRRSIFFRTSHNLAELEAYLAALTQLRALVYYAQRLLVTNRPGVLFFEGDEGLTADFLREYVTLHKGCFYGRCLGFQFTPAIRPFLQTISIGLVSFGEHYKRNETGLSVAASSLFTSGRFAIDPELRGAEFERITQNLDVHFWKAFWNITEMEVLSSLANMASATVRVSRLLSLPPEAFEMPLTADPTLTVTISPPLAHTGPGPVLVRLISYDLREGQDSEELSSLIKSNGQRSLELWPRPQQAPRSRSLIVHFHGGGFVAQTSRSHEPYLKSWAQELGAPIISIDYSLAPEAPFPRALEECFFAYCWAIKHCALLGSTGERICLAGDSAGGNLCFTVALRAAAYGVRVPDGIMAAYPATMLQPAASPSRLLSLMDPLLPLSVLSKCVSAYAGAKTEDHSNSDQKALGMMGLVRRDTALLLRDFRLGASSWLNSFLELSGRKSQKMSEPIAEPMRRSVSEAALAQPQGPLGTDSLKNLTLRDLSLRGNSETSSDTPEMSLSAETLSPSTPSDVNFLLPPEDAGEEAEAKNELSPMDRGLGVRAAFPEGFHPRRSSQGATQMPLYSSPIVKNPFMSPLLAPDSMLKSLPPVHIVACALDPMLDDSVMLARRLRNLGQPVTLRVVEDLPHGFLTLAALCRETRQAAELCVERIRLVLTPPAGAGPSGETGAAGVDGGCGGRH

SEQ ID NO: 791 - protein, 402 aa, Homo sapiens
MGPLPAPSCTQRITWKGLLLTASLLNFWNPPTTAEVTIEAQPPKVSEGKDVLLLVHNLPQNLPGYFWYKGEMTDLYHYIISYIVDGKIIIYGPAYSGRETVYSNASLLIQNVTRKDAGTYTLHIIKRGDETREEIRHFTFTLYLETPKPYISSSNLNPREAMEAVRLICDPETLDASYLWWMNGQSLPVTHRLQLSKTNRTLYLFGVTKYIAGPYECEIRNPVSASRSDPVTLNLLHGPDLPRIYPSFTYYRSGENLDLSCFTESNPPAEYFWTINGKFQQSGQKLFIPQITRNHSGLYACSVHNSATGKEISKSMTVKVSGKWIPASLAVGFYVESIWLSEKSQENIFIPSLCPMGTSKSQILLLNPPNLSLQTLFSLFFCFLMADLVSGLKKVGRGLYQP

SEQ ID NO: 792 - protein, 326 aa, Homo sapiens
MGPLSAPPCTQRITWKGVLLTASLLNFWNPPTTAQVTIEAQPPKVSEGKDVLLLVHNLPQNLAGYIWYKGQMTYLYHYITSYVVDGQRIIYGPAYSGRERVYSNASLLIQNVTQEDAGSYTLHIIKRRDGTGGVTGHFTFTLHLETPKPSISSSNLNPREAMEAVILTCDPATPAASYQWWMNGQSLPMTHRLQLSKTNRTLFIFGVTKYIAGPYECEIRNPVSASRSDPVTLNLLHGPDLPSIYPSFTYYRSGENLYLSCFAESNPRAQYSWTINGKFQLSGQKLSIPQITTKHSGLYACSVRNSATGKESSKSITVKVSDWILP

SEQ ID NO: 793 - protein, 426 aa, Homo sapiens
MGTLSAPPCTQRIKWKGLLLTASLLNFWNLPTTAQVTIEAEPTKVSEGKDVLLLVHNLPQNLTGYIWYKGQMRDLYHYITSYVVDGEIIIYGPAYSGRETAYSNASLLIQNVTREDAGSYTLHIIKGDDGTRGVTGRFTFTLHLETPKPSISSSNLNPRETMEAVSLTCDPETPDASYLWWMNGQSLPMTHSLKLSETNRTLFLLGVTKYTAGPYECEIRNPVSASRSDPVTLNLLPKLPKPYITINNLNPRENKDVLNFTCEPKSENYTYIWWLNGQSLPVSPRVKRPIENRILILPSVTRNETGPYQCEIRDRYGGIRSDPVTLNVLYGPDLPRIYPSFTYYRSGEVLYLSCSADSNPPAQYSWTINEKFQLPGQKLFIRHITTKHSGLYVCSVRNSATGKESSKSMTVEVSGKWIPASLAIGF

SEQ ID NO: 794 - protein, 463 aa, Homo sapiens
MATSKLPVVPGEEENTILMAKERLEALRTAFESGDLPQAASHLQELLASTESIRLEVGVTGESGAGKSSLINALRGLEAEDPGAALTGVMETTMQPSPYPHPQFPDVTLWDLPGAGSPGCPADKYLKQVDFSRYDFFLLVSPRRCGAVETRLAAEILCQGKKFYFVRTKVDEDLAATRTQRPSGFREAAVLQEIRDHCAERLREAGVADPRIFLVSNLSPARYDFPTLVSTWEHDLPSHRRHAGLLSLPDISLEALQKKKAMLQEQVLKTALVLGVIQALPVPGLAAAYDDALLIHSLRGYHRSFGLDDDSLAKLAEQVGKQAGDLRSVIRSPLANEVSPETVLRLYSQSSDGAMRVARAFERGIPVFGTLVAGGISFGAVYTMLQGCLNEMAEDAQRVRIKALEDDEPQPEVSLEVASDNGVEKGGSGEGGGEEAPLSTCRKLGLLLKYILDSWKKHDSEEK

SEQ ID NO: 795 - protein, 420 aa, Homo sapiens
MWWRDLTRLRLWLKREAIPGEGRKAAKVNAGVGEKGIYTASSRGGPPSARSKAVTVVAEGAASRSWLSMDAPELGPGLVERLEQLATCPLCGGSFEDPVLLACEHSFCRACLARRWGTPPATGTEASPTACPCCGLPCPRRSLRSNVRLAVEVRISRELREKLAEPGARAGRRRGGRIPTMGCLDLPGEDMRKTWRRFEVPTSKSSNSEDDLPEDYPVVKKMLHRLTADLTLDPGTAHRRLLISADRRSVQLAPPGTPAPPDGPKRFDQLPAVLGAQGFGAGRHCWEVETADAASCRDSSGEDADDEESHYAVGAAGESVQRKGCVRLCPAGAVWAVEGRGGRLWALTAPEPTLLGGVEPPPRRIRVDLDWERGRVAFYDGRSLDLLYAFQAPGPLGERIFPLFCTCDPRAPLRIVPAES

SEQ ID NO: 796 - protein, 5171 aa, Homo sapiens
MHSSSYSYRSSDSVFSNTTSTRTSLDSNENLLLVHCGPTLINSCISFGSESFDGHRLEMLQQIANRVQRDSVICEDKLILAGNALQSDSKRLESGVQFQNEAEIAGYILECENLLRQHVIDVQILIDGKYYQADQLVQRVAKLRDEIMALRNECSSVYSKGRILTTEQTKLMISGITQSLNSGFAQTLHPSLTSGLTQSLTPSLTSSSMTSGLSSGMTSRLTPSVTPAYTPGFPSGLVPNFSSGVEPNSLQTLKLMQIRKPLLKSSLLDQNLTEEEINMKFVQDLLNWVDEMQVQLDRTEWGSDLPSVESHLENHKNVHRAIEEFESSLKEAKISEIQMTAPLKLTYAEKLHRLESQYAKLLNTSRNQERHLDTLHNFVSRATNELIWLNEKEEEEVAYDWSERNTNIARKKDYHAELMRELDQKEENIKSVQEIAEQLLLENHPARLTIEAYRAAMQTQWSWILQLCQCVEQHIKENTAYFEFFNDAKEATDYLRNLKDAIQRKYSCDRSSSIHKLEDLVQESMEEKEELLQYKSTIANLMGKAKTIIQLKPRNSDCPLKTSIPIKAICDYRQIEITIYKDDECVLANNSHRAKWKVISPTGNEAMVPSVCFTVPPPNKEAVDLANRIEQQYQNVLTLWHESHINMKSVVSWHYLINEIDRIRASNVASIKTMLPGEHQQVLSNLQSRFEDFLEDSQESQVFSGSDITQLEKEVNVCKQYYQELLKSAEREEQEESVYNLYISEVRNIRLRLENCEDRLIRQIRTPLERDDLHESVFRITEQEKLKKELERLKDDLGTITNKCEEFFSQAAASSSVPTLRSELNVVLQNMNQVYSMSSTYIDKLKTVNLVLKNTQAAEALVKLYETKLCEEEAVIADKNNIENLISTLKQWRSEVDEKRQVFHALEDELQKAKAISDEMFKTYKERDLDFDWHKEKADQLVERWQNVHVQIDNRLRDLEGIGKSLKYYRDTYHPLDDWIQQVETTQRKIQENQPENSKTLATQLNQQKMLVSEIEMKQSKMDECQKYAEQYSATVKDYELQTMTYRAMVDSQQKSPVKRRRMQSSADLIIQEFMDLRTRYTALVTLMTQYIKFAGDSLKRLEEEEKSLEEEKKEHVEKAKELQKWVSNISKTLKDAEKAGKPPFSKQKISSEEISTKKEQLSEALQTIQLFLAKHGDKMTDEERNELEKQVKTLQESYNLLFSESLKQLQESQTSGDVKVEEKIVAERQQEYKEKLQGICDLLTQTENRLIGHQEAFMIGDGTVELKKYQSKQEELQKDMQGSAQALAEVVKNTENFLKENGEKLSQEDKALIEQKLNEAKIKCEQLNLKAEQSKKELDKVVTTAIKEETEKVAAVKQLEESKTKIENLLDWLSNVDKDSERAGTKHKQVIEQNGTHFQEGDGKSAIGEEDEVNGNLLETDVDGQVGTTQENLNQQYQKVKAQHEKIISQHQAVIIATQSAQVLLEKQGQYLSPEEKEKLQKNMKELKVHYETALAESEKKMKLTHSLQEELEKFDADYTEFEHWLQQSEQELENLEAGADDINGLMTKLKRQKSFSEDVISHKGDLRYITISGNRVLEAAKSCSKRDGGKVDTSATHREVQRKLDHATDRFRSLYSKCNVLGNNLKDLVDKYQHYEDASCGLLAGLQACEATASKHLSEPIAVDPKNLQRQLEETKALQGQISSQQVAVEKLKKTAEVLLDARGSLLPAKNDIQKTLDDIVGRYEDLSKSVNERNEKLQITLTRSLSVQDGLDEMLDWMGNVESSLKEQGQVPLNSTALQDIISKNIMLEQDIAGRQSSINAMNEKVKKFMETTDPSTASSLQAKMKDLSARFSEASHKHKETLAKMEELKTKVELFENLSEKLQTFLETKTQALTEVDVPGKDVTELSQYMQESTSEFLEHKKHLEVLHSLLKEISSHGLPSDKALVLEKTNNLSKKFKEMEDTIKEKKEAVTSCQEQLDAFQVLVKSLKSWIKETTKKVPIVQPSFGAEDLGKSLEDTKKLQEKWSLKTPEIQKVNNSGISLCNLISAVTTPAKAIAAVKSGGAVLNGEGTATNTEEFWANKGLTSIKKDMTDISHGYEDLGLLLKDKIAELNTKLSKLQKAQEESSAMMQWLQKMNKTATKWQQTPAPTDTEAVKTQVEQNKSFEAELKQNVNKVQELKDKLTELLEENPDTPEAPRWKQMLTEIDSKWQELNQLTIDRQQKLEESSNNLTQFQTVEAQLKQWLVEKELMVSVLGPLSIDPNMLNTQRQQVQILLQEFATRKPQYEQLTAAGQGILSRPGEDPSLRGIVKEQLAAVTQKWDSLTGQLSDRCDWIDQAIVKSTQYQSLLRSLSDKLSDLDNKLSSSLAVSTHPDAMNQQLETAQKMKQEIQQEKKQIKVAQALCEDLSALVKEEYLKAELSRQLEGILKSFKDVEQKAENHVQHLQSACASSHQFQQMSRDFQAWLDTKKEEQNKSHPISAKLDVLESLIKDHKDFSKTLTAQSHMYEKTIAEGENLLLKTQGSEKAALQLQLNTIKTNWDTFNKQVKERENKLKESLEKALKYKEQVETLWPWIDKCQNNLEEIKFCLDPAEGENSIAKLKSLQKEMDQHFGMVELLNNTANSLLSVCEIDKEVVTDENKSLIQKVDMVTEQLHSKKFCLENMTQKFKEFQEVSKESKRQLQCAKEQLDIHDSLGSQAYSNKYLTMLQTQQKSLQALKHQVDLAKRLAQDLVVEASDSKGTSDVLLQVETIAQEHSTLSQQVDEKCSFLETKLQGIGHFQNTIREMFSQFAEFDDELDSMAPVGRDAETLQKQKETIKAFLKKLEALMASNDNANKTCKMMLATEETSPDLVGIKRDLEALSKQCNKLLDRAQAREEQVEGTIKRLEEFYSKLKEFSILLQKAEEHEESQGPVGMETETINQQLNMFKVFQKEEIEPLQGKQQDVNWLGQGLIQSAAKSTSTQGLEHDLDDVNARWKTLNKKVAQRAAQLQEALLHCGRFQDALESLLSWMVDTEELVANQKPPSAEFKVVKAQIQEQKLLQRLLDDRKSTVEVIKREGEKIATTAEPADKVKILKQLSLLDSRWEALLNKAETRNRQLEGISVVAQQFHETLEPLNEWLTTIEKRLVNCEPIGTQASKLEEQIAQHKALEDDIINHNKHLHQAVSIGQSLKVLSSREDKDMVQSKLDFSQVWYIEIQEKSHSRSELLQQALCNAKIFGEDEVELMNWLNEVHDKLSKLSVQDYSTEGLWKQQSELRVLQEDILLRKQNVDQALLNGLELLKQTTGDEVLIIQDKLEAIKARYKDITKLSTDVAKTLEQALQLARRLHSTHEELCTWLDKVEVELLSYETQVLKGEEASQAQMRPKELKKEAKNNKALLDSLNEVSSALLELVPWRAREGLEKMVAEDNERYRLVSDTITQKVEEIDAAILRSQQFDQAADAELSWITETEKKLMSLGDIRLEQDQTSAQLQVQKTFTMEILRHKDIIDDLVKSGHKIMTACSEEEKQSMKKKLDKVLKNYDTICQINSERYLQLERAQSLVNQFWETYEELWPWLTETQSIISQLPAPALEYETLRQQQEEHRQLRELIAEHKPHIDKMNKTGPQLLELSPGEGFSIQEKYVAADTLYSQIKEDVKKRAVALDEAISQSTQFHDKIDQILESLERIVERLRQPPSISAEVEKIKEQISENKNVSVDMEKLQPLYETLKQRGEEMIARSGGTDKDISAKAVQDKLDQMVFIWENIHTLVEEREAKLLDVMELAEKFWCDHMSLIVTIKDTQDFIRDLEDPGIDPSVVKQQQEAAETIREEIDGLQEELDIVINLGSELIAACGEPDKPIVKKSIDELNSAWDSLNKAWKDRIDKLEEAMQAAVQYQDGLQAVFDWVDIAGGKLASMSPIGTDLETVKQQIEELKQFKSEAYQQQIEMERLNHQAELLLKKVTEESDKHTVQDPLMELKLIWDSLEERIINRQHKLEGALLALGQFQHALDELLAWLTHTEGLLSEQKPVGGDPKAIEIELAKHHVLQNDVLAHQSTVEAVNKAGNDLIESSAGEEASNLQNKLEVLNQRWQNVLEKTEQRKQQLDGALRQAKGFHGEIEDLQQWLTDTERHLLASKPLGGLPETAKEQLNVHMEVCAAFEAKEETYKSLMQKGQQMLARCPKSAETNIDQDINNLKEKWESVETKLNERKTKLEEALNLAMEFHNSLQDFINWLTQAEQTLNVASRPSLILDTVLFQIDEHKVFANEVNSHREQIIELDKTGTHLKYFSQKQDVVLIKNLLISVQSRWEKVVQRLVERGRSLDDARKRAKQFHEAWSKLMEWLEESEKSLDSELEIANDPDKIKTQLAQHKEFQKSLGAKHSVYDTTNRTGRSLKEKTSLADDNLKLDDMLSELRDKWDTICGKSVERQNKLEEALLFSGQFTDALQALIDWLYRVEPQLAEDQPVHGDIDLVMNLIDNHKAFQKELGKRTSSVQALKRSARELIEGSRDDSSWVKVQMQELSTRWETVCALSISKQTRLEAALRQAEEFHSVVHALLEWLAEAEQTLRFHGVLPDDEDALRTLIDQHKEFMKKLEEKRAELNKATTMGDTVLAICHPDSITTIKHWITIIRARFEEVLAWAKQHQQRLASALAGLIAKQELLEALLAWLQWAETTLTDKDKEVIPQEIEEVKALIAEHQTFMEEMTRKQPDVDKVTKTYKRRAADPSSLQSHIPVLDKGRAGRKRFPASSLYPSGSQTQIETKNPRVNLLVSKWQQVWLLALERRRKLNDALDRLEELREFANFDFDIWRKKYMRWMNHKKSRVMDFFRRIDKDQDGKITRQEFIDGILSSKFPTSRLEMSAVADIFDRDGDGYIDYYEFVAALHPNKDAYKPITDADKIEDEVTRQVAKCKCAKRFQVEQIGDNKYRFFLGNQFGDSQQLRLVRILRSTVMVRVGGGWMALDEFLVKNDPCRAKGRTNMELREKFILADGASQGMAAFRPRGRRSRPSSRGASPNRSTSVSSQAAQAASPQVPATTTPKILHPLTRNYGKPWLTNSKMSTPCKAAECSDFPVPSAEGTPIQGSKLRLPGYLSGKGFHSGEDSGLITTAAARVRTQFADSKKTPSRPGSRAGSKAGSRASSRRGSDASDFDISEIQSVCSDVETVPQTHRPTPRAGSRPSTAKPSKIPTPQRKSPASKLDKSSKR

SEQ ID NO: 797 - protein, 584 aa, Homo sapiens
MKMASSLAFLLLNFHVSLFLVQLLTPCSAQFSVLGPSGPILAMVGEDADLPCHLFPTMSAETMELRWVSSSLRQVVNVYADGKEVEDRQSAPYRGRTSILRDGITAGKAALRIHNVTASDSGKYLCYFQDGDFYEKALVELKVAALGSDLHIEVKGYEDGGIHLECRSTGWYPQPQIKWSDTKGENIPAVEAPVVADGVGLYAVAASVIMRGSSGGGVSCIIRNSLLGLEKTASISIADPFFRSAQPWIAALAGTLPISLLLLAGASYFLWRQQKEKIALSRETEREREMKEMGYAATEQEISLREKLQEELKWRKIQYMARGEKSLAYHEWKMALFKPADVILDPDTANAILLVSEDQRSVQRAEEPRDLPDNPERFEWRYCVLGCENFTSGRHYWEVEVGDRKEWHIGVCSKNVERKKGWVKMTPENGYWTMGLTDGNKYRALTEPRTNLKLPEPPRKVGIFLDYETGEISFYNATDGSHIYTFPHASFSEPLYPVFRILTLEPTALTICPIPKEVESSPDPDLVPDHSLETPLTPGLANESGEPQAEVTSLLLPAHPGAEVSPSATTNQNHKLQARTEALY

SEQ ID NO: 798 - protein, 467 aa, Homo sapiens
MQMDNRLPPKKVPGFCSFRYGLSFLVHCCNVIITAQRACLNLTMVVMVNSTDPHGLPNTSTKKLLDNIKNPMYNWSPDIQGIILSSTSYGVIIIQVPVGYFSGIYSTKKMIGFALCLSSVLSLLIPPAAGIGVAWVVVCRAVQGAAQGIVATAQFEIYVKWAPPLERGRLTSMSTSGFLLGPFIVLLVTGVICESLGWPMVFYIFGACGCAVCLLWFVLFYDDPKDHPCISISEKEYITSSLVQQVSSSRQSLPIKAILKSLPVWAISTGSFTFFWSHNIMTLYTPMFINSMLHVNIKENGFLSSLPYLFAWICGNLAGQLSDFFLTRNILSVIAVRKLFTAAGFLLPAIFGVCLPYLSSTFYSIVIFLILAGATGSFCLGGVFINGLDIAPRYFGFIKACSTLTGMIGGLIASTLTGLILKQDPESAWFKTFILMAAINVTGLIFYLIVATAEIQDWAKEKQHTRL

SEQ ID NO: 799 - protein, 1464 aa, Homo sapiens
MCLLVFPLVPRSPDYILPCSPGWRLRLAASFLLSVFPLLDLLPVALPPGAGPGPIGLEVLAGCVAAVAWISHSLALWVLAHSPHGHSRGPLALALVALLPAPALVLTVLWHCQRGTLLPPLLPGPMARLCLLILQLAALLAYALGWAAPGGPREPWAQEPLLPEDQEPEVAEDGESWLSRFSYAWLAPLLARGACGELRQPQDICRLPHRLQPTYLARVFQAHWQEGARLWRALYGAFGRCYLALGLLKLVGTMLGFSGPLLLSLLVGFLEEGQEPLSHGLLYALGLAGGAVLGAVLQNQYGYEVYKVTLQARGAVLNILYCKALQLGPSRPPTGEALNLLGTDSERLLNFAGSFHEAWGLPLQLAITLYLLYQQVGVAFVGGLILALLLVPVNKVIATRIMASNQEMLQHKDARVKLVTELLSGIRVIKFCGWEQALGARVEACRARELGRLRVIKYLDAACVYLWAALPVVISIVIFITYVLMGHQLTATKVFTALALVRMLILPLNNFPWVINGLLEAKVSLDRIQLFLDLPNHNPQAYYSPDCGRLGAQIKWLLCSDPPAEPSTVLELHGALFSWDPVGTSLETFISHLEVKKGMLVGIVGKVGCGKSSLLAAIAGELHRLRGHVAVRGLSKGFGLATQEPWIQFATIRDNILFGKTFDAQLYKEVLEACALNDDLSILPAGDQTEVGEKGVTLSGGQRARIALARAVYQEKELYLLDDPLAAVDADVANHLLHRCILGMLSYTTRLLCTHRTEYLERADAVLLMEAGRLIRAGPPSEILPLVQAVPKAWAENGQESDSATAQSVQNPEKTKEGLEEEQSTSGRLLQEESKKEGAVALHVYQAYWKAVGQGLALAILFSLLLMQATRNAADWWLSHWISQLKAENSSQEAQPSTSPASMGLFSPQLLLFSPGNLYIPVFPLPKAAPNGSSDIRFYLTVYATIAGVNSLCTLLRAVLFAAGTLQAAATLHRRLLHRVLMAPVTFFNATPTGRILNRFSSDVACADDSLPFILNILLANAAGLLGLLAVLGSGLPWLLLLLPPLSIMYYHVQRHYRASSRELRRLGSLTLSPLYSHLADTLAGLSVLRATGATYRFEEENLRLLELNQRCQFATSATMQWLDIRLQLMGAAVVSAIAGIALVQHQQGLANPGLVGLSLSYALSLTGLLSGLVSSFTQTEAMLVSVERLEEYTCDLPQEPQGQPLQLGTGWLTQGGVEFQDVVLAYRPGLPNALDGVTFCVQPGEKLGIVGRTGSGKSSLLLVLFRLLEPSSGRVLLDGVDTSQLELAQLRSQLAIIPQEPFLFSGTVRENLDPQGLHKDRALWQALKQCHLSEVITSMGGLDGELGEGGRSLSLGQRQLLCLARALLTDAKILCIDEATASVDQKTDQLLQQTICKRFANKTVLTIAHRLNTILNSDRVLVLQAGRVVELDSPATLRNQPHSLFQQLLQSSQQGVPASLGGP

SEQ ID NO: 800 - protein, 221 aa, Homo sapiens
MSETAPLAPTIPAPAEKTPVKKKAKKAGATAGKRKASGPPVSELITKAVAASKERSGVSLAALKKALAAAGYDVEKNNSRIKLGLKSLVSKGTLVQTKGTGASGSFKLNKKAASGEGKPKAKKAGAAKPRKPAGAAKKPKKVAGAATPKKSIKKTPKKVKKPATAAGTKKVAKSAKKVKTPQPKKAAKSPAKAKAPKPKAAKPKSGKPKVTKAKKAAPKKK

SEQ ID NO: 801 - protein, 518 aa, Homo sapiens
MCPQESSFQPSQFLLLVGVPVASVLLLAQCLRWHCPRRLLGACWTLNGQEEPVSQPTPQLENEVSRQHLPATLPEMVAFYQELHTPTQGQTMVRQLMHKLLVFSAREVDHRGGCLMLQDTGISLLIPPGAVAVGRQERVSLILVWDLSDAPSLSQAQGLVSPVVACGPHGASFLKPCTLTFKHCAEQPSHARTYSSNTTLLDAKVWRPLGRPGAHASRDECRIHLSHFSLYTCVLEAPVGREARKWLQLAVFCSPLVPGQSHLQLRIYFLNNTPCALQWALTNEQPHGGRLRGPCQLFDFNGARGDQCLKLTYISEGWENVDDSSCQLVPHLHIWHGKCPFRSFCFRRKAADENEDCSALTNEIIVTMHTFQDGLETKYMEILRFQASEEESWAAPPPVSQPPPCNRLPPELFEQLRMLLEPNSITGNDWRRLASHLGLCGMKIRFLSCQRSPAAAILELFEEQNGSLQELHYLMTVMERLDCASAIQNYLSGTHGGSPGPERGGARDNQGLELDEKL

SEQ ID NO: 802 - protein, 985 aa, Homo sapiens
MAASVAAAARRLRRAIRRSPAWRGLSHRPLSSEPPAAKASAVRAAFLNFFRDRHGHRLVPSASVRPRGDPSLLFVNAGMNQFKPIFLGTVDPRSEMAGFRRVANSQKCVRAGGHHNDLEDVGRDLSHHTFFEMLGNWAFGGEYFKEEACNMAWELLTQVYGIPEERLWISYFDGDPKAGLDPDLETRDIWLSLGVPASRVLSFGPQENFWEMGDTGPCGPCTEIHYDLAGGVGAPQLVELWNLVFMQHNREADGSLQPLPQRHVDTGMGLERLVAVLQGKHSTYDTDLFSPLLNAIQQGCRAPPYLGRVGVADEGRTDTAYRVVADHIRTLSVCISDGIFPGMSGPPLVLRRILRRAVRFSMEILKAPPGFLGSLVPVVVETLGDAYPELQRNSAQIANLVSEDEAAFLASLERGRRIIDRTLRTLGPSDMFPAEVAWSLSLCGDLGLPLDMVELMLEEKGVQLDSAGLERLAQEEAQHRARQAEPVQKQGLWLDVHALGELQRQGVPPTDDSPKYNYSLRPSGSYEFGTCEAQVLQLYTEDGTAVASVGKGQRCGLLLDRTNFYAEQGGQASDRGYLVRAGQEDVLFPVARAQVCGGFILHEAVAPECLRLGDQVQLHVDEAWRLGCMAKHTATHLLNWALRQTLGPGTEQQGSHLNPEQLRLDVTTQTPLTPEQLRAVENTVQEAVGQDEAVYMEEVPLALTAQVPGLRSLDEVYPDPVRVVSVGVPVAHALDPASQAALQTSVELCCGTHLLRTGAVGDLVIIGDRQLSKGTTRLLAVTGEQAQQARELGQSLAQEVKAATERLSLGSRDVAEALRLSKDIGRLIEAVETAVMPQWQRRELLATVKMLQRRANTAIRKLQMGQAAKKTQELLERHSKGPLIVDTVSAESLSVLVKVVRQLCEQAPSTSVLLLSPQPMGKVLCACQVAQGAMPTFTAEAWALAVCSHMGGKAWGSRVVAQGTGSTTDLEAALSIAQTYALSQL

SEQ ID NO: 803 - protein, 313 aa, Homo sapiens
MNWVNDSIIQEFILLGFSDRPWLEFPLLVVFLISYTVTIFGNLTIILVSRLDTKLHTPMYFFLTNLSLLDLCYTTCTVPQMLVNLCSIRKVISYRGCVAQLFIFLALGATEYLLLAVMSFDRFVAICRPLHYSVIMHQRLCLQLAAASWVTGFSNSVWLSTLTLQLPLCDPYVIDHFLCEVPALLKLSCVETTANEAELFLVSELFHLIPLTLILISYAFIVRAVLRIQSAEGRQKAFGTCGSHLIVVSLFYSTAVSVYLQPPSPSSKDQGKMVSLFYGIIAPMLNPLIYTLRNKEVKEGFKRLVARVFLIKK

SEQ ID NO: 804 - protein, 234 aa, Homo sapiens
MRKTRLWGLLWMLFVSELRAATKLTEEKYELKEGQTLDVKCDYTLEKFASSQKAWQIIRDGEMPKTLACTERPSKNSHPVQVGRIILEDYHDHGLLRVRMVNLQVEDSGLYQCVIYQPPKEPHMLFDRIRLVVTKGFSGTPGSNENSTQNVYKIPPTTTKALCPLYTSPRTVTQAPPKSTADVSTPDSEINLTNVTDIIRVPVFNIVILLAGGFLSKSLVFSVLFAVTLRSFVP

SEQ ID NO: 805 - protein, 957 aa, Homo sapiens
MAHYITFLCMVLVLLLQNSVLAEDGEVRSSCRTAPTDLVFILDGSYSVGPENFEIVKKWLVNITKNFDIGPKFIQVGVVQYSDYPVLEIPLGSYDSGEHLTAAVESILYLGGNTKTGKAIQFALDYLFAKSSRFLTKIAVVLTDGKSQDDVKDAAQAARDSKITLFAIGVGSETEDAELRAIANKPSSTYVFYVEDYIAISKIREVMKQKLCEESVCPTRIPVAARDERGFDILLGLDVNKKVKKRIQLSPKKIKGYEVTSKVDLSELTSNVFPEGLPPSYVFVSTQRFKVKKIWDLWRILTIDGRPQIAVTLNGVDKILLFTTTSVINGSQVVTFANPQVKTLFDEGWHQIRLLVTEQDVTLYIDDQQIENKPLHPVLGILINGQTQIGKYSGKEETVQFDVQKLRIYCDPEQNNRETACEIPGFNGECLNGPSDVGSTPAPCICPPGKPGLQGPKGDPGLPGNPGYPGQPGQDGKPGYQGIAGTPGVPGSPGIQGARGLPGYKGEPGRDGDKGDRGLPGFPGLHGMPGSKGEMGAKGDKGSPGFYGKKGAKGEKGNAGFPGLPGPAGEPGRHGKDGLMGSPGFKGEAGSPGAPGQDGTRGEPGIPGFPGNRGLMGQKGEIGPPGQQGKKGAPGMPGLMGSNGSPGQPGTPGSKGSKGEPGIQGMPGASGLKGEPGATGSPGEPGYMGLPGIQGKKGDKGNQGEKGIQGQKGENGRQGIPGQQGIQGHHGAKGERGEKGEPGVRGAIGSKGESGVDGLMGPAGPKGQPGDPGPQGPPGLDGKPGREFSEQFIRQVCTDVIRAQLPVLLQSGRIRNCDHCLSQHGSPGIPGPPGPIGPEGPRGLPGLPGRDGVPGLVGVPGRPGVRGLKGLPGRNGEKGSQGFGYPGEQGPPGPPGPEGPPGISKEGPPGDPGLPGKDGDHGKPGIQGQPGPPGICDPSLCFSVIARRDPFRKGPNY

SEQ ID NO: 806 - protein, 164 aa, Homo sapiens
MSEPAGDVRQNPCGSKACRRLFGPVDSEQLSRDCDALMAGCIQEARERWNFDFVTETPLEGDFAWERVRGLGLPKLYLPTGPRRGRDELGGGRRPGTSPALLQGTAEEDHVDLSLSCTLVPRSGEQAEGSPGGPGDSQGRKRRQTSMTDFYHSKRRLIFSKRKP

SEQ ID NO: 807 - protein, 474 aa, Homo sapiens
MVQQTNNAENTEALLAGESSDSGAGLELGIASSPTPGSTASTGGKADDPSWCKTPSGHIKRPMNAFMVWSQIERRKIMEQSPDMHNAEISKRLGKRWKLLKDSDKIPFIREAERLRLKHMADYPDYKYRPRKKVKSGNANSSSSAAASSKPGEKGDKVGGSGGGGHGGGGGGGSSNAGGGGGGASGGGANSKPAQKKSCGSKVAGGAGGGVSKPHAKLILAGGGGGGKAAAAAAASFAAEQAGAAALLPLGAAADHHSLYKARTPSASASASSAASASAALAAPGKHLAEKKVKRVYLFGGLGTSSSPVGGVGAGADPSDPLGLYEEEGAGCSPDAPSLSGRSSAASSPAAGRSPADHRGYASLRAASPAPSSAPSHASSSASSHSSSSSSSGSSSSDDEFEDDLLDLNPSSNFESMSLGSFSSSSALDRDLDFNFEPGSGSHFEFPDYCTPEVSEMISGDWLESSISNLVFTY

SEQ ID NO: 808 - protein, 593 aa, Homo sapiens
MEQPEDMASLSEFDSLAGSIPATKVEITVSCRNLLDKDMFSKSDPLCVMYTQGMENKQWREFGRTEVIDNTLNPDFVRKFIVDYFFEEKQNLRFDLYDVDSKSPDLSKHDFLGQAFCTLGEIVGSPGSRLEKPLTIGAFSLNSRTGKPMPAVSNGGVPGKKCGTIILSAEELSNCRDVATMQFCANKLDKKDFFGKSDPFLVFYRSNEDGTFTICHKTEVMKNTLNPVWQTFSIPVRALCNGDYDRTIKVEVYDWDRDGSHDFIGEFTTSYRELARGQSQFNIYEVVNPKKKMKKKKYVNSGTVTLLSFAVESECTFLDYIKGGTQINFTVAIDFTASNGNPSQSTSLHYMSPYQLNAYALALTAVGEIIQHYDSDKMFPALGFGAKLPPDGRVSHEFPLNGNQENPSCCGIDGILEAYHRSLRTVQLYGPTNFAPVVTHVARNAAAVQDGSQYSVLLIITDGVISDMAQTKEAIVNAAKLPMSIIIVGVGQAEFDAMVELDGDDVRISSRGKLAERDIVQFVPFRDYVDRTGNHVLSMARLARDVLAEIPDQLVSYMKAQGIRPRPPPAAPTHSPSQSPARTPPASPLHTHI

SEQ ID NO: 809 - protein, 784 aa, Homo sapiens
MTSPAAAQSREIDCLSPEAQKLAEARLAAKRAARAEAREIRMKELERQQKEEDSERYSRRSRRNTSASDEDERMSVGSRGSLRVEERPEKDFTEKGSRNMPGLSAATLASLGGTSSRRGSGDTSISIDTEASIREIKDSLAEVEEKYKKAMVSNAQLDNEKTNFMYQVDTLKDMLLELEEQLAESRRQYEEKNKEFEREKHAHSILQFQFAEVKEALKQREEMLEKHGIILNSEIATNGETSDTLNNVGYQGPTKMTKEELNALKSTGDGTLGRASEVEVKNEIVANVGKREILHNTEKEQHTEDTVKDCVDIEVFPAGENTEDQKSSEDTAPFLGTLAGATYEEQVQSQILESSSLPENTVQVESNEVMGAPDDRTRTPLEPSNCWSDLDGGNHTENVGEAAVTQVEEQAGTVASCPLGHSDDTVYHDDKCMVEVPQELETSTGHSLEKEFTNQEAAEPKEVPAHSTEVGRDHNEEEGEETGLRDEKPIKTEVPGSPAGTEGNCQEATGPSTVDTQNEPLDMKEPDEEKSDQQGEALDSSQKKTKNKKKKNKKKKSPVPVETLKDVKKELTYQNTDLSEIKEEEQVKSTDRKSAVEAQNEVTENPKQKIAAESSENVDCPENPKIKLDGKLDQEGDDVQTAAEEVLADGDTLDFEDDTVQSSGPRAGGEELDEGVAKDNAKIDGATQSSPAEPKSEDADRCTLPEHESPSQDISDACEAESTERCEMSEHPSQTVRKALDSNSLENDDLSAPGREPGHFNPESREDTRGGNEKGKSKEDCTMS

SEQ ID NO: 810 - protein, 309 aa, Homo sapiens
MQSLWEKACENLRNLNMETTRTRCWKDYVSLRIEAIRAEYQKMPAFLHEEEQHHLERLRKEGEDIFQQLNESKARMEHSRELLRGMYEDLKQMCHKADVELLQAFGDILHRYESLLLQVSEPVNPELSAGPITGLLDSLSGFRVDFTLQPERANSHIFLCGDLRSMNVGCDPQDDPDITGKSECFLVWGAQAFTSGKYYWEVHMGDSWNWAFGVCNNYWKEKRQNDKIDGEEGLFLLGCVKEDTHCSLFTTSPLVVQYVPRPTSTVGLFLDCEGRTVSFVDVDQSSLIYTIPNCSFSPPLRPIFCCSHF

SEQ ID NO: 811 - protein, 1336 aa, Homo sapiens
MENLPAVTTEEPTPMGRGPVGPSGGGSTRDQVRTVVMRPSVSWEKAGPEEAKAPVRGDEAPPARVAGPAAGTPPCQMGVYPTDLTLQLLAVRRKSRLRDPGLQQTLRGQLRLLENDSREMARVLGELSARLLSIHSDQDRIVVTFKTFEEIWKFSTYHALGFTHHCLANLLMDQAFWLLLPSEEEETAIQVHVDENALRLTHESLLIQEGPFFVLCPDHHVRVMTGPRDAGNGPQALRQASGAPQGEAAPETDSSPPSPSVSSEEVAVAAAPEPLIPFHQWALRIPQDPIDDAMGGPVMPGNPLMAVGLASALADFQGSGPEEMTFRGGDLIEILGAQVPSLPWCVGRHAASGRVGFVRSSLISMQGPVSELESAIFLNEEEKSFFSEGCFSEEDARQLLRRMSGTDVCSVYSLDSVEEAETEQPQEKEIPPPCLSLEPQETLQKVKNVLEQCKTCPGCPQEPASWGLCAASSDVSLQDPEEPSFCLEAEDDWEDPEALSSLLLFLNAPGYKASFRGLYDVALPWLSSVFRSFSDEEELTGRLAQARGAAKKAGLLMALARLCFLLGRLCSRRLKLSQARVYFEEALGALEGSFGDLFLVVAVYANLASIYRKQKNREKCAQVVPKAMALLLGTPDHICSTEAEGELLQLALRRAVGGQSLQAEARACFLLARHHVHLKQPEEALPFLERLLLLHRDSGAPEAAWLSDCYLLLADIYSRKCLPHLVLSCVKVASLRTRGSLAGSLRSVNLVLQNAPQPHSLPAQTSHYLRQALASLTPGTGQALRGPLYTSLAQLYSHHGCHGPAITFMTQAVEASAIAGVRAIVDHLVALAWLHVLHGQSPVALDILQSVRDAVVASEDQEGVIANMVAVALKRTGRTRQAAESYYRALRVARDLGQQRNQAVGLANFGALCLHAGASRLAQHYLLEAVRLFSRLPLGECGRDFTHVLLQLGHLCTRQGPAQQGKGYYEWALLVAVEMGHVESQLRAVQRLCHFYSAVMPSEAQCVIYHELQLSLACKVADKVLEGQLLETISQLYLSLGTERAYKSALDYTKRSLGIFIDLQKKEKEAHAWLQAGKIYYILRQSELVDLYIQVAQNVALYTGDPNLGLELFEAAGDIFFDGAWEREKAVSFYRDRALPLAVTTGNRKAELRLCNKLVALLATLEEPQEGLEFAHMALALSITLGDRLNERVAYHRLAALQHRLGHGELAEHFYLKALSLCNSPLEFDEETLYYVKVYLVLGDIIFYDLKDPFDAAGYYQLALAAAVDLGNKKAQLKIYTRLATIYHNFLLDREKSLFFYQKARTFATELNVRRVNLPPLPLCGWAPWLAPSHPR

SEQ ID NO: 812 - protein, 654 aa, Homo sapiens
MNGHLEAEEQQDQRPDQELTGSWGHGPRSTLVRAKAMAPPPPPLAASTPLLHGEFGSYPARGPRFALTLTSQALHIQRLRPKPEARPRGGLVPLAEVSGCCTLRSRSPSDSAAYFCIYTYPRGRRGARRRATRTFRADGAATYEENRAEAQRWATALTCLLRGLPLPGDGEITPDLLPRPPRLLLLVNPFGGRGLAWQWCKNHVLPMISEAGLSFNLIQTERQNHARELVQGLSLSEWDGIVTVSGDGLLHEVLNGLLDRPDWEEAVKMPVGILPCGSGNALAGAVNQHGGFEPALGLDLLLNCSLLLCRGGGHPLDLLSVTLASGSRCFSFLSVAWGFVSDVDIQSERFRALGSARFTLGTVLGLATLHTYRGRLSYLPATVEPASPTPAHSLPRAKSELTLTPDPAPPMAHSPLHRSVSDLPLPLPQPALASPGSPEPLPILSLNGGGPELAGDWGGAGDAPLSPDPLLSSPPGSPKAALHSPVSEGAPVIPPSSGLPLPTPDARVGASTCGPPDHLLPPLGTPLPPDWVTLEGDFVLMLAISPSHLGADLVAAPHARFDDGLVHLCWVRSGISRAALLRLFLAMERGSHFSLGCPQLGYAAARAFRLEPLTPRGVLTVDGEQVEYGPLQAQMHPGIGTLLTGPPGCPGREP

SEQ ID NO: 813 - protein, 861 aa, Homo sapiens
MTGRARARARGRARGQETAQLVGSTASQQPGYIQPRPQPPPAEGELFGRGRQRGTAGGTAKSQGLQISAGFQELSLAERGGRRRDFHDLGVNTRQNLDHVKESKTGSSGIIVRLSTNHFRLTSRPQWALYQYHIDYNPLMEARRLRSALLFQHEDLIGKCHAFDGTILFLPKRLQQKVTEVFSKTRNGEDVRITITLTNELPPTSPTCLQFYNIIFRRLLKIMNLQQIGRNYYNPNDPIDIPSHRLVIWPGFTTSILQYENSIMLCTDVSHKVLRSETVLDFMFNFYHQTEEHKFQEQVSKELIGLVVLTKYNNKTYRVDDIDWDQNPKSTFKKADGSEVSFLEYYRKQYNQEITDLKQPVLVSQPKRRRGPGGTLPGPAMLIPELCYLTGLTDKMRNDFNVMKDLAVHTRLTPEQRQREVGRLIDYIHKNDNVQRELRDWGLSFDSNLLSFSGRILQTEKIHQGGKTFDYNPQFADWSKETRGAPLISVKPLDNWLLIYTRRNYEAANSLIQNLFKVTPAMGMQMRKAIMIEVDDRTEAYLRVLQQKVTADTQIVVCLLSSNRKDKYDAIKKYLCTDCPTPSQCVVARTLGKQQTVMAIATKIALQMNCKMGGELWRVDIPLKLVMIVGIDCYHDMTAGRRSIAGFVASINEGMTRWFSRCIFQDRGQELVDGLKVCLQAALRAWNSCNEYMPSRIIVYRDGVGDGQLKTLVNYEVPQFLDCLKSIGRGYNPRLTVIVVKKRVNTRFFAQSGGRLQNPLPGTVIDVEVTRPEWYDFFIVSQAVRSGSVSPTHYNVIYDNSGLKPDHIQRLTYKLCHIYYNWPGVIRVPAPCQYAHKLAFLVGQSIHREPNLSLSNRLYYL

SEQ ID NO: 814 - protein, 348 aa, Homo sapiens
MNDPNSCVDNATVCSGASCVVPESNFNNILSVVLSTVLTILLALVMFSMGCNVEIKKFLGHIKRPWGICVGFLCQFGIMPLTGFILSVAFDILPLQAVVVLIIGCCPGGTASNILAYWVDGDMDLSVSMTTCSTLLALGMMPLCLLIYTKMWVDSGSIVIPYDNIGTSLVSLVVPVSIGMFVNHKWPQKAKIILKIGSIAGAILIVLIAVVGGILYQSAWIIAPKLWIIGTIFPVAGYSLGFLLARIAGLPWYRCRTVAFETGMQNTQLCSTIVQLSFTPEELNVVFTFPLIYSIFQLAFAAIFLGFYVAYKKCHGKNKAEIPESKENGTEPESSFYKANGGFQPDEK

SEQ ID NO: 815 - protein, 521 aa, Homo sapiens
MACSLQKLFAVEEEFEDEDFLSAVEDAENRFTGSLPVNAGRLRPVSSRPQETVQAQSSRLLLLHPTAPSEALGLPDLDLCLPASSTPSADSRPSCIGAAPLRPVSTSSSWIGNQRRVTVTEVLRETARPQSSALHPLLTFESQQQQVGGFEGPEQDEFDKVLASMELEEPGMELECGVSSEAIPILPAQQREGSVLAKKARVVDLSGSCQKGPVPAIHKAGIMSAQDESLDPVIQCRTPRPPLRPGAVGHLPVPTALTVPTQQLHWEVCPQRSPVQALQPLQAARGTIQSSPQNRFPCQPFQSPSSWLSGKAHLPRPRTPNSSCSTPSRTSSGLFPRIPLQPQAPVSSIGSPVGTPKGPQGALQTPIVTNHLVQLVTAASRTPQQPTHPSTRAKTRRFPGPAGILPHQAALKQLPRNKVPNMAVMIKSLTRSTMDASVVFKDPTGEMQGTVHRLLLETCQNELKPGSVLLLKQIGVFSPSLRNHYLNVTPNNLVHIYSPDSGDGSFLKPSQPFPKMTWMDS

SEQ ID NO: 816 - protein, 470 aa, Homo sapiens
MKEEKEHRPKEKRVTLLTPAGATGSGGGTSGDSSKGEDKQDRNKEKKEALSKVVIRRLPPTLTKEQLQEHLQPMPEHDYFEFFSNDTSLYPHMYARAYINFKNQEDIILFRDRFDGYVFLDNKGQEYPAIVEFAPFQKAAKKKTKKRDTKVGTIDDDPEYRKFLESYATDNEKMTSTPETLLEEIEAKNRELIAKKTTPLLSFLKNKQRMREEKREERRRREIERKRQREEERRKWKEEEKRKRKDIEKLKKIDRIPERDKLKDEPKIKLLKKPEKGDEKELDKREKAKKLDKENLSDERASGQSCTLPKRSDSELKDEKPKRPEDESGRDYREREREYERDQERILRERERLKRQEEERRRQKERYEKEKTFKRKEEEMKKEKDTLRDKGKKAESTESIGSSEKTEKKEEVVKRDRIRNKDRPAMQLYQPGARSRNRLCPPDDSTKSGDSAAERKQESGISHRKEGGEE

SEQ ID NO: 817 - protein, 2133 aa, Homo sapiens
MDEVEQDQHEARLKELFDSFDTTGTGSLGQEELTDLCHMLSLEEVAPVLQQTLLQDNLLGRVHFDQFKEALILILSRTLSNEEHFQEPDCSLEAQPKYVRGGKRYGRRSLPEFQESVEEFPEVTVIEPLDEEARPSHIPAGDCSEHWKTQRSEEYEAEGQLRFWNPDDLNASQSGSSPPQDWIEEKLQEVCEDLGITRDGHLNRKKLVSICEQYGLQNVDGEMLEEVFHNLDPDGTMSVEDFFYGLFKNGKSLTPSASTPYRQLKRHLSMQSFDESGRRTTTSSAMTSTIGFRVFSCLDDGMGHASVERILDTWQEEGIENSQEILKALDFSLDGNINLTELTLALENELLVTKNSIHQAALASFKAEIRHLLERVDQVVREKEKLRSDLDKAEKLKSLMASEVDDHHAAIERRNEYNLRKLDEEYKERIAALKNELRKEREQILQQAGKQRLELEQEIEKAKTEENYIRDRLALSLKENSRLENELLENAEKLAEYENLTNKLQRNLENVLAEKFGDLDPSSAEFFLQEERLTQMRNEYERQCRVLQDQVDELQSELEEYRAQGRVLRLPLKNSPSEEVEANSGGIEPEHGLGSEECNPLNMSIEAELVIEQMKEQHHRDICCLRLELEDKVRHYEKQLDETVVSCKKAQENMKQRHENETHTLEKQISDLKNEIAELQGQAAVLKEAHHEATCRHEEEKKQLQVKLEEEKTHLQEKLRLQHEMELKARLTQAQASFEREREGLQSSAWTEEKVRGLTQELEQFHQEQLTSLVEKHTLEKEELRKELLEKHQRELQEGREKMETECNRRTSQIEAQFQSDCQKVTERCESALQSLEGRYRQELKDLQEQQREEKSQWEFEKDELTQECAEAQELLKETLKREKTTSLVLTQEREMLEKTYKEHLNSMVVERQQLLQDLEDLRNVSETQQSLLSDQILELKSSHKRELREREEVLCQAGASEQLASQRLERLEMEHDQERQEMMSKLLAMENIHKATCETADRERAEMSTEISRLQSKIKEMQQATSPLSMLQSGCQVIGEEEVEGDGALSLLQQGEQLLEENGDVLLSLQRAHEQAVKENVKMATEISRLQQRLQKLEPGLVMSSCLDEPATEFFGNTAEQTEQFLQQNRTKQVEGVTRRHVLSDLEDDEVRDLGSTGTSSVQRQEVKIEESEASVEGFSELENSEETRTESWELKNQISQLQEQLMMLCADCDRASEKKQDLLFDVSVLKKKLKMLERIPEASPKYKLLYEDVSRENDCLQEELRMMETRYDEALENNKELTAEVFRLQDELKKMEEVTETFLSLEKSYDEVKIENEGLNVLVLRLQGKIEKLQESVVQRCDCCLWEASLENLEIEPDGNILQLNQTLEECVPRVRSVHHVIEECKQENQYLEGNTQLLEKVKAHEIAWLHGTIQTHQERPRVQNQVILEENTTLLGFQDKHFQHQATIAELELEKTKLQELTRKLKERVTILVKQKDVLSHGEKEEELKAMMHDLQITCSEMQQKVELLRYESEKLQQENSILRNEITTLNEEDSISNLKLGTLNGSQEEMWQKTETVKQENAAVQKMVENLKKQISELKIKNQQLDLENTELSQKNSQNQEKLQELNQRLTEMLCQKEKEPGNSALEEREQEKFNLKEELERCKVQSSTLVSSLEAELSEVKIQTHIVQQENHLLKDELEKMKQLHRCPDLSDFQQKISSVLSYNEKLLKEKEALSEELNSCVDKLAKSSLLEHRIATMKQEQKSWEHQSASLKSQLVASQEKVQNLEDTVQNVNLQMSRMKSDLRVTQQEKEALKQEVMSLHKQLQNAGGKSWAPEIATHPSGLHNQQKRLSWDKLDHLMNEEQQLLWQENERLQTMVQNTKAELTHSREKVRQLESNLLPKHQKHLNPSGTMNPTEQEKLSLKRECDQFQKEQSPANRKVSQMNSLEQELETIHLENEGLKKKQVKLDEQLMEMQHLRSTATPSPSPHAWDLQLLQQQACPMVPREQFLQLQRQLLQAERINQHLQEELENRTSETNTPQGNQEQLVTVMEERMIEVEQKLKLVKRLLQEKVNQLKEQLCKNTKADAMVKDLYVENAQLLKALEVTEQRQKTAEKKNYLLEEKIASLSNIVRNLTPAPLTSTPPLRS

SEQ ID NO: 818 - protein, 509 aa, Homo sapiens
MNLLDPFMKMTDEQEKGLSGAPSPTMSEDSAGSPCPSGSGSDTENTRPQENTFPKGEPDLKKESEEDKFPVCIREAVSQVLKGYDWTLVPMPVRVNGSSKNKPHVKRPMNAFMVWAQAARRKLADQYPHLHNAELSKTLGKLWRLLNESEKRPFVEEAERLRVQHKKDHPDYKYQPRRRKSVKNGQAEAEEATEQTHISPNAIFKALQADSPHSSSGMSEVHSPGEHSGQSQGPPTPPTTPKTDVQPGKADLKREGRPLPEGGRQPPIDFRDVDIGELSSDVISNIETFDVNEFDQYLPPNGHPGVPATHGQVTYTGSYGISSTAATPASAGHVWMSKQQAPPPPPQQPPQAPPAPQAPPQPQAAPPQQPAAPPQQPQAHTLTTLSSEPGQSQRTHIKTEQLSPSHYSEQQQHSPQQIAYSPFNLPHYSPSYPPITRSQYDYTDHQNSSSYYSHAAGQGTGLYSTFTYMNPAQRPMYTPIADTSGVPSIPQTHSPQHWEQPVYTQLTRP

SEQ ID NO: 819 - protein, 1941 aa, Homo sapiens
MSSDSELAVFGEAAPFLRKSERERIEAQNRPFDAKTSVFVAEPKESFVKGTIQSREGGKVTVKTEGGATLTVKDDQVFPMNPPKYDKIEDMAMMTHLHEPAVLYNLKERYAAWMIYTYSGLFCVTVNPYKWLPVYKPEVVTAYRGKKRQEAPPHIFSISDNAYQFMLTDRENQSILITGESGAGKTVNTKRVIQYFATIAVTGEKKKEEITSGKIQGTLEDQIISANPLLEAFGNAKTVRNDNSSRFGKFIRIHFGTTGKLASADIETYLLEKSRVVFQLKAERSYHIFYQITSNKKPELIEMLLITTNPYDYPFVSQGEISVASIDDQEELMATDSAIDILGFTNEEKVSIYKLTGAVMHYGNLKFKQKQREEQAEPDGTEVADKAAYLQSLNSADLLKALCYPRVKVGNEYVTKGQTVEQVSNAVGALAKAVYEKMFLWMVARINQQLDTKQPRQYFIGVLDIAGFEIFDFNSLEQLCINFTNEKLQQFFNHHMFVLEQEEYKKEGIEWTFIDFGMDLAACIELIEKPMGIFSILEEECMFPKATDTSFKNKLYDQHLGKSANFQKPKVVKGKAEAHFALIHYAGVVDYNITGWLEKNKDPLNETVVGLYQKSAMKTLAQLFSGAQTAEGEGAGGGAKKGGKKKGSSFQTVSALFRENLNKLMTNLRSTHPHFVRCIIPNETKTPGAMEHELVLHQLRCNGVLEGIRICRKGFPSRILYADFKQRYKVLNASAIPEGQFIDSKKASEKLLASIDIDHTQYKFGHTKVFFKAGLLGLLEEMRDDKLAQLITRTQARCRGFLARVEYQRMVERREAIFCIQYNIRSFMNVKHWPWMKLFFKIKPLLKSAETEKEMATMKEEFQKIKDELAKSEAKRKELEEKMVTLLKEKNDLQLQVQAEAEGLADAEERCDQLIKTKIQLEAKIKEVTERAEDEEEINAELTAKKRKLEDECSELKKDIDDLELTLAKVEKEKHATENKVKNLTEEMAGLDETIAKLTKEKKALQEAHQQTLDDLQAEEDKVNTLTKAKIKLEQQVDDLEGSLEQEKKLRMDLERAKRKLEGDLKLAQESIMDIENEKQQLDEKLKKKEFEISNLQSKIEDEQALGIQLQKKIKELQARIEELEEEIEAERASRAKAEKQRSDLSRELEEISERLEEAGGATSAQIEMNKKREAEFQKMRRDLEEATLQHEATAATLRKKHADSVAELGEQIDNLQRVKQKLEKEKSEMKMEIDDLASNVETVSKAKGNLEKMCRTLEDQLSELKSKEEEQQRLINDLTAQRGRLQTESGEFSRQLDEKEALVSQLSRGKQAFTQQIEELKRQLEEEIKAKNALAHALQSSRHDCDLLREQYEEEQESKAELQRALSKANTEVAQWRTKYETDAIQRTEELEEAKKKLAQRLQAAEEHVEAVNAKCASLEKTKQRLQNEVEDLMLDVERTNAACAALDKKQRNFDKILAEWKQKCEETHAELEASQKEARSLGTELFKIKNAYEESLDQLETLKRENKNLQQEISDLTEQIAEGGKRIHELEKIKKQVEQEKCELQAALEEAEASLEHEEGKILRIQLELNQVKSEVDRKIAEKDEEIDQLKRNHIRIVESMQSTLDAEIRSRNDAIRLKKKMEGDLNEMEIQLNHANRMAAEALRNYRNTQGILKDTQIHLDDALRSQEDLKEQLAMVERRANLLQAEIEELRATLEQTERSRKIAEQELLDASERVQLLHTQNTSLINTKKKLETDISQMQGEMEDILQEARNAEEKAKKAITDAAMMAEELKKEQDTSAHLERMKKNMEQTVKDLQLRLDEAEQLALKGGKKQIQKLEARVRELEGEVESEQKRNAEAVKGLRKHERRVKELTYQTEEDRKNILRLQDLVDKLQAKVKSYKRQAEEAEEQSNTNLAKFRKLQHELEEAEERADIAESQVNKLRVKSREVHTKVISEE

SEQ ID NO: 820 - protein, 656 aa, Homo sapiens
MEELDGEPTVTLIPGVNSKKNQMYFDWGPGEMLVCETSFNKKEKSEMVPSCPFIYIIRKDVDVYSQILRKLFNESHGIFLGLQRIDEELTGKSRKSQLVRVSKNYRSVIRACMEEMHQVAIAAKDPANGRQFSSQVSILSAMELIWNLCEILFIEVAPAGPLLLHLLDWVRLHVCEVDSLSADVLGSENPSKHDSFWNLVTILVLQGRLDEARQMLSKEADASPASAGICRIMGDLMRTMPILSPGNTQTLTELELKWQHWHEECERYLQDSTFATSPHLESLLKIMLGDEAALLEQKELLSNWYHFLVTRLLYSNPTVKPIDLHYYAQSSLDLFLGGESSPEPLDNILLAAFEFDIHQVIKECSIALSNWWFVAHLTDLLDHCKLLQSHNLYFGSNMREFLLLEYASGLFAHPSLWQLGVDYFDYCPELGRVSLELHIERIPLNTEQKALKVLRICEQRQMTEQVRSICKILAMKAVRNNRLGSALSWSIRAKDAAFATLVSDRFLRDYCERGCFSDLDLIDNLGPAMMLSDRLTFLGKYREFHRMYGEKRFADAASLLLSLMTSRIAPRSFWMTLLTDALPLLEQKQVIFSAEQTYELMRCLEDLTSRRPVHGESDTEQLQDDDIETTKVEMLRLSLARNLARAIIREGSLEGS

SEQ ID NO: 821 - protein, 596 aa, Homo sapiens
MNRTWPRRIWGSSQDEAELIREDIQGALHNYRSGRGERRAAALRATQEELQRDRSPAAETPPLQRRPSVRAVISTVERGAGRGRPQAKPIPEAEEAQRPEPVGTSSNADSASPDLGPRGPDLAVLQAEREVDILNHVFDDVESFVSRLQKSAEAARVLEHRERGRRSRRRAAGEGLLTLRAKPPSEAEYTDVLQKIKYAFSLLARLRGNIADPSSPELLHFLFGPLQMIVNTSGGPEFASSVRRPHLTSDAVALLRDNVTPRENELWTSLGDSWTRPGLELSPEEGPPYRPEFFSGWEPPVTDPQSRAWEDPVEKQLQHERRRRQQSAPQVAVNGHRDLEPESEPQLESETAGKWVLCNYDFQARNSSELSVKQRDVLEVLDDSRKWWKVRDPAGQEGYVPYNILTPYPGPRLHHSQSPARSLNSTPPPPPAPAPAPPPALARPRWDRPRWDSCDSLNGLDPSEKEKFSQMLIVNEELQARLAQGRSGPSRAVPGPRAPEPQLSPGSDASEVRAWLQAKGFSSGTVDALGVLTGAQLFSLQKEELRAVSPEEGARVYSQVTVQRSLLEDKEKVSELEAVMEKQKKKVEGEVEMEVI

SEQ ID NO: 822 - protein, 632 aa, Homo sapiens
MTPALTALLCLGLSLGPRTRMQAGPFPKPTLWAEPGSVISWGSPVTIWCQGSLEAQEYQLDKEGSPEPWDRNNPLEPKNKARFSIPSMTQHHAGRYRCHYYSSAGWSEPSDPLELVMTGFYNKPTLSALPSPVVASGGNMTLRCGSQKGYHHFVLMKEGEHQLPRTLDSQQLHSGGFQALFPVGPVTPSHRWRFTCYYYYTNTPWVWSHPSDPLEILPSGVSRKPSLLTLQGPVLAPGQSLTLQCGSDVGYDRFVLYKEGERDFLQRPGQQPQAGLSQANFTLGPVSRSYGGQYRCYGAHNLSSEWSAPSDPLDILITGQIYDTVSLSAQPGPTVASGENMTLLCQSRGYFDTFLLTKEGAAHPPLRLRSMYGAHKYQAEFPMSPVTSAHAGTYRCYGSRSSNPHLLSFPSEPLELMVSGHSGGSSLPPTGPPSTPGLGRYLEVLIGVSVAFVLLLFLLLFLLLLRQRHSKHRTSDQRKTDFQRPAGAAETEPKDRGLLRRSSPAADVQEENLYAAVKDTQSEDRVELDSQQSPHDEDPQAVTYAPVKHSSPRREMASPPSSLSGEFLDTKDRQVEEDRQMDTEAAASEASQDVTYAQLHSLTLRRKATEPPPSQEGEPPAEPSIYATLAIH

SEQ ID NO: 823 - protein, 464 aa, Homo sapiens
MTPTLAALLCLGLSLGPRTHVQAGPFPKPTLWAEPGSVISWGSPVTIWCQGSLEAQEYRLDKEGSPEPWDRNNPLEPKNKARFSIPSITEHHAGRYRCHYYSSAGWSEPSDPLELVMTGAYSKPTLSALPSPVVASGGNMTLQCGSQKGYHHFVLMKEGEHQLPRTLDSQQLHSGGFQALFPVGPVNPSHRWRFTCYYYYMNTPRVWSHPSDPLEILPSGVSRKPSLLTLQGPVLAPGQSLTLQCGSDVGYDRFVLYKEGERDFLQRPGQQPQAGLSQANFTLGPVSPSHGGQYRCYGAHNLSSEWSAPSDPLNILMAGQIYDTVSLSAQPGPTVASGENVTLLCQSWWQFDTFLLTKEGAAHPPLRLRSMYGAHKYQAEFPMSPVTSAHAGTYRCYGSYSSNPHLLSFPSEPLELMVSASHAKDYTVENLIRMGMAGLVLVFLGILLFEAQHSQRNPQDAAGR

SEQ ID NO: 824 - protein, 589 aa, Homo sapiens
MNNRKEDMEITSHYRHLLRELNEQRQHGVLCDVCVVVEGKVFKAHKNVLLGSSRYFKTLYCQVQKTSEQATVTHLDIVTAQGFKAIIDFMYSAHLALTSRNVIEVMSAASFLQMTDIVQACHDFIKAALDISIKSDASDELAEFEIGASSSSSTEALISAVMAGRSISPWLARRTSPANSSGDSAIASCHDGGSSYGKEDQEPKADGPDDVSSQPLWPGDVGYGPLRIKEEQVSPSQYGGSELPSAKDGAVQNSFSEQSAGDAWQPTGRRKNRKNKETVRHITQQVEDDSRASSPVPSFLPTSGWPFSSRDSNADLSVTEASSSDSRGERAELYAQVEEGLLGGEASYLGPPLTPEKDDALHQATAVANLRAALMSKNSLLSLKADVLGDDGSLLFEYLPRGAHSLSLNEFTVIRKKFKCPYCSFSAMHQCILKRHMRSHTGERPYPCEICGKKFTRREHMKRHTLVHSKDKKYVCKVCSRVFMSAASVGIRHGSRRHGVCTDCAGRGMAGPLDHGGGGGEGSPEALFPGDGPYLEDPEDPRGEAEELGEDDEGLAPEDALLADDKDEEDSPRPRSPPGGPDKDFAWLS

SEQ ID NO: 825 - protein, 523 aa, Homo sapiens
MVPPRRHRGAGRPGVLSSSPPFRLRSAKFSGIALEDLRRALKTRLQMVCVFVMNRMNSQNSGFTQRRRMALGIVILLLVDVIWVASSELTSYVFTQYNKPFFSTFAKTSMFVLYLLGFIIWKPWRQQCTRGLRGKHAAFFADAEGYFAACTTDTTMNSSLSEPLYVPVKFHDLPSEKPESTNIDTEKTPKKSRVRFSNIMEIRQLPSSHALEAKLSRMSYPVKEQESILKTVGKLTATQVAKISFFFCFVWFLANLSYQEALSDTQVAIVNILSSTSGLFTLILAAVFPSNSGDRFTLSKLLAVILSIGGVVLVNLAGSEKPAGRDTVGSIWSLAGAMLYAVYIVMIKRKVDREDKLDIPMFFGFVGLFNLLLLWPGFFLLHYTGFEDFEFPNKVVLMCIIINGLIGTVLSEFLWLWGCFLTSSLIGTLALSLTIPLSIIADMCMQKVQFSWLFFAGAIPVFFSFFIVTLLCHYNNWDPVMVGIRRIFAFICRKHRIQRVPEDSEQCESLISMHSVSQEDGAS

SEQ ID NO: 826 - protein, 1056 aa, Homo sapiens
MMGDYRLPDHPQPMEILNLYLGDSLEPHPGECPRETCSHEDPPEPFEEQTWATDPPEPTRQNVPPWGSGVELTHLGSWVHQDGLEPCQEQTRATDPPESTRQDAPPWGSGVELTHLGSPSAQREHRQNTASPGSPVNSHLPGSPKQNRSTSTQVVFWAGILQAQMCVLDLEEELEKTEGLKAGLKCCLPTPPVDLPGDTGLHSSPPENEDSGEDSSEPEGEGQAWLREGTPDSSPQWGAEEESMFFSNPLFLASPCSENSASGECFSWGASDSHAGVRTGPESPATLEPPLPEDTVLWELESEPDLGDGAAISGHCTPPFPVPIYKPHSICWASVAAAEGAPAAPPGHGESEGDRLGPAPSAAPCVDEALTWESGCVGSDLGPAAHPVQPWASLSPEGWQRGGPFWPQVTLNSQDRDEREGGHPQESLPCTLAPCPWRSPASSPEPSSPESESRGPGPRPSPASSQEGSPQLQHHSSGILPKWTLDASQSSLLETDGEQPSSLKKKEAGEAPKPGEEVKSEGTARPAETGDVQPDIHLTSAEHENLRTPMNSSWLPGSPMPQAQSPEEGQRPPAGDKLANGVRNNKVAWNLASRLYRLEGFRKSEVAAYLQKNNDFSRAVAEEYLSFFQFGGQSLDRALRSFLQALVLSGETQERERILYQFSRRFHHCNPGIFPSVDSVHTLTCAIMLLNTDLHGQNIGKSMSCQEFITNLNGLRDGGNFPKELLKALYWSIRSEKLEWAVDEEDTARPEKAQPSLPAGKMSKPFLQLAQDPTVPTYKQGILARKMHQDADGKKTPWGKRGWKMFHTLLRGMVLYFLKQGEDHCLEGESLVGQMVDEPVGVHHSLATPATHYTKKPHVFQLRTADWRLYLFQAPTAKEMSSWIARINLAAATHSAPPFPAAVGSQRRFVRPILPVGPAQSSLEEQHRSHENCLDAAADDLLDLQRNLPERRGRGRELEEHRLRKEYLEYEKTRYETYVQLLVARLHCPSDALDLWEEQLGREAGGTREPKLSLKKSHSSPSLHQDEAPTTAKVKRNISERRTYRKIIPKRNRNQL

SEQ ID NO: 827 - protein, 1593 aa, Homo sapiens
MAAAAVVVPAEWIKNWEKSGRGEFLHLCRILSENKSHDSSTYRDFQQALYELSYHVIKGNLKHEQASNVLSDISEFREDMPSILADVFCILDIETNCLEEKSKRDYFTQLVLACLYLVSDTVLKERLDPETLESLGLIKQSQQFNQKSVKIKTKLFYKQQKFNLLREENEGYAKLIAELGQDLSGSITSDLILENIKSLIGCFNLDPNRVLDVILEVFECRPEHDDFFISLLESYMSMCEPQTLCHILGFKFKFYQEPNGETPSSLYRVAAVLLQFNLIDLDDLYVHLLPADNCIMDEHKREIAEAKQIVRKLTMVVLSSEKMDEREKEKEKEEEKVEKPPDNQKLGLLEALLKIGDWQHAQNIMDQMPPYYAASHKLIALAICKLIHITIEPLYRRVGVPKGAKGSPVNALQNKRAPKQAESFEDLRRDVFNMFCYLGPHLSHDPILFAKVVRIGKSFMKEFQSDGSKQEDKEKTEVILSCLLSITDQVLLPSLSLMDCNACMSEELWGMFKTFPYQHRYRLYGQWKNETYNSHPLLVKVKAQTIDRAKYIMKRLTKENVKPSGRQIGKLSHSNPTILFDYILSQIQKYDNLITPVVDSLKYLTSLNYDVLAYCIIEALANPEKERMKHDDTTISSWLQSLASFCGAVFRKYPIDLAGLLQYVANQLKAGKSFDLLILKEVVQKMAGIEITEEMTMEQLEAMTGGEQLKAEGGYFGQIRNTKKSSQRLKDALLDHDLALPLCLLMAQQRNGVIFQEGGEKHLKLVGKLYDQCHDTLVQFGGFLASNLSTEDYIKRVPSIDVLCNEFHTPHDAAFFLSRPMYAHHISSKYDELKKSEKGSKQQHKVHKYITSCEMVMAPVHEAVVSLHVSKVWDDISPQFYATFWSLTMYDLAVPHTSYEREVNKLKVQMKAIDDNQEMPPNKKKKEKERCTALQDKLLEEEKKQMEHVQRVLQRLKLEKDNWLLAKSTKNETITKFLQLCIFPRCIFSAIDAVYCARFVELVHQQKTPNFSTLLCYDRVFSDIIYTVASCTENEASRYGRFLCCMLETVTRWHSDRATYEKECGNYPGFLTILRATGFDGGNKADQLDYENFRHVVHKWHYKLTKASVHCLETGEYTHIRNILIVLTKILPWYPKVLNLGQALERRVHKICQEEKEKRPDLYALAMGYSGQLKSRKSYMIPENEFHHKDPPPRNAVASVQNGPGGGPSSSSIGSASKSDESSTEETDKSRERSQCGVKAVNKASSTTPKGNSSNGNSGSNSNKAVKENDKEKGKEKEKEKKEKTPATTPEARVLGKDGKEKPKEERPNKDEKARETKERTPKSDKEKEKFKKEEKAKDEKFKTTVPNAESKSTQEREREKEPSRERDIAKEMKSKENVKGGEKTPVSGSLKSPVPRSDIPEPEREQKRRKIDTHPSPSHSSTVKDSLIELKESSAKLYINHTPPPLSKSKEREMDKKDLDKSRERSREREKKDEKDRKERKRDHSNNDREVPPDLTKRRKEENGTMGVSKHKSESPCESPYPNEKDKEKNKSKSSGKEKGSDSFKSEKMDKISSGGKKESRHDKEKIEKKEKRDSSGGKEEKKHHKSSDKHR

SEQ ID NO: 828 - protein, 193 aa, Homo sapiens
MPEEGSGCSVRRRPYGCVLRAALVPLVAGLVICLVVCIQRFAQAQQQLPLESLGWDVAELQLNHTGPQQDPRLYWQGGPALGRSFLHGPELDKGQLRIHRDGIYMVHIQVTLAICSSTTASRHHPTTLAVGICSPASRSISLLRLSFHQGCTIASQRLTPLARGDTLCTNLTGTLLPSRNTDETFFGVQWVRP

SEQ ID NO: 829 - protein, 1663 aa, Homo sapiens
MGPTSGPSLLLLLLTHLPLALGSPMYSIITPNILRLESEETMVLEAHDAQGDVPVTVTVHDFPGKKLVLSSEKTVLTPATNHMGNVTFTIPANREFKSEKGRNKFVTVQATFGTQVVEKVVLVSLQSGYLFIQTDKTIYTPGSTVLYRIFTVNHKLLPVGRTVMVNIENPEGIPVKQDSLSSQNQLGVLPLSWDIPELVNMGQWKIRAYYENSPQQVFSTEFEVKEYVLPSFEVIVEPTEKFYYIYNEKGLEVTITARFLYGKKVEGTAFVIFGIQDGEQRISLPESLKRIPIEDGSGEVVLSRKVLLDGVQNPRAEDLVGKSLYVSATVILHSGSDMVQAERSGIPIVTSPYQIHFTKTPKYFKPGMPFDLMVFVTNPDGSPAYRVPVAVQGEDTVQSLTQGDGVAKLSINTHPSQKPLSITVRTKKQELSEAEQATRTMQALPYSTVGNSNNYLHLSVLRTELRPGETLNVNFLLRMDRAHEAKIRYYTYLIMNKGRLLKAGRQVREPGQDLVVLPLSITTDFIPSFRLVAYYTLIGASGQREVVADSVWVDVKDSCVGSLVVKSGQSEDRQPVPGQQMTLKIEGDHGARVVLVAVDKGVFVLNKKNKLTQSKIWDVVEKADIGCTPGSGKDYAGVFSDAGLTFTSSSGQQTAQRAELQCPQPAARRRRSVQLTEKRMDKVGKYPKELRKCCEDGMRENPMRFSCQRRTRFISLGEACKKVFLDCCNYITELRRQHARASHLGLARSNLDEDIIAEENIVSRSEFPESWLWNVEDLKEPPKNGISTKLMNIFLKDSITTWEILAVSMSDKKGICVADPFEVTVMQDFFIDLRLPYSVVRNEQVEIRAVLYNYRQNQELKVRVELLHNPAFCSLATTKRRHQQTVTIPPKSSLSVPYVIVPLKTGLQEVEVKAAVYHHFISDGVRKSLKVVPEGIRMNKTVAVRTLDPERLGREGVQKEDIPPADLSDQVPDTESETRILLQGTPVAQMTEDAVDAERLKHLIVTPSGCGEQNMIGMTPTVIAVHYLDETEQWEKFGLEKRQGALELIKKGYTQQLAFRQPSSAFAAFVKRAPSTWLTAYVVKVFSLAVNLIAIDSQVLCGAVKWLILEKQKPDGVFQEDAPVIHQEMIGGLRNNNEKDMALTAFVLISLQEAKDICEEQVNSLPGSITKAGDFLEANYMNLQRSYTVAIAGYALAQMGRLKGPLLNKFLTTAKDKNRWEDPGKQLYNVEATSYALLALLQLKDFDFVPPVVRWLNEQRYYGGGYGSTQATFMVFQALAQYQKDAPDHQELNLDVSLQLPSRSSKITHRIHWESASLLRSEETKENEGFTVTAEGKGQGTLSVVTMYHAKAKDQLTCNKFDLKVTIKPAPETEKRPQDAKNTMILEICTRYRGDQDATMSILDISMMTGFAPDTDDLKQLANGVDRYISKYELDKAFSDRNTLIIYLDKVSHSEDDCLAFKVHQYFNVELIQPGAVKVYAYYNLEESCTRFYHPEKEDGKLNKLCRDELCRCAEENCFIQKSDDKVTLEERLDKACEPGVDYVYKTRLVKVQLSNDFDEYIMAIEQTIKSGSDEVQVGQQRTFISPIKCREALKLEEKKHYLMWGLSSDFWGEKPNLSYIIGKDTWVEHWPEEDECQDEENQKQCQDLGAFTESMVVFGCPN

SEQ ID NO: 830 - protein, 204 aa, Homo sapiens
MEESVVRPSVFVVDGQTDIPFTRLGRSHRRQSCSVARDGPAGSWEQLIQERRSHEVNPAAHLTGANSSLTGSGGPLLWETQLGLAFLRGLSYHDGALVVTKAGYYYIYSKVQLGGVGCPLGLASTITHGLYKRTPRYPEELELLVSQQSPCGRATSSSRVWWDSSFLGGVVHLEAGEKVVVRVLDERLVRLRDGTRSYFGAFMV

SEQ ID NO: 831 - protein, 338 aa, Homo sapiens
MFQAFPGDYDSGSRCSSSPSAESQYLSSVDSFGSPPTAAASQECAGLGEMPGSFVPTVTAITTSQDLQWLVQPTLISSMAQSQGQPLASQPPVVDPYDMPGTSYSTPGMSGYSSGGASGSGGPSTSGTTSGPGPARPARARPRRPREETLTPEEEEKRRVRRERNKLAAAKCRNRRRELTDRLQAETDQLEEEKAELESEIAELQKEKERLEFVLVAHKPGCKIPYEEGPGPGPLAEVRDLPGSAPAKEDGFSWLLPPPPPPPLPFQTSQDAPPNLTASLFTHSEVQVLGDPFPVVNPSYTSSFVLTCPEVSAFAGAQRTSGSDQPSDPLNSPSLLAL

SEQ ID NO: 832 - protein, 545 aa, Homo sapiens
MGQVLPVFAHCKEAPSTASSTPDSTEGGNDDSDFRELHTAREFSEEDEEETTSQDWGTPRELTFSYIAFDGVVGSGGRRDSTARRPRPQGRSVSEPRDQHPQPSLGDSLESIPSLSQSPEPGRRGDPDTAPPSERPLEDLRLRLDHLGWVARGTGSGEDSSTSSSTPLEDEEPQEPNRLETGEAGEELDLRLRLAQPSSPEVLTPQLSPGSGTPQAGTPSPSRSRDSNSGPEEPLLEEEEKQWGPLEREPVRGQCLDSTDQLEFTVEPRLLGTAMEWLKTSLLLAVYKTVPILELSPPLWTAIGWVQRGPTPPTPVLRVLLKWAKSPRSSGVPSLSLGADMGSKVADLLYWKDTRTSGVVFTGLMVSLLCLLHFSIVSVAAHLALLLLCGTISLRVYRKVLQAVHRGDGANPFQAYLDVDLTLTREQTERLSHQITSRVVSAATQLRHFFLVEDLVDSLKLALLFYILTFVGAIFNGLTLLILGVIGLFTIPLLYRQHQAQIDQYVGLVTNQLSHIKAKIRAKIPGTGALASAAAAVSGSKAKAE

SEQ ID NO: 833 - protein, 1274 aa, Homo sapiens
MASGSGDSVTRRSVASQFFTQEEGPGIDGMTTSERVVDLLNQAALITNDSKITVLKQVQELIINKDPTLLDNFLDEIIAFQADKSIEVRKFVIGFIEEACKRDIELLLKLIANLNMLLRDENVNVVKKAILTMTQLYKVALQWMVKSRVISELQEACWDMVSAMAGDIILLLDSDNDGIRTHAIKFVEGLIVTLSPRMADSEIPRRQEHDISLDRIPRDHPYIQYNVLWEEGKAALEQLLKFMVHPAISSINLTTALGSLANIARQRPMFMSEVIQAYETLHANLPPTLAKSQVSSVRKNLKLHLLSVLKHPASLEFQAQITTLLVDLGTPQAEIARNMPSSKDTRKRPRDDSDSTLKKMKLEPNLGEDDEDKDLEPGPSGTSKASAQISGQSDTDITAEFLQPLLTPDNVANLVLISMVYLPEAMPASFQAIYTPVESAGTEAQIKHLARLMATQMTAAGLGPGVEQTKQCKEEPKEEKVVKTESVLIKRRLSAQGQAISVVGSLSSMSPLEEEAPQAKRRPEPIIPVTQPRLAGAGGRKKIFRLSDVLKPLTDAQVEAMKLGAVKRILRAEKAVACSGAAQVRIKILASLVTQFNSGLKAEVLSFILEDVRARLDLAFAWLYQEYNAYLAAGASGSLDKYEDCLIRLLSGLQEKPDQKDGIFTKVVLEAPLITESALEVVRKYCEDESRTYLGMSTLRDLIFKRPSRQFQYLHVLLDLSSHEKDKVRSQALLFIKRMYEKEQLREYVEKFALNYLQLLVHPNPPSVLFGADKDTEVAAPWTEETVKQCLYLYLALLPQNHKLIHELAAVYTEAIADIKRTVLRVIEQPIRGMGMNSPELLLLVENCPKGAETLVTRCLHSLTDKVPPSPELVKRVRDLYHKRLPDVRFLIPVLNGLEKKEVIQALPKLIKLNPIVVKEVFNRLLGTQHGEGNSALSPLNPGELLIALHNIDSVKCDMKSIIKATNLCFAERNVYTSEVLAVVMQQLMEQSPLPMLLMRTVIQSLTMYPRLGGFVMNILSRLIMKQVWKYPKVWEGFIKCCQRTKPQSFQVILQLPPQQLGAVFDKCPELREPLLAHVRSFTPHQQAHIPNSIMTILEASGKQEPEAKEAPAGPLEEDDLEPLTLAPAPAPRPPQDLIGLRLAQEKALKRQLEEEQKLKPGGVGAPSSSSPSPSPSARPGPPPSEEAMDFREEGPECETPGIFISMDDDSGLTEAALLDSSLEGPLPKETAAGGLTLKEERSPQTLAPVGEDAMKTPSPAAEDAREPEAKGNS

SEQ ID NO: 834 - protein, 1237 aa, Homo sapiens
MSVLTSPRGKVEVVHCRRTESQDVYCIKSLIRKFTCKLFGKLNIIYLLEKANLAVTLCNDKEEIMAQATFLDYPNWNVAKQDDWVSVFRELDSDIPCTPLNTLFMHLFVAVDEYSVGCCKEILRTVYKAVPELHFIFLIVPSYMSLGSTLITVFDQVGNIPCLTYEEDFAVHICHRHSHYPQLHVRKARVEDHDDLMPIFMRYDTILKETYGEYFLAELIEAQDEENHAVVCEVEGTAVGFMSVCSRVNMQLLHECFDLGPFHGLCFPHPDDVLESPQDLSVRRSQDAELRSSSQGSQKIVEELQEPVSPDTMENIQGNIAREAASEEALTAVQSGNVSEPEDIEKLSDISTGYAQYHHVSSRSLASLVLPEEPVHFRPIYRGASAAFCIQLFCIDEKYEARSLDFMNFVFSLFSDKNFCVISLPHLTPEFFLIQNFVKMVPFNTCTLEQDLYVFHRAGLLKSINIRFATLLDTPGVENLVSTLMLNKSILEDLDRYNKARKDPDGTLLQAFVAEVAEQIVGIAVIRNEMDIEYIRSHYNIEDFIYFSHHQREEHGHMHHFALNPIFRHYTKFFLKEILRLGFKSCLYYRVYPKSREGKFQNPYAHSLTSALHYLVPVRPRRQIVYPLEKLGINAPSKAVSKDPMSYALNHTNRKLTLEPKITVNAKIIVVGASSVGISFLETLVFCSHMKFNNLTLISTHGLPGKKLLDTEQRKFLASDHCFNDKDYALMSLCSWVNVVVGRMTGIDRAAKHVVLSTDEIVPYDHLILCTGQQYQVPCPTEADISQHLTNREVPNSSQRRYTGKVPCNHFTLNEEEDCFKALIWIRNNSITTEGNIIVYGNTIDTYTTVETLLNLGVSGSRIHLVQPPPASTITCINNYSVESAVADALGAAGVTMYRDAILAQWNDGLHPDPIYSASFTTPTKPFRLQCSMFFSFCEKNVDYETFKALNDACLVYDSRLVIDTNFHTNDIAIRAAGSLTKFSNRYYSNEWTHSNFSSKEIGFQLAAAMLHLFDPTLEPVTEPPANLDRLIPMYKGAKIQGGILPGSYHYLHIAKPAIPTPLEVQMAQPNYGLELVTGSAKNGTYFRIHINKYKMVETITCLSREPFPASNYIRLFGQHEQLLNNLCARYDENLITDLYSYFTEPWCLALFHDRFIDLRKELRQILASKEEEDLPSIEQLAHQIEDEEINPTEKPRQYLKRVFEESIYKTLVERSTLDYLHYNRYHLPMYAWPGIV

SEQ ID NO: 835 - protein, 580 aa, Homo sapiens
MEVPQPEPAPGSALSPAGVCGGAQRPGHLPGLLLGSHGLLGSPVRAAASSPVTTLTQTMHDLAGLGSETPKSQVGTLLFRSRSRLTHLSLSRRASESSLSSESSESSDAGLCMDSPSPMDPHMAEQTFEQAIQAASRIIRNEQFAIRRFQSMPVRLLGHSPVLRNITNSQAPDGRRKSEAGSGAASSSGEDKENDGFVFKMPWKPTHPSSTHALAEWASRREAFAQRPSSAPDLMCLSPDRKMEVEELSPLALGRFSLTPAEGDTEEDDGFVDILESDLKDDDAVPPGMESLISAPLVKTLEKEEEKDLVMYSKCQRLFRSPSMPCSVIRPILKRLERPQDRDTPVQNKRRRSVTPPEEQQEAEEPKARVLRSKSLCHDEIENLLDSDHRELIGDYSKAFLLQTVDGKHQDLKYISPETMVALLTGKFSNIVDKFVIVDCRYPYEYEGGHIKTAVNLPLERDAESFLLKSPIAPCSLDKRVILIFHCEFSSERGPRMCRFIRERDRAVNDYPSLYYPEMYILKGGYKEFFPQHPNFCEPQDYRPMNHEAFKDELKTFRLKTRSWAGERSRRELCSRLQDQ

SEQ ID NO: 836 - protein, 652 aa, Homo sapiens
MATSMGLLLLLLLLLTQPGAGTGADTEAVVCVGTACYTAHSGKLSAAEAQNHCNQNGGNLATVKSKEEAQHVQRVLAQLLRREAALTARMSKFWIGLQREKGKCLDPSLPLKGFSWVGGGEDTPYSNWHKELRNSCISKRCVSLLLDLSQPLLPSRLPKWSEGPCGSPGSPGSNIEGFVCKFSFKGMCRPLALGGPGQVTYTTPFQTTSSSLEAVPFASAANVACGEGDKDETQSHYFLCKEKAPDVFDWGSSGPLCVSPKYGCNFNNGGCHQDCFEGGDGSFLCGCRPGFRLLDDLVTCASRNPCSSSPCRGGATCVLGPHGKNYTCRCPQGYQLDSSQLDCVDVDECQDSPCAQECVNTPGGFRCECWVGYEPGGPGEGACQDVDECALGRSPCAQGCTNTDGSFHCSCEEGYVLAGEDGTQCQDVDECVGPGGPLCDSLCFNTQGSFHCGCLPGWVLAPNGVSCTMGPVSLGPPSGPPDEEDKGEKEGSTVPRAATASPTRGPEGTPKATPTTSRPSLSSDAPITSAPLKMLAPSGSPGVWREPSIHHATAASGPQEPAGGDSSVATQNNDGTDGQKLLLFYILGTVVAILLLLALALGLLVYRKRRAKREEKKEKKPQNAADSYSWVPERAESRAMENQYSPTPGTDC

SEQ ID NO: 837 - protein, 145 aa, Homo sapiens
MGIGCWRNPLLLLIALVLSAKLGHFQRWEGFQQKLMSKKNMNSTLNFFIQSYNNASNDTYLYRVQRLIRSQMQLTTGVEYIVTVKIGWTKCKRNDTSNSSCPLQSKKLRKSLICESLIYTMPWINYFQLWNNSCLEAEHVGRNLR

SEQ ID NO: 838 - protein, 349 aa, Homo sapiens
MAGGRCGPQLTALLAAWIAAVAATAGPEEAALPPEQSRVQPMTASNWTLVMEGEWMLKFYAPWCPSCQQTDSEWEAFAKNGEILQISVGKVDVIQEPGLSGRFFVTTLPAFFHAKDGIFRRYRGPGIFEDLQNYILEKKWQSVEPLTGWKSPASLTMSGMAGLFSISGKIWHLHNYFTVTLGIPAWCSYVFFVIATLVFGLFMGLVLVVISECFYVPLPRHLSERSEQNRRSEEAHRAEQLQDAEEEKDDSNEEENKDSLVDDEEEKEDLGDEDEAEEEEEEDNLAAGVDEERSEANDQGPPGEDGVTREEVEPEEAEEGISEQPCPADTEVVEDSLRQRKSQHADKGL

SEQ ID NO: 839 - protein, 1410 aa, Homo sapiens
MDIYDTQTLGVVVFGGFMVVSAIGIFLVSTFSMKETSYEEALANQRKEMAKTHHQKVEKKKKEKTVEKKGKTKKKEEKPNGKIPDHDPAPNVTVLLREPVRAPAVAVAPTPVQPPIIVAPVATVPAMPQEKLASSPKDKKKKEKKVAKVEPAVSSVVNSIQVLTSKAAILETAPKEVPMVVVPPVGAKGNTPATGTTQGKKAEGTQNQSKKAEGAPNQGRKAEGTPNQGKKTEGTPNQGKKAEGTPNQGKKAEGTPNQGKKAEGAQNQGKKVDTTPNQGKKVEGAPTQGRKAEGAQNQAKKVEGAQNQGKKAEGAQNQGKKGEGAQNQGKKAEGAQNQGKKAEGAQNQGKKAEGAQNQGKKAEGAQNQGKKAEGAQNQGKKAEGAQNQGKKVEGAQNQGKKAEGAQNQGKKAEGAQNQGKKAEGAQNQGKKAEGAQNQGKKAEGAQNQGKKAEGAQNQGKKAEGAQNQGKKVEGAQNQGKKAEGAQNQGKKAEGAQNQGKKAEGAQNQGQKGEGAQNQGKKTEGAQGKKAERSPNQGKKGEGAPIQGKKADSVANQGTKVEGITNQGKKAEGSPSEGKKAEGSPNQGKKADAAANQGKKTESASVQGRNTDVAQSPEAPKQEAPAKKKSGSKKKGEPGPPDADGPLYLPYKTLVSTVGSMVFNEGEAQRLIEILSEKAGIIQDTWHKATQKGDPVAILKRQLEEKEKLLATEQEDAAVAKSKLRELNKEMAAEKAKAAAGEAKVKKQLVAREQEITAVQARMQASYREHVKEVQQLQGKIRTLQEQLENGPNTQLARLQQENSILRDALNQATSQVESKQNAELAKLRQELSKVSKELVEKSEAVRQDEQQRKALEAKAAAFEKQVLQLQASHRESEEALQKRLDEVSRELCHTQSSHASLRADAEKAQEQQQQMAELHSKLQSSEAEVRSKCEELSGLHGQLQEARAENSQLTERIRSIEALLEAGQARDAQDVQASQAEADQQQTRLKELESQVSGLEKEAIELREAVEQQKVKNNDLREKNWKAMEALATAEQACKEKLLSLTQAKEESEKQLCLIEAQTMEALLALLPELSVLAQQNYTEWLQDLKEKGPTLLKHPPAPAEPSSDLASKLREAEETQSTLQAECDQYRSILAETEGMLRDLQKSVEEEEQVWRAKVGAAEEELQKSRVTVKHLEEIVEKLKGELESSDQVREHTSHLEAELEKHMAAASAECQNYAKEVAGLRQLLLESQSQLDAAKSEAQKQSDELALVRQQLSEMKSHVEDGDIAGAPASSPEAPPAEQDPVQLKTQLEWTEAILEDEQTQRQKLTAEFEEAQTSACRLQEELEKLRTAGPLESSETEEASQLKERLEKEKKLTSDLGRAATRLQELLKTTQEQLAREKDTVKKLQEQLEKAEDGSSSKEGTSV

SEQ ID NO: 840 - protein, 570 aa, Homo sapiens
MSRLEAKKPSLCKSEPLTTERVRTTLSVLKRIVTSCYGPSGRLKQLHNGFGGYVCTTSQSSALLSHLLVTHPILKILTASIQNHVSSFSDCGLFTAILCCNLIENVQRLGLTPTTVIRLNKHLLSLCISYLKSETCGCRIPVDFSSTQILLCLVRSILTSKPACMLTRKETEHVSALILRAFLLTIPENAEGHIILGKSLIVPLKGQRVIDSTVLPGILIEMSEVQLMRLLPIKKSTALKVALFCTTLSGDTSDTGEGTVVVSYGVSLENAVLDQLLNLGRQLISDHVDLVLCQKVIHPSLKQFLNMHRIIAIDRIGVTLMEPLTKMTGTQPIGSLGSICPNSYGSVKDVCTAKFGSKHFFHLIPNEATICSLLLCNRNDTAWDELKLTCQTALHVLQLTLKEPWALLGGGCTETHLAAYIRHKTHNDPESILKDDECTQTELQLIAEAFCSALESVVGSLEHDGGEILTDMKYGHLWSVQADSPCVANWPDLLSQCGCGLYNSQEELNWSFLRSTRRPFVPQSCLPHEAVGSASNLTLDCLTAKLSGLQVAVETANLILDLSYVIEDKN

SEQ ID NO: 841 - protein, 165 aa, Homo sapiens
MASGVQVADEVCRIFYDMKVRKCSTPEEIKKRKKAVIFCLSADKKCIIVEEGKEILVGDVGVTITDPFKHFVGMLPEKDCRYALYDASFETKESRKEELMFFLWAPELAPLKSKMIYASSKDAIKKKFQGIKHECQANGPEDLNRACIAEKLGGSLIVAFEGCPV

SEQ ID NO: 842 - protein, 307 aa, Homo sapiens
MPRSFLVKKIKGDGFQCSGVPAPTYHPLETAYVLPGARGPPGDNGYAPHRLPPSSYDADQKPGLELAPAEPAYPPAAPEEYSDPESPQSSLSARYFRGEAAVTDSYSMDAFFISDGRSRRRRGGGGGDAGGSGDAGGAGGRAGRAGAQAGGGHRHACAECGKTYATSSNLSRHKQTHRSLDSQLARKCPTCGKAYVSMPALAMHLLTHNLRHKCGVCGKAFSRPWLLQGHMRSHTGEKPFGCAHCGKAFADRSNLRAHMQTHSAFKHYRCRQCDKSFALKSYLHKHCEAACAKAAEPPPPTPAGPAS

SEQ ID NO: 843 - protein, 686 aa, Homo sapiens
KAGADIELGCSTPLMEASQEGHLELVKYLLASGANVHATTATGDTALTYACENGHTDVADVLLQAGADLDKQEDMKTILEGIDPAKHQEHESEGGRTPLMKAARAGHLCTVQFLISKGANVNRATANNDHTVVSLACAGGHLAVVELLLAHGADPTHRLKDGSTMLIEAAKGGHTNVVSYLLDYPNNVLSVPTTDVSQLPPPSQDQSQEPDRTSQENSPALLGVQKAVSTRVPTGSNSSSQTTECLTPESCSQTTSNVASQSMPPVYPSVDIDAHTESNHDTALTLACAGGHEELVSVLIARDAKIEHRDKKGFTPLILAATAGHVGVVEILLDKGGDIEAQSERTKDTPLSLACSGGRQEVVDLLLARGANKEHRNVSDYTPLSLAASGGYVNIIKILLNAGAEINSRTGSKLGISPLMLAAMNGHVPAVKLLLDMGSDINAQIETNRNTALTLACFQGRAEVVSLLLDRKANVEHRAKTGLTPLMEAASGGYAEVGRVLLDKGADVNAPPVPSSRDTALTIAADKGHYKFCELLIHRGAHIDVRNKKGNTPLWLASNGGHFDVVQLLVQAGADVDAADNRKITPLMSAFRKGHVKVVQYLVKEVNQFPSDIECMRYIATITDKELLKKCHQCVETIVKAKDQQAAEANKNASILLKELDLEKSREESRKQALAAKREKRKEKRK

SEQ ID NO: 844 - protein, 645 aa, Homo sapiens
MPRSRGGRAAPGPPPPPPPPGQAPRWSRWRVPGRLLLLLLPALCCLPGAARAAAAAAGAGNRAAVAVAVARADEAEAPFAGQNWLKSYGYLLPYDSRASALHSAKALQSAVSTMQQFYGIPVTGVLDQTTIEWMKKPRCGVPDHPHLSRRRRNKRYALTGQKWRQKHITYSIHNYTPKVGELDTRKAIRQAFDVWQKVTPLTFEEVPYHEIKSDRKEADIMIFFASGFHGDSSPFDGEGGFLAHAYFPGPGIGGDTHFDSDEPWTLGNANHDGNDLFLVAVHELGHALGLEHSSDPSAIMAPFYQYMETHNFKLPQDDLQGIQKIYGPPAEPLEPTRPLPTLPVRRIHSPSERKHERQPRPPRPPLGDRPSTPGTKPNICDGNFNTVALFRGEMFVFKDRWFWRLRNNRVQEGYPMQIEQFWKGLPARIDAAYERADGRFVFFKGDKYWVFKEVTVEPGYPHSLGELGSCLPREGIDTALRWEPVGKTYFFKGERYWRYSEERRATDPGYPKPITVWKGIPQAPQGAFISKEGYYTYFYKGRDYWKFDNQKLSVEPGYPRNILRDWMGCNQKEVERRKERRLPQDDVDIMVTINDVPGSVNAVAVVIPCILSLCILVLVYTIFQFKNKTGPQPVTYYKRPVQEWV

SEQ ID NO: 845 - protein, 149 aa, Homo sapiens
MLSGPHPSPTFRPNPCPWPCLHSLWMEISPTQLCFLSPGPSPQSPSCCFQGMNSGSELGKLWRKLFKGIPRLSVSHFDFYCGTCVLLGRPQIPQGSSLGNDIDQYPVVFRNASDQGSWMQLEMLLRKLSDLVWTSDALSDKILEDGLVP

SEQ ID NO: 846 - protein, 626 aa, Homo sapiens
MCEVLDIHNIDEQPRPLTDSHRVKFTKEIKGLKVEVTHCGTMRRKYRVCNVTRRPASHQTFPLQLENGQTVERTVAQYFREKYTLQLKYPHLPCLQVGQEQKHTYLPLEVCNIVAGQRCIKKLTDNQTSTMIKATARSAPDRQEEISRLVRSANYETDPFVQEFQFKVRDEMAHVTGRVLPAPMLQYGGRNRTVATPSHGVWDMRGKQFHTGVEIKMWAIACFATQRQCREEILKGFTDQLRKISKDAGMPIQGQPCFCKYAQGADSVEPMFRHLKNTYSGLQLIIVILPGKTPVYAEVKRVGDTLLGMATQCVQVKNVIKTSPQTLSNLCLKINVKLGGINNILVPHQRPSVFQQPVIFLGADVTHPPAGDGKKPSIAAVVGSMDAHPSRYCATVRVQRPRQEIIQDLASMVRELLIQFYKSTRFKPTRIIFYRDGVSEGQFRQVLYYELLAIREACISLEKDYQPGITYIVVQKRHHTRLFCADRTERVGRSGNIPAGTTVDTDITHPYEFDFYLCSHAGIQGTSRPSHYHVLWDDNCFTADELQLLTYQLCHTYVRCTRSVSIPAPAYYAHLVAFRARYHLVDKEHDSAEGSHVSGQSNGRDPQALAKAVQIHQDTLRTMYFA

SEQ ID NO: 847 - protein, 628 aa, Homo sapiens
MAILPLLLCLLPLAPASSPPQSATPSPCPRRCRCQTQSLPLSVLCPGAGLLFVPPSLDRRAAELRLADNFIASVRRRDLANMTGLLHLSLSRNTIRHVAAGAFADLRALRALHLDGNRLTSLGEGQLRGLVNLRHLILSNNQLAALAAGALDDCAETLEDLDLSYNNLEQLPWEALGRLGNVNTLGLDHNLLASVPAGAFSRLHKLARLDMTSNRLTTIPPDPLFSRLPLLARPRGSPASALVLAFGGNPLHCNCELVWLRRLAREDDLEACASPPALGGRYFWAVGEEEFVCEPPVVTHRSPPLAVPAGRPAALRCRAVGDPEPRVRWVSPQGRLLGNSSRARAFPNGTLELLVTEPGDGGIFTCIAANAAGEATAAVELTVGPPPPPQLANSTSCDPPRDGDPDALTPPSAASASAKVADTGPPTDRGVQVTEHGATAALVQWPDQRPIPGIRMYQIQYNSSADDILVYRMIPAESRSFLLTDLASGRTYDLCVLAVYEDSATGLTATRPVGCARFSTEPALRPCGAPHAPFLGGTMIIALGGVIVASVLVFIFVLLMRYKVHGGQPPGKAKIPAPVSSVCSQTNGALGPTPTPAPPAPEPAALRAHTVVQLDCEPWGPGHEPVGP

SEQ ID NO: 848 - protein, 355 aa, Homo sapiens
MGPGRCLLTALLLLALAPPPEASQYCGRLEYWNPDNKCCSSCLQRFGPPPCPDYEFRENCGLNDHGDFVTPPFRKCSSGQCNPDGAELCSPCGGGAVTPTPAAGGGRTPWRCRERPVPAKGHCPLTPGNPGAPSSQERSSPASSIAWRTPEPVPQQAWPNFLPLVVLVLLLTLAVIAILLFILLWHLCWPKEKADPYPYPGLVCGVPNTHTPSSSHLSSPGALETGDTWKEASLLPLLSRELSSLASQPLSRLLDELEVLEELIVLLDPEPGPGGGMAHGTTRHLAARYGLPAAWSTFAYSLRPSRSPLRALIEMVVAREPSASLGQLGTHLAQLGRADALRVLSKLGSSGVCWA

SEQ ID NO: 849 - protein, 378 aa, Homo sapiens
MDLGKPMKSVLVVALLVIFQVCLCQDEVTDDYIGDNTTVDYTLFESLCSKKDVRNFKAWFLPIMYSIICFVGLLGNGLVVLTYIYFKRLKTMTDTYLLNLAVADILFLLTLPFWAYSAAKSWVFGVHFCKLIFAIYKMSFFSGMLLLLCISIDRYVAIVQAVSAHRHRARVLLISKLSCVGIWILATVLSIPELLYSDLQRSSSEQAMRCSLITEHVEAFITIQVAQMVIGFLVPLLAMSFCYLVIIRTLLQARNFERNKAIKVIIAVVVVFIVFQLPYNGVVLAQTVANFNITSSTCELSKQLNIAYDVTYSLACVRCCVNPFLYAFIGVKFRNDLFKLFKDLGCLSQEQLRQWSSCRHIRRSSMSVEAETTTTFSP

SEQ ID NO: 850 - protein, 623 aa, Homo sapiens
MSCRQFSSSYLSRSGGGGGGGLGSGGSIRSSYSRFSSSGGGGGGGRFSSSSGYGGGSSRVCGRGGGGSFGYSYGGGSGGGFSASSLGGGFGGGSRGFGGASGGGYSSSGGFGGGFGGGSGGGFGGGYGSGFGGFGGFGGGAGGGDGGILTANEKSTMQELNSRLASYLDKVQALEEANNDLENKIQDWYDKKGPAAIQKNYSPYYNTIDDLKDQIVDLTVGNNKTLLDIDNTRMTLDDFRIKFEMEQNLRQGVDADINGLRQVLDNLTMEKSDLEMQYETLQEELMALKKNHKEEMSQLTGQNSGDVNVEINVAPGKDLTKTLNDMRQEYEQLIAKNRKDIENQYETQITQIEHEVSSSGQEVQSSAKEVTQLRHGVQELEIELQSQLSKKAALEKSLEDTKNRYCGQLQMIQEQISNLEAQITDVRQEIECQNQEYSLLLSIKMRLEKEIETYHNLLEGGQEDFESSGAGKIGLGGRGGSGGSYGRGSRGGSGGSYGGGGSGGGYGGGSGSRGGSGGSYGGGSGSGGGSGGGYGGGSGGGHSGGSGGGHSGGSGGNYGGGSGSGGGSGGGYGGGSGSRGGSGGSHGGGSGFGGESGGSYGGGEEASGSGGGYGGGSGKSSHS

SEQ ID NO: 851 - protein, 614 aa, Homo sapiens
MTTLDSNNNTGGVITYIGSSGSSPSRTSPESLYSDNSNGSFQSLTQGCPTYFPPSPTGSLTQDPARSFGSIPPSLSDDGSPSSSSSSSSSSSSFYNGSPPGSLQVAMEDSSRVSPSKSTSNITKLNGMVLLCKVCGDVASGFHYGVHACEGCKGFFRRSIQQNIQYKRCLKNENCSIVRINRNRCQQCRFKKCLSVGMSRDAVRFGRIPKREKQRMLAEMQSAMNLANNQLSSQCPLETSPTQHPTPGPMGPSPPPAPVPSPLVGFSQFPQQLTPPRSPSPEPTVEDVISQVARAHREIFTYAHDKLGSSPGNFNANHASGSPPATTPHRWENQGCPPAPNDNNTLAAQRHNEALNGLRQAPSSYPPTWPPGPAHHSCHQSNSNGHRLCPTHVYAAPEGKAPANSPRQGNSKNVLLACPMNMYPHGRSGRTVQEIWEDFSMSFTPAVREVVEFAKHIPGFRDLSQHDQVTLLKAGTFEVLMVRFASLFNVKDQTVMFLSRTTYSLQELGAMGMGDLLSAMFDFSEKLNSLALTEEELGLFTAVVLVSADRSGMENSASVEQLQETLLRALRALVLKNRPLETSRFTKLLLKLPDLRTLNNMHSEKLLSFRVDAQ

SEQ ID NO: 852 - protein, 592 aa, Homo sapiens
MASVVVKTIWQSKEIHEAGDTPTGVESCSQLVPEAPRRVTSRAKGIPKKKKAVSFHGVEPQMSHQPMHWCLNLKRSSACTNVSLLNLAAMEPTDSTGTDSTVEDLSGQLTLAGPPASPTLPWDPDDADITEILSGVNSGLVRAKDSITSLKEKTNRVNQHVQSLQSECSVLSENLERRRQEAEELEGYCIQLKENCWKVTRSVEDAEIKTNVLKQNSALLEEKLRYLQQQLQDETPRRQEAELQEPEEKQEPEEKQEPEEKQKPEAGLSWNSLGPAATSQGCPGPPGSPDKPSRPHGLVPAGWGMGPRAGEGPYVSEQELQKLFTGIEELRREVSSLTARWHQEEGAVQEALRLLGGLGGRVDGFLGQWERAQREQAQTARDLQELRGRADELCTMVERSAVSVASLRSELEGLGPLKPILEEFGRQFQNSRRGPDLSMNLDRSHQGNCARCASQGSQLSTESLQQLLDRALTSLVDEVKQRGLTPACPSCQRLHKKILELERQALAKHVRAEALSSTLRLAQDEALRAKNLLLTDKMKPEEKMATLDHLHLKMCSLHDHLSNLPLEGSTGTMGGGSSAGTPPKQGGSAPEQ

SEQ ID NO: 853 - protein, 674 aa, Homo sapiens
MVVAHPTATATTTPTATVTATVVMTTATMDLRDWLFLCYGLIAFLTEVIDSTTCPSVCRCDNGFIYCNDRGLTSIPADIPDDATTLYLQNNQINNAGIPQDLKTKVNVQVIYLYENDLDEFPINLPRSLRELHLQDNNVRTIARDSLARIPLLEKLHLDDNSVSTVSIEEDAFADSKQLKLLFLSRNHLSSIPSGLPHTLEELRLDDNRISTIPLHAFKGLNSLRRLVLDGNLLANQRIADDTFSRLQNLTELSLVRNSLAAPPLNLPSAHLQKLYLQDNAISHIPYNTLAKMRELERLDLSNNNLTTLPRGLFDDLGNLAQLLLRNNPWFCGCNLMWLRDWVKARAAVVNVRGLMCQGPEKVRGMAIKDITSEMDECFETGPQGGVANAAAKTTASNHASATTPQGSLFTLKAKRPGLRLPDSNIDYPMATGDGAKTLAIHVKALTADSIRITWKATLPASSFRLSWLRLGHSPAVGSITETLVQGDKTEYLLTALEPKSTYIICMVTMETSNAYVADETPVCAKAETADSYGPTTTLNQEQNAGPMASLPLAGIIGGAVALVFLFLVLGAICWYVHQAGELLTRERAYNRGSRKKDDYMESGTKKDNSILEIRGPGLQMLPINPYRAKEEYVVHTIFPSNGSSLCKATHTIGYGTTRGYRDGGIPDIDYSYT

SEQ ID NO: 854 - protein, 250 aa, Homo sapiens
MSIFTPTNQIRLTNVAVVRMKRAGKRFEIACYKNKVVGWRSGVEKDLDEVLQTHSVFVNVSKGQVAKKEDLISAFGTDDQTEICKQILTKGEVQVSDKERHTQLEQMFRDIATIVADKCVNPETKRPYTVILIERAMKDIHYSVKTNKSTKQQALEVIKQLKEKMKIERAHMRLRFILPVNEGKKLKEKLKPLIKVIESEDYGQQLEIVCLIDPGCFREIDELIKKETKGKGSLEVLNLKDVEEGDEKFE

SEQ ID NO: 855 - protein, 185 aa, Homo sapiens
MRLLILTCLVAVALARPKLPLRYPERLQNPSESSEPIPLESREEYMNGMNRQRNILREKQTDEIKDTRNESTQNCVVAEPEKMESSISSSSEEMSLSKCAEQFCRLNEYNQLQLQAAHAQEQIRRMNENSHVQVPFQQLNQLAAYPYAVWYYPQIMQYVPFPPFSDISNPTAHENYEKNNVMLQW

SEQ ID NO: 856 - protein, 298 aa, Homo sapiens
MTEPGASPEDPWVKASPVGAHAGEGRAGRARARRGAGRRGASLLSPKSPTLSVPRGCREDSSHPACAKVEYAYSDNSLDPGLFVESTRKGSVVSRANSIGSTSASSVPNTDDEDSDYHQEAYKESYKDRRRRAHTQAEQKRRDAIKRGYDDLQTIVPTCQQQDFSIGSQKLSKAIVLQKTIDYIQFLHKEKKKQEEEVSTLRKDVTALKIMKVNYEQIVKAHQDNPHEGEDQVSDQVKFNVFQGIMDSLFQSFNASISVASFQELSACVFSWIEEHCKPQTLREIVIGVLHQLKNQLY

SEQ ID NO: 857 - protein, 1243 aa, Homo sapiens
MLASPATETTVLMSQTEADLALRPPPPLGTAGQPRLGPPPRRARRFSGKAEPRPRSSRLSRRSSVDLGLLSSWSLPASPAPDPPDPPDSAGPGPARSPPPSSKEPPEGTWTEGAPVKAAEDSARPELPDSAVGPGSREPLRVPEAVALERRREQEEKEDMETQAVATSPDGRYLKFDIEIGRGSFKTVYRGLDTDTTVEVAWCELQTRKLSRAERQRFSEEVEMLKGLQHPNIVRFYDSWKSVLRGQVCIVLVTELMTSGTLKTYLRRFREMKPRVLQRWSRQILRGLHFLHSRVPPILHRDLKCDNVFITGPTGSVKIGDLGLATLKRASFAKSVIGTPEFMAPEMYEEKYDEAVDVYAFGMCMLEMATSEYPYSECQNAAQIYRKVTSGRKPNSFHKVKIPEVKEIIEGCIRTDKNERFTIQDLLAHAFFREERGVHVELAEEDDGEKPGLKLWLRMEDARRGGRPRDNQAIEFLFQLGRDAAEEVAQEMVALGLVCEADYQPVARAVRERVAAIQRKREKLRKARELEALPPEPGPPPATVPMAPGPPSVFPPEPEEPEADQHQPFLFRHASYSSTTSDCETDGYLSSSGFLDASDPALQPPGGVPSSLAESHLCLPSAFALSIPRSGPGSDFSPGDSYASDAASGLSDVGEGMGQMRRPPGRNLRRRPRSRLRVTSVSDQNDRVVECQLQTHNSKMVTFRFDLDGDSPEEIAAAMVYNEFILPSERDGFLRRIREIIQRVETLLKRDTGPMEAAEDTLSPQEEPAPLPALPVPLPDPSNEELQSSTSLEHRSWTAFSTSSSSPGTPLSPGNPFSPGTPISPGPIFPITSPPCHPSPSPFSPISSQVSSNPSPHPTSSPLPFSSSTPEFPVPLSQCPWSSLPTTSPPTFSPTCSQVTLSSPFFPPCPSTSSFPSTTAAPLLSLASAFSLAVMTVAQSLLSPSPGLLSQSPPAPPSPLPSLPLPPPVAPGGQESPSPHTAEVESEASPPPARPLPGEARLAPISEEGKPQLVGRFQVTSSKEPAEPLPLQPTSPTLSGSPKPSTPQLTSESSDTEDSAGGGPETREALAESDRAAEGLGAGVEEEGDDGKEPQVGGSPQPLSHPSPVWMNYSYSSLCLSSEESESSGEDEEFWAELQSLRQKHLSEVETLQTLQKKEIEDLYSRLGKQPPPGIVAPAAMLSSRQRRLSKGSFPTSRRNSLQRSEPPGPGIMRRNSLSGSSTGSQEQRASKGVTFAGDVGRM

SEQ ID NO: 858 - protein, 282 aa, Homo sapiens [sequence omitted]

SEQ ID NO: 859 - protein, 704 aa, Homo sapiens
MARELRALLLWGRRLRPLLRAPALAAVPGGKPILCPRRTTAQLGPRRNPAWSLQAGRLFSTQTAEDKEEPLHSIISSTESVQGSTSKHEFQAETKKLLDIVARSLYSEKEVFIRELISNASDALEKLRHKLVSDGQALPEMEIHLQTNAEKGTITIQDTGIGMTQEELVSNLGTIARSGSKAFLDALQNQAEASSKIIGQFGVGFYSAFMVADRVEVYSRSAAPGSLGYQWLSDGSGVFEIAEASGVRTGTKIIIHLKSDCKEFSSEARVRDVVTKYSNFVSFPLYLNGRRMNTLQAIWMMDPKDVREWQHEEFYRYVAQAHDKPRYTLHYKTDAPLNIRSIFYVPDMKPSMFDVSRELGSSVALYSRKVLIQTKATDILPKWLRFIRGVVDSEDIPLNLSRELLQESALIRKLRDVLQQRLIKFFIDQSKKDAEKYAKFFEDYGLFMREGIVTATEQEVKEDIAKLLRYESSALPSGQLTSLSEYASRMRAGTRNIYYLCAPNRHLAEHSPYYEAMKKKDTEVLFCFEQFDELTLLHLREFDKKKLISVETDIVVDHYKEEKFEDRSPAAECLSEKETEELMAWMRNVLGSRVTNVKVTLRLDTHPAMVTVLEMGAARHFLRMQQLAKTQEERAQLLQPTLEINPRHALIKKLNQLRASEPGLAQLLVDQIYENAMIAAGLVDDPRAMVGRLNELLVKALERH

SEQ ID NO: 860 - protein, 372 aa, Homo sapiens
MPPPQQGPCGHHLLLLLALLLPSLPLTRAPVPPGPAAALLQALGLRDEPQGAPRLRPVPPVMWRLFRRRDPQETRSGSRRTSPGVTLQPCHVEELGVAGNIVRHIPDRGAPTRASEPASAAGHCPEWTVVFDLSAVEPAERPSRARLELRFAAAAAAAPEGGWELSVAQAGQGAGADPGPVLLRQLVPALGPPVRAELLGAAWARNASWPRSLRLALALRPRAPAACARLAEASLLLVTLDPRLCHPLARPRRDAEPVLGGGPGGACRARRLYVSFREVGWHRWVIAPRGFLANYCQGQCALPVALSGSGGPPALNHAVLRALMHAAAPGAADLPCCVPARLSPISVLFFDNSDNVVLRQYEDMVVDECGCR

SEQ ID NO: 861 - protein, 558 aa, Homo sapiens
MAIPGRQYGLILPKKTQQLHPVLQKPSVFGNDSDDDDETSVSESLQREAAKKQAMKQTKLEIQKALAEDATVYEYDSIYDEMQKKKEENNPKLLLGKDRKPKYIHNLLKAVEIRKKEQEKRMEKKIQREREMEKGEFDDKEAFVTSAYKKKLQERAEEEEREKRAAALEACLDVTKQKDLSGFYRHLLNQAVGEEEVPKCSFREARSGIKEEKSRGFSNEVSSKNRIPQEKCILQTDVKVEENPDADSDFDAKSSADDEIEETRVNCRREKVIETPENDFKHHRSQNHSRSPSEERGHSTRHHTKGSRTSRGHEKREDQHQQKQSRDQENHYTDRDYRKERDSHRHREASHRDSHWKRHEQEDKPRARDQRERSDRVWKREKDREKYSQREQERDRQQNDQNRPSEKGEKEEKSKAKEEHMKVRKERYENNDKYRDREKREVGVQSSERNQDRKESSPNSRAKDKFLDQERSNKMRNMAKDKERNQEKPSNSESSLGAKHRLTEEGQEKGKEQERPPEAVSKFAKRNNEETVMSARDRYLARQMARVNAKTYIEKEDD

SEQ ID NO: 862 - protein, 1603 aa, Homo sapiens
MRVKPQGLVVTSSAVCSSPDYLREPKYYPGGPPTPRPLLPTRPPASPPDKAFSTHAFSENPRPPPRRDPSTRRPPVLAKGDDPLPPRAARPVSQARCPTPVGDGSSSRRCWDNGRVNLRPVVQLIDIMKDLTRLSQDLQHSGVHLDCGGLRLSRPPAPPPGDLQYSFFSSPSLANSIRSPEERATPHAKSERPSHPLYEPEPEPRDSPQPGQGHSPGATAAATGLPPEPEPDSTDYSELADADILSELASLTCPEAQLLEAQALEPPSPEPEPQLLDPQPRFLDPQALEPLGEALELPPLQPLADPLGLPGLALQALDTLPDSLESQLLDPQALDPLPKLLDVPGRRLEPQQPLGHCPLAEPLRLDLCSPHGPPGPEGHPKYALRRTDRPKILCRRRKAGRGRKADAGPEGRLLPLPMPTGLVAALAEPPPPPPPPPPALPGPGPVSVPELKPESSQTPVVSTRKGKCRGVRRMVVKMAKIPVSLGRRNKTTYKVSSLSSSLSVEGKELGLRVSAEPTPLLKMKNNGRNVVVVFPPGEMPIILKRKRGRPPKNLLLGPGKPKEPAVVAAEAATVAAATMAMPEVKKRRRRKQKLASPQPSYAADANDSKAEYSDVLAKLAFLNRQSQCAGRCSPPRCWTPSEPESVHQAPDTQSISHFLHRVQGFRRRGGKAGGFGGRGGGHAAKSARCSFSDFFEGIGKKKKVVAVAAAGVGGPGLTELGHPRKRGRGEVDAVTGKPKRKRRSRKNGTLFPEQVPSGPGFGEAGAEWAGDKGGGWAPHHGHPGGQAGRNCGFQGTEARAFASTGLESGASGRGSYYSTGAPSGQTELSQERQNLFTGYFRSLLDSDDSSDLLDFALSASRPESRKASGTYAGPPTSALPAQRGLATFPSRGAKASPVAVGSSGAGADPSFQPVLSARQTFPPGRAASYGLTPAASDCRAAETFPKLVPPPSAMARSPTTHPPANTYLPQYGGYGAGQSVFAPTKPFTGQDCANSKDCSFAYGSGNSLPASPSSAHSAGYAPPPTGGPCLPPSKASFFSSSEGAPFSGSAPTPLRCDSRASTVSPGGYMVPKGTTASATSAASAASSSSSSFQPSPENCRQFAGASQWPFRQGYGGLDWASEAFSQLYNPSFDCHVSEPNVILDISNYTPQKVKQQTAVSETFSESSSDSTQFNQPVGGGGFRRANSEASSSEGQSSLSSLEKLMMDWNEASSAPGYNWNQSVLFQSSSKPGRGRRKKVDLFEASHLGFPTSASAAASGYPSKRSTGPRQPRGGRGGGACSAKKERGGAAAKAKFIPKPQPVNPLFQDSPDLGLDYYSGDSSMSPLPSQSRAFGVGERDPCDFIGPYSMNPSTPSDGTFGQGFHCDSPSLGAPELDGKHFPPLAHPPTVFDAGLQKAYSPTCSPTLGFKEELRPPPTKLAACEPLKHGLQGASLGHAAAAQAHLSCRDLPLGQPHYDSPSCKGTAYWYPPGSAARSPPYEGKVGTGLLADFLGRTEAACLSAPHLASPPATPKADKEPLEMARPPGPPRGPAAAAAGYGCPLLSDLTLSPVPRDSLLPLQDTAYRYPGFMPQAHPGLGGGPKSGFLGPMAEPHPEDTFTVTSL

SEQ ID NO: 863 - protein, 396 aa, Homo sapiens
MAAVGAGGSTAAPGPGAVSAGALEPGTASAAHRRLKYISLAVLVVQNASLILSIRYARTLPGDRFFATTAVVMAEVLKGLTCLLLLFAQKRGNVKHLVLFLHEAVLVQYVDTLKLAVPSLIYTLQNNLQYVAISNLPAATFQVTYQLKILTTALFSVLMLNRSLSRLQWASLLLLFTGVAIVQAQQAGGGGPRPLDQNPGAGLAAVVASCLSSGFAGVYFEKILKGSSGSVWLRNLQLGLFGTALGLVGLWWAEGTAVATRGFFFGYTPAVWGVVLNQAFGGLLVAVVVKYADNILKGFATSLSIVLSTVASIRLFGFHVDPLFALGAGLVIGAVYLYSLPRGAAKAIASASASASGPCVHQQPPGQPPPPQLSSHRGDLITEPFLPKLLTKVKGS

SEQ ID NO: 864 - protein, 469 aa, Homo sapiens
MITEGAQAPRLLLPPLLLLLTLPATGSDPVLCFTQYEESSGKCKGLLGGGVSVEDCCLNTAFAYQKRSGGLCQPCRSPRWSLWSTWAPCSVTCSEGSQLRYRRCVGWNGQCSGKVAPGTLEWQLQACEDQQCCPEMGGWSGWGPWEPCSVTCSKGTRTRRRACNHPAPKCGGHCPGQAQESEACDTQQVCPTHGAWATWGPWTPCSASCHGGPHEPKETRSRKCSAPEPSQKPPGKPCPGLAYEQRRCTGLPPCPVAGGWGPWGPVSPCPVTCGLGQTMEQRTCNHPVPQHGGPFCAGDATRTHICNTAVPCPVDGEWDSWGEWSPCIRRNMKSISCQEIPGQQSRGRTCRGRKFDGHRCAGQQQDIRHCYSIQHCPLKGSWSEWSTWGLCMPPCGPNPTRARQRLCTPLLPKYPPTVSMVEGQGEKNVTFWGRPLPRCEELQGQKLVVEEKRPCLHVPACKDPEEEEL

SEQ ID NO: 865 - protein, 375 aa, Homo sapiens
MASAPWPERVPRLLAPRLPSYPPPPPTVGLRSMEQEETYLELYLDQCAAQDGLAPPRSPLFSPVVPYDMYILNASNPDTAFNSNPEVKETSGDFSSVDLSFLPDEVTQENKDQPVISKHETEENSESQSPQSRLPSPSEQDVGLGLNSSSLSNSHSQLHPGDTDSVQPSPEKPNSDSLSLASITPMTPMTPISECCGIVPQLQNIVSTVNLACKLDLKKIALHAKNAEYNPKRFAAVIMRIREPRTTALIFSSGKMVCTGAKSEEQSRLAARKYARVVQKLGFPARFLDFKIQNMVGSCDVRFPIRLEGLVLTHQQFSSYEPELFPGLIYRMVKPRIVLLIFVSGKVVLTGAKERSEIYEAFENIYPILKGFKKA

SEQ ID NO: 866 - protein, 441 aa, Homo sapiens
MSLRQRLAQLVGRLQDPQKVARFQRLCGVEAPPRRSADRREDEKAEAPLAGDPRLRGRQPGAPGGPQPPGSDRNQCPAKPDGGGAPNGVRNGLAAELGPASPRRAGALRRNSLTGEEGQLARVSNWPLYCLFCFGTELGNELFYILFFPFWIWNLDPLVGRRLVVIWVLVMYLGQCTKDIIRWPRPASPPVVKLEVFYNSEYSMPSTHAMSGTAIPISMVLLTYGRWQYPLIYGLILIPCWCSLVCLSRIYMGMHSILDIIAGFLYTILILAVFYPFVDLIDNFNQTHKYAPFIIIGLHLALGIFSFTLDTWSTSRGDTAEILGSGAGIACGSHVTYNMGLVLDPSLDTLPLAGPPITVTLFGKAILRILIGMVFVLIIRDVMKKITIPLACKIFNIPCDDIRKARQHMEVELPYRYITYGMVGFSITFFVPYIFFFIGIS

SEQ ID NO: 867 - protein, 1219 aa, Homo sapiens
MPVSTSLHQDGSQERPVSLTSTTSSSGSSCDSRSAMEEPSSSEAPAKNGAGSLRSRHLPNSNNNSSSWLNVKGPLSPFNSRAAAGPAHHKLSYLGRVVREIVETERMYVQDLRSIVEDYLLKIIDTPGLLKPEQVSALFGNIENIYALNSQLLRDLDSCNSDPVAVASCFVERSQEFDIYTQYCNNYPNSVAALTECMRDKQQAKFFRDRQELLQHSLPLGSYLLKPVQRILKYHLLLQEIAKHFDEEEDGFEVVEDAIDTMTCVAWYINDMKRRHEHAVRLQEIQSLLINWKGPDLTTYGELVLEGTFRVHRVRNERTFFLFDKTLLITKKRGDHFVYKGNIPCSSLMLIESTRDSLCFTVTHYKHSKQQYSIQAKTVEEKRNWTHHIKRLILENHHATIPQKAKEAILEMDSYYPNRYRCSPERLKKAWSSQDEVSTNVRQGRRQSEPTKHLLRQLNEKARAAGMKGKGRRESESSRSSRRPSGRSPTSTEKRMSFESISSLPEVEPDPEAGSEQEVFSAVEGPSAEETPSDTESPEVLETQLDAHQGLLGMDPPGDMVDFVAAESTEDLKALSSEEEEEMGGAAQEPESLLPPSVLDQASVIAERFVSSFSRRSSVAQEDSKSSGFGSPRLVSRSSSVLSLEGSEKGLARHGSATDSLSCQLSPEVDISVGVATEDSPSVNGMEPPSPGCPVEPDRSSCKKKESALSTRDRLLLDKIKSYYENAEHHDAGFSVRRRESLSYIPKGLVRNSISRFNSLPRPDPEPVPPVGSKRQVGSRPTSWALFELPGPSQAVKGDPPPISDAEFRPSSEIVKIWEGMESSGGSPGKGPGQGQANGFDLHEPLFILEEHELGAITEESATASPESSSPTEGRSPAHLARELKELVKELSSSTQGELVAPLHPRIVQLSHVMDSHVSERVKNKVYQLARQYSLRIKSNKPVMARPPLQWEKVAPERDGKSPTVPCLQEEAGEPLGGKGKRKPVLSLFDYEQLMAQEHSPPKPSSAGEMSPQRFFFNPSAVSQRTTSPGGRPSARSPLSPTETFSWPDVRELCSKYASRDEARRAGGGRPRGPPVNRSHSVPENMVEPPLSGRVGRCRSLSTKRGRGGGEAAQSPGPLPQSKPDGGETLYVTADLTLEDNRRVIVMEKGPLPSPTAGLEESSGQGPSSPVALLGQVQDFQQSAECQPKEEGSRDPADPSQQGRVRNLREKFQALNSVG

SEQ ID NO: 868 - protein, 259 aa, Homo sapiens
MLLRSWFGNKDFQALPILARLPSMPTDMEHTGHYLHLAFLMTTVFSLSPGTKANYTRLWANSTSSWDSVIQNKTGRNQNENINTNPITPEVDYKGNSTNMPETSHIVALTSKSEQELYIPSVVSNSPSTVQSIENTSKSHGEIFKKDVCAENNNNMAMLICLIIIAVLFLICTFLFLSTVVLANKVSSLRRSKQVGKRQPRSNGDFLASGLWPAESDTWKRTKQLTGPNLVMQSTGVLTATRERKDEEGTEKLTNKQIG

SEQ ID NO: 869 - protein, 440 aa, Homo sapiens
MEYQILKMSLCLFILLFLTPGILCICPLQCICTERHRHVDCSGRNLSTLPSGLQENIIHLNLSYNHFTDLHNQLTQYTNLRTLDISNNRLESLPAHLPRSLWNMSAANNNIKLLDKSDTAYQWNLKYLDVSKNMLEKVVLIKNTLRSLEVLNLSSNKLWTVPTNMPSKLHIVDLSNNSLTQILPGTLINLTNLTHLYLHNNKFTFIPDQSFDQLFQLQEITLYNNRWSCDHKQNITYLLKWMMETKAHVIGTPCSTQISSLKEHNMYPTPSGFTSSLFTVSGMQTVDTINSLSVVTQPKVTKIPKQYRTKETTFGATLSKDTTFTSTDKAFVPYPEDTSTETINSHEAAAATLTIHLQDGMVTNTSLTSSTKSSPTPMTLSITSGMPNNFSEMPQQSTTLNLWREETTTNVKTPLPSVANAWKVNASFLLLLNVVVMLAV

SEQ ID NO: 870 - protein, 210 aa, Homo sapiens
MQAEGRGTGGSTGDADGPGGPGIPDGPGGNAGGPGEAGATGGRGPRGAGAARASGPRGGAPRGPHGGAASAQDGRCPCGARRPDSRLLELHITMPFSSPMEAELVRRILSRDAAPLPRPGAVLKDFTVSGNLLFMSVRDQDREGAGRMRVVGWGLGSASPEGQKARDLRTPKHKVSEQRPGTPGPPPPEGAQGDGCRGVAFNVMFSAPHI

SEQ ID NO: 871 - protein, 501 aa, Homo sapiens
MAAASVTPPGSLELLQPGFSKTLLGTKLEAKYLCSACRNVLRRPFQAQCGHRYCSFCLASILSSGPQNCAACVHEGIYEEGISILESSSAFPDNAARREVESLPAVCPSDGCTWKGTLKEYESCHEGRCPLMLTECPACKGLVRLGEKERHLEHECPERSLSCRHCRAPCCGADVKAHHEVCPKFPLTCDGCGKKKIPREKFQDHVKTCGKCRVPCRFHAIGCLETVEGEKQQEHEVQWLREHLAMLLSSVLEAKPLLGDQSHAGSELLQRCESLEKKTATFENIVCVLNREVERVAMTAEACSRQHRLDQDKIEALSSKVQQLERSIGLKDLAMADLEQKVLEMEASTYDGVFIWKISDFARKRQEAVAGRIPAIFSPAFYTSRYGYKMCLRIYLNGDGTGRGTHLSLFFVVMKGPNDALLRWPFNQKVTLMLLDQNNREHVIDAFRPDVTSSSFQRPVNDMNIASGCPLFCPVSKMEAKNSYVRDDAIFIKAIVDLTGL

SEQ ID NO: 872 - protein, 757 aa, Homo sapiens [sequence omitted]

SEQ ID NO: 873 - protein, 1087 aa, Homo sapiens
MARSSPYLRQLQGPLLPPRDLVEEDDDYLNDDVEEDEESVFIDAEELCSGGVKAGSLPGCLRVSICDENTQETCKVFGRFPITGAWWRVKVQVKPVVGSRSYQYQVQGFPSYFLQSDMSPPNQKHICALFLKECEVSSDDVNKFLTWVKEVSNYKNLNFENLRETLRTFHKETGRKDQKQPTQNGQEELFLDNEMSLPLENTIPFRNVMTALQFPKIMEFLPVLLPRHFKWIIGSGSKEMLKEIEEILGTHPWKLGFSKITYREWKLLRCEASWIAFCQCESLLQLMTDLEKNALIMYSRLKQICREDGHTYVEVNDLTLTLSNHMSFHAASESLKFLKDIGVVTYEKSCVFPYDLYHAERAIAFSICDLMKKPPWHLCVDVEKVLASIHTTKPENSSDDALNESKPDEVRLENPVDVVDTQDNGDHIWTNGENEINAEISEVQLDQDQVEVPLDRDQVAALEMICSNPVTVISGKGGCGKTTIVSRLFKHIEQLEEREVKKACEDFEQDQNASEEWITFTEQSQLEADKAIEVLLTAPTGKAAGLLRQKTGLHAYTLCQVNYSFYSWTQTMMTTNKPWKFSSVRVLVVDEGSLVSVGIFKSVLNLLCEHSKLSKLIILGDIRQLPSIEPGNLLKDLFETLKSRNCAIELKTNHRAESQLIVDNATRISRRQFPKFDAELNISDNPTLPISIQDKTFIFVRLPEEDASSQSSKTNHHSCLYSAVKTLLQENNLQNAKTSQFIAFRRQDCDLINDCCCKHYTGHLTKDHQSRLVFGIGDKICCTRNAYLSDLLPENISGSQQNNDLDASSEDFSGTLPDFAKNKRDFESNVRLCNGEIFFITNDVTDVTFGKRRSLTINNMAGLEVTVDFKKLMKYCRIKHAWARTIHTFQGSEEQTVVYVVGKAGRQHWQHVYTAVTRGRCRVYVIAEESQLRNAIMKNSFPRKTRLKHFLQSKLSSSGAPPADFPSPRKSSGDSGGPSTPSASPLPVVTDHAMTNDVTWSEASSPDERTLTFAERWQLSSPDGVDTDDDLPKSRASKRTCGVNDDESPSKIFMVGESPQVSSRLQNLRLNNLIPRQLFKPTDNQET

SEQ ID NO: 874 - protein, 237 aa, Homo sapiens
MAGVSACIKYSMFTFNFLFWLCGILILALAIWVRVSNDSQAIFGSEDVGSSSYVAVDILIAVGAIIMILGFLGCCGAIKESRCMLLLFFIGLLLILLLQVATGILGAVFKSKSDRIVNETLYENTKLLSATGESEKQFQEAIIVFQEEFKCCGLVNGAADWGNNFQHYPELCACLDKQRPCQSYNGKQVYKETCISFIKDFLAKNLIIVIGISFGLAVIEILGLVFSMVLYCQIGNK

SEQ ID NO: 875 - protein, 460 aa, Homo sapiens
MANDPLEGFHEVNLASPTSPDLLGVYESGTQEQTTSPSVIYRPHPSALSSVPIQANALDVSELPTQPVYSSPRRLNCAEISSISFHVTDPAPCSTSGVTAGLTKLTTRKDNYNAEREFLQGATITEACDGSDDIFGLSTDSLSRLRSPSVLEVREKGYERLKEELAKAQRELKLKDEECERLSKVRDQLGQELEELTASLFEEAHKMVREANIKQATAEKQLKEAQGKIDVLQAEVAALKTLVLSSSPTSPTQEPLPGGKTPFKKGHTRNKSTSSAMSGSHQDLSVIQPIVKDCKEADLSLYNEFRLWKDEPTMDRTCPFLDKIYQEDIFPCLTFSKSELASAVLEAVENNTLSIEPVGLQPIRFVKASAVECGGPKKCALTGQSKSCKHRIKLGDSSNYYYISPFCRYRITSVCNFFTYIRYIQQGLVKQQDVDQMFWEVMQLRKEMSLAKLGYFKEEL

SEQ ID NO: 876 - protein, 831 aa, Homo sapiens
MENQRSSPLSFPSVPQEETLRQAPAGLPRETLFQSRVLPPKEIPSLSPTIPRQGSLPQTSSAPKQETSGRMPHVLQKGPSLLCSAASEQETSLQGPLASQEGTQYPPPAAAEQEVSLLSHSPHHQEAPVHSPEAPEKDPLTLSPTVPETDMDPLLQSPVSQKDTPFQISSAVQKEQPLPTAEITRLAVWAAVQAVERKLEAQAMRLLTLEGRTGTNEKKIADCEKTAVEFANHLESKWVVLGTLLQEYGLLQRRLENMENLLKNRNFWILRLPPGSNGEVPKVPVTFDDVAVHFSEQEWGNLSEWQKELYKNVMRGNYESLVSMDYAISKPDLMSQMERGERPTMQEQEDSEEGETPTDPSAAHDGIVIKIEVQTNDEGSESLETPEPLMGQVEEHGFQDSELGDPCGEQPDLDMQEPENTLEESTEGSSEFSELKQMLVQQRNCTEGIVIKTEEQDEEEEEEEEDELPQHLQSLGQLSGRYEASMYQTPLPGEMSPEGEESPPPLQLGNPAVKRLAPSVHGERHLSENRGASSQQQRNRRGERPFTCMECGKSFRLKINLIIHQRNHIKEGPYECAECEISFRHKQQLTLHQRIHRVRGGCVSPERGPTFNPKHALKPRPKSPSSGSGGGGPKPYKCPECDSSFSHKSSLTKHQITHTGERPYTCPECKKSFRLHISLVIHQRVHAGKHEVSFICSLCGKSFSRPSHLLRHQRTHTGERPFKCPECEKSFSEKSKLTNHCRVHSRERPHACPECGKSFIRKHHLLEHRRIHTGERPYHCAECGKRFTQKHHLLEHQRAHTGERPYPCTHCAKCFRYKQSLKYHLRTHTGE

SEQ ID NO: 877 - protein, 653 aa, Homo sapiens
MRPLRPRAALLALLASLLAAPPVAPAEAPHLVHVDAARALWPLRRFWRSTGFCPPLPHSQADQYVLSWDQQLNLAYVGAVPHRGIKQVRTHWLLELVTTRGSTGRGLSYNFTHLDGYLDLLRENQLLPGFELMGSASGHFTDFEDKQQVFEWKDLVSSLARRYIGRYGLAHVSKWNFETWNEPDHHDFDNVSMTMQGFLNYYDACSEGLRAASPALRLGGPGDSFHTPPRSPLSWGLLRHCHDGTNFFTGEAGVRLDYISLHRKGARSSISILEQEKVVAQQIRQLFPKFADTPIYNDEADPLVGWSLPQPWRADVTYAAMVVKVIAQHQNLLLANTTSAFPYALLSNDNAFLSYHPHPFAQRTLTARFQVNNTRPPHVQLLRKPVLTAMGLLALLDEEQLWAEVSQAGTVLDSNHTVGVLASAHRPQGPADAWRAAVLIYASDDTRAHPNRSVAVTLRLRGVPPGPGLVYVTRYLDNGLCSPDGEWRRLGRPVFPTAEQFRRMRAAEDPVAAAPRPLPAGGRLTLRPALRLPSLLLVHVCARPEKPPGQVTRLRALPLTQGQLVLVWSDEHVGSKCLWTYEIQFSQDGKAYTPVSRKPSTFNLFVFSPDTGAVSGSYRVRALDYWARPGPFSDPVPYLEVPVPRGPPSPGNP

SEQ ID NO: 878 - protein, 595 aa, Homo sapiens
MAALSPTFATSTQDSTCLQDSEFPVSSKDHSCPQNLDLFVCSGLEPHTPSVGSQESVTFQDVAVDFTEKEWPLLDSSQRKLYKDVMLENYSNLTSLGYQVGKPSLISHLEQEEEPRTEERGAHQGACADWETPSKTKWSLLMEDIFGKETPSGVTMERAGLGEKSTEYAHLFEVFGMDPHLTQPMGRHAGKRPYHRRDYGVAFKGRPHLTQHMSMYDGRKMHECHQCQKAFTTSASLTRHRRIHTGEKPYECSDCGKAFNDPSALRSHARTHLKEKPFDCSQCGNAFRTLSALKIHMRVHTGERPYKCDQCGKAYGRSCHLIAHKRTHTGERPYECHDCGKAFQHPSHLKEHVRNHTGEKPYACTQCGKAFRWKSNFNLHKKNHMVEKTYECKECGKSFGDLVSRRKHMRIHIVKKPVECRQCGKTFRNQSILKTHMNSHTGEKPYGCDLCGKAFSASSNLTAHRKIHTQERRYECAACGKVFGDYLSRRRHMSVHLVKKRVECRQCGKAFRNQSTLKTHMRSHTGEKPYECDHCGKAFSIGSNLNVHRRIHTGEKPYECLVCGKAFSDHSSLRSHVKTHRGEKLFVSSVWKRLQ

SEQ ID NO: 879 - protein, 1029 aa, Homo sapiens
MASEAVKVVVRCRPMNQRERELRCQPVVTVDCARAQCCIQNPGAADEPPKQFTFDGAYHVDHVTEQIYNEIAYPLVEGVTEGYNGTIFAYGQTGSGKSFTMQGLPDPPSQRGIIPRAFEHVFESVQCAENTKFLVRASYLEIYNEDVRDLLGADTKQKLELKEHPEKGVYVKGLSMHTVHSVAQCEHIMETGWKNRSVGYTLMNKDSSRSHSIFTISIEMSAVDERGKDHLRAGKLNLVDLAGSERQSKTGATGERLKEATKINLSLSALGNVISALVDGRCKHVPYRDSKLTRLLQDSLGGNTKTLMVACLSPADNNYDETLSTLRYANRAKNIRNKPRINEDPKDALLREYQEEIKKLKAILTQQMSPSSLSALLSRQVPPDPVQVEEKLLPQPVIQHDVEAEKQLIREEYEERLARLKADYKAEQESRARLEEDITAMRNSYDVRLSTLEENLRKETEAVLQVGVLYKAEVMSRAEFASSAEYPPAFQYETVVKPKVFSTTDTLPSDDVSKTQVSSRFAELPKVEPSKSEISLGSSESSSLEETSVSEAFPGPEEPSNVEVSMPTEESRSRYFLDECLGQEAAGHLLGEQNYLPQEEPQEVPLQGLLGLQDPFAEVEAKLARLSSTVARTDAPQADVPKVPVQVPAPTDLLEPSDARPEAEAADDFPPRPEVDLASEVALEVVRTAEPGVWLEAQAPVALVAQPEPLPATAGVKRESVGMEVAVLTDDPLPVVDQQQVLARLQLLEQQVVGGEQAKNKDLKEKHKRRKRYADERRKQLVAALQNSDEDSGDWVLLNVYDSIQEEVRAKSKLLEKMQRKLRAAEVEIKDLQSEFQLEKIDYLATIRRQERDSMLLQQLLEQVQPLIRRDCNYSNLEKILRESCWDEDNGFWKIPHPVITKTSLPVAVSTGPQNKPARKTSAADNGEPNMEDDRYRLMLSRSNSENIASNYFRSKRASQILSTDARKSLTHHNSPPGLSCPLSNNSAIPPTQAPEMPQPRPFRLESLDIPFTKAKRKKSKSNFGSEPL

SEQ ID NO: 880 - protein, 524 aa, Homo sapiens
MPQLSLSWLGLGPVAASPWLLLLLVGGSWLLARVLAWTYTFYDNCRRLQCFPQPPKQNWFWGHQGLVTPTEEGMKTLTQLVTTYPQGFKLWLGPTFPLLILCHPDIIRPITSASAAVAPKDMIFYGFLKPWLGDGLLLSGGDKWSRHRRMLTPAFHFNILKPYMKIFNKSVNIMHDKWQRLASEGSARLDMFEHISLMTLDSLQKCVFSFESNCQEKPSEYIAAILELSAFVEKRNQQILLHTDFLYYLTPDGQRFRRACHLVHDFTDAVIQERRCTLPTQGIDDFLKNKAKSKTLDFIDVLLLSKDEDGKELSDEDIRAEADTFMFEGHDTTASGLSWVLYHLAKHPEYQEQCRQEVQELLKDREPIEIEWDDLAQLPFLTMCIKESLRLHPPVPVISRCCTQDFVLPDGRVIPKGIVCLINIIGIHYNPTVWPDPEVYDPFRFDQENIKERSPLAFIPFSAGPRNCIGQAFAMAEMKVVLALTLLHFRILPTHTEPRRKPELILRAEGGLWLRVEPLGANSQ

SEQ ID NO: 881 - protein, 1130 aa, Homo sapiens
MAHAGGGSGGSGAGGPAGRGLSGARWGRSGSAGHEKLPVHVEDALTYLDQVKIRFGSDPATYNGFLEIMKEFKSQSIDTPGVIRRVSQLFHEHPDLIVGFNAFLPLGYRIDIPKNGKLNIQSPLTSQENSHNHGDGAEDFKQQVPYKEDKPQVPLESDSVEFNNAISYVNKIKTRFLDHPEIYRSFLEILHTYQKEQLNTRGRPFRGMSEEEVFTEVANLFRGQEDLLSEFGQFLPEAKRSLFTGNGPCEMHSVQKNEHDKTPEHSRKRSRPSLLRPVSAPAKKKMKLRGTKDLSIAAVGKYGTLQEFSFFDKVRRVLKSQEVYENFLRCIALFNQELVSGSELLQLVSPFLGKFPELFAQFKSFLGVKELSFAPPMSDRSGDGISREIDYASCKRIGSSYRALPKTYQQPKCSGRTAICKEVLNDTWVSFPSWSEDSTFVSSKKTPYEEQLHRCEDERFELDVVLETNLATIRVLESVQKKLSRMAPEDQEKFRLDDSLGGTSEVIQRRAIYRIYGDKAPEIIESLKKNPVTAVPVVLKRLKAKEEEWREAQQGFNKIWREQYEKAYLKSLDHQAVNFKQNDTKALRSKSLLNEIESVYDEHQEQHSEGRSAPSSEPHLIFVYEDRQILEDAAALISYYVKRQPAIQKEDQGTIHQLLHQFVPSLFFSQQLDLGASEESADEDRDSPQGQTTDPSERKKPAPGPHSSPPEEKGAFGDAPATEQPPLPPPAPHKPLDDVYSLFFANNNWYFFLRLHQTLCSRLLKIYRQAQKQLLEYRTEKEREKLLCEGRREKGSDPAMELRLKQPSEVELEEYYPAFLDMVRSLLEGSIDPTQYEDTLREMFTIHAYVGFTMDKLVQNIARQLHHLVSDDVCLKVVELYLNEKKRGAAGGNLSSRCVRAARETSYQWKAERCMADENCFKVMFLQRKGQVIMTIELLDTEEAQTEDPVEVQHLARYVEQYVGTEGASSSPTEGFLLKPVFLQRNLKKFRRRWQSEQARALRGEARSSWKRLVGVESACDVDCRFKLSTHKMVFIVNSEDYMYRRGTLCRAKQVQPLVLLRHHQHFEEWHSRWLEDNVTVEAASLVQDWLMGEEDEDMVPCKTLCETVHVHGLPVTRYRVQYSRRPASP

SEQ ID NO: 882 - protein, 355 aa, Homo sapiens
MALSEPILPSFSTFASPCRERGLQERWPRAEPESGGTDDDLNSVLDFILSMGLDGLGAEAAPEPPPPPPPPAFYYPEPGAPPPYSAPAGGLVSELLRPELDAPLGPALHGRFLLAPPGRLVKAEPPEADGGGGYGCAPGLTRGPRGLKREGAPGPAASCMRGPGGRPPPPPDTPPLSPDGPARLPAPGPRASFPPPFGGPGFGAPGPGLHYAPPAPPAFGLFDDAAAAAAALGLAPPAARGLLTPPASPLELLEAKPKRGRRSWPRKRTATHTCSYAGCGKTYTKSSHLKAHLRTHTGEKPYHCNWDGCGWKFARSDELTRHYRKHTGHRPFQCHLCDRAFSRSDHLALHMKRHM

SEQ ID NO: 883 - protein, 319 aa, Homo sapiens
MERGNQTEVGNFLLLGFAEDSDMQLLLHGLFLSMYLVTIIGNLLIILTISSDSHLHTPMYFFLSNLSFADICFTSTTVPKMLVNIQTQSKMITFAGCLTQIFFFIAFGCLDNLLLTMTAYDRFVAICYPLHYTVIMNPRLCGLLVLGSWCISVMGSLLETLTILRLSFCTNMEIPHFFCDPSEVLKLACSDTFINNIVMYFVTIVLGVFPLCGILFSYSQIFSSVLRVSARGQHKAFSTCGSHLSVVSLFYGTGLGVYLSSAVTPPSRTSLAASVMYTMVTPMLNPFIYSLRNKDMKGSLGRLLLRATSLKEGTIAKLS

SEQ ID NO: 884 - protein, 920 aa, Homo sapiens
MGKKRTTSGEGRERQRLPARRFRTTSPAALRADSVDGGSLLAPLLGLTDRAFSDCPDLADGAMEKMSRVTTALGGSVLTGRTMHCHLDAPANAISVCRDAAQVVVAGRSIFKIYAIEEEQFVEKLNLRVGRKPSLNLSCADVVWHQMDENLLATAATNGVVVTWNLGRPSRNKQDQLFTEHKRTVNKVCFHPTEAHVLLSGSQDGFMKCFDLRRKDSVSTFSGEATEAGPREWAMAGCVPILPVLSCRILRLHHSFAHGPMQDAESTANDARESWGCPLYPLGLCSGPQAGQSESVRDVQFSIRDYFTFASTFENGNVQLWDIRRPDRCERMFTAHNGPVFCCDWHPEDRGWLATGGRDKMVKVWDMTTHRAKEMHCVQTIASVARVKWRPECRHHLATCSMMVDHNIYVWDVRRPFVPAAMFEEHRDVTTGIAWRHPHDPSFLLSGSKDSSLCQHLFRDASQPVERANPEGLCYGLFGDLAFAAKESLVAAESGRKPYTGDRRHPIFFKRKLDPAEPFAGLASSALSVFETEPGGGGMRWFVDTAERYALAGRPLAELCDHNAKVARELGRNQVAQTWTMLRIIYCSPGLVPTANLNHSVGKGGSCGLPLMNSFNLKDMAPGLGSETRLDRSKGDARSDTVLLDSSATLITNEDNEETEGSDVPADYLLGDVEGEEDELYLLDPEHAHPEDPECVLPQEAFPLRHEIVDTPPGPEHLQDKADSPHVSGSEADVASLAPVDSSFSLLSVSHALYDSRLPPDFFGVLVRDMLHFYAEQGDVQMAVSVLIVLGERVRKDIDEQTQEHWYTSYIDLLQRFRLWNVSNEVVKLSTSRAVSCLNQASTTLHVNCSHCKRPMSSRGWVCDRCHRCASMCAVCHHVVKGLFVWCQGCSHGGHLQHIMKWLEGSSHCPAGCGHLCEYS

SEQ ID NO: 885 - protein, 573 aa, Homo sapiens
MDAKSLTAWSRTLVTFKDVFVDFTREEWKLLDTAQQIVYRNVMLENYKNLVSLGYQLTKPDVILRLEKGEEPWLVEREIHQETHPDSETAFEIKSSVSSRSIFKDKQSCDIKMEGMARNDLWYLSLEEVWKCRDQLDKYQENPERHLRQVAFTQKKVLTQERVSESGKYGGNCLLPAQLVLREYFHKRDSHTKSLKHDLVLNGHQDSCASNSNECGQTFCQNIHLIQFARTHTGDKSYKCPDNDNSLTHGSSLGISKGIHREKPYECKECGKFFSWRSNLTRHQLIHTGEKPYECKECGKSFSRSSHLIGHQKTHTGEEPYECKECGKSFSWFSHLVTHQRTHTGDKLYTCNQCGKSFVHSSRLIRHQRTHTGEKPYECPECGKSFRQSTHLILHQRTHVRVRPYECNECGKSYSQRSHLVVHHRIHTGLKPFECKDCGKCFSRSSHLYSHQRTHTGEKPYECHDCGKSFSQSSALIVHQRIHTGEKPYECCQCGKAFIRKNDLIKHQRIHVGEETYKCNQCGIIFSQNSPFIVHQIAHTGEQFLTCNQCGTALVNTSNLIGYQTNHIRENAY

SEQ ID NO: 886 - protein, 376 aa, Homo sapiens
MSDSKEPRVQQLGLLEEDPTTSGIRLFPRDFQFQQIHGHKSSTGCLGHGALVLQLLSFMLLAGVLVAILVQVSKVPSSLSQEQSEQDAIYQNLTQLKAAVGELSEKSKLQEIYQELTQLKAAVGELPEKSKLQEIYQELTRLKAAVGELPEKSKLQEIYQELTRLKAAVGELPEKSKLQEIYQELTELKAAVGELPEKSKLQEIYQELTQLKAAVGELPDQSKQQQIYQELTDLKTAFERLCRHCPKDWTFFQGNCYFMSNSQRNWHDSVTACQEVRAQLVVIKTAEEQNFLQLQTSRSNRFSWMGLSDLNQEGTWQWVDGSPLSPSFQRYWNSGEPNNSGNEDCAEFSGSGWNDNRCDVDNYWICKKPAACFRDE

SEQ ID NO: 887 - protein, 547 aa, Homo sapiens
MEVGGDTAAPAPGGAEDLEDTQFPSEEAREGGGVHAVPPDPEDEGLEETGSKDKDQPPSPSPPPQSEALSSTSRLWSPAAPENSPTCSPESSSGGQGGDPSDEEWRSQRKHVFVLSEAGKPIYSRYGSVEALSATMGVMTALVSFVQSAGDAIRAIYAEDHKLVFLQQGPLLLVAMSRTSQSAAQLRGELLAVHAQIVSTLTRASVARIFAHKQNYDLRRLLAGSERTLDRLLDSMEQDPGALLLGAVRCVPLARPLRDALGALLRRCTAPGLALSVLAVGGRLITAAQERNVLAECRLDPADLQLLLDWVGAPAFAAGEAWAPVCLPRFNPDGFFYAYVARLDAMPVCLLLLGTQREAFHAMAACRRLVEDGMHALGAMRALGEAASFSNASSASAPAYSVQAVGAPGLRHFLYKPLDIPDHHRQLPQFTSPELEAPYSREEERQRLSDLYHRLHARLHSTSRPLRLIYHVAEKETLLAWVTSKFELYTCLSPLVTKAGAILVVTKLLRWVKKEEDRLFIRYPPKYSTPPATSTDQAAHNGLFTGL

SEQ ID NO: 888 - protein, 603 aa, Homo sapiens
MAASCPLPVTPDLPTLRAKLQGLLQFLRDALSISNAHTVDFYTESVWEELVDLPPETVLAALRKSASETEALPSETRPLVEAEWEAGMTDFPKIFCETSQKLVSVEAFALAAKYYSVQNLGICTPFEQLLVALRGNQNQRIGENQKAVEFMNMKKSHEVQAMSELISSIADYYGIKQVIDLGSGKGYLSSFLSLKYGLKVYGIDSSNTNTHGAEERNRKLKKHWKLCHAQSRLDVNGLALKMAKERKVQNKVKNKADTEEVFNNSPTNQEKMPTSAILPDFSGSVISNIRNQMETLHSQPHQEENLCFENSFSLINLLPINAVEPTSSQQIPNRETSEANKERRKMTSKSSESNIYSPLTSFITADSELHDIIKDLEDCLMVGLHTCGDLAPNTLRIFTSNSEIKGVCSVGCCYHLLSEEFENQHKERTQEKWGFPMCHYLKEERWCCGRNARMSACLALERVAAGQGLPTESLFYRAVLQDIIKDCYGITKCDRHVGKIYSKCSSFLDYVRRSLKKLGLDESKLPEKIIMNYYEKYKPRMNELEAFNMLKVVLAPCIETLILLDRLCYLKEQEDIAWSALVKLFDPVKSPRCYAVIALKKQQ

SEQ ID NO: 889 - protein, 827 aa, Homo sapiens
MTKLSAQVKGSLNITTPGLQIWRIEAMQMVPVPSSTFGSFFDGDCYIILAIHKTASSLSYDIHYWIGQDSSLDEQGAAAIYTTQMDDFLKGRAVQHREVQGNESEAFRGYFKQGLVIRKGGVASGMKHVETNSYDVQRLLHVKGKRNVVAGEVEMSWKSFNRGDVFLLDLGKLIIQWNGPESTRMERLRGMTLAKEIRDQERGGRTYVGVVDGENELASPKLMEVMNHVLGKRRELKAAVPDTVVEPALKAALKLYHVSDSEGNLVVREVATRPLTQDLLSHEDCYILDQGGLKIYVWKGKKANEQEKKGAMSHALNFIKAKQYPPSTQVEVQNDGAESAVFQQLFQKWTASNRTSGLGKTHTVGSVAKVEQVKFDATSMHVKPQVAAQQKMVDDGSGEVQVWRIENLELVPVDSKWLGHFYGGDCYLLLYTYLIGEKQHYLLYVWQGSQASQDEITASAYQAVILDQKYNGEPVQIRVPMGKEPPHLMSIFKGRMVVYQGGTSRTNNLETGPSTRLFQVQGTGANNTKAFEVPARANFLNSNDVFVLKTQSCCYLWCGKGCSGDEREMAKMVADTISRTEKQVVVEGQEPANFWMALGGKAPYANTKRLQEENLVITPRLFECSNKTGRFLATEIPDFNQDDLEEDDVFLLDVWDQVFFWIGKHANEEEKKAAATTAQEYLKTHPSGRDPETPIIVVKQGHEPPTFTGWFLAWDPFKWSNTKSYEDLKAELGNSRDWSQITAEVTSPKVDVFNANSNLSSGPLPIFPLEQLVNKPVEELPEGVDPSRKEEHLSIEDFTQAFGMTPAAFSALPRWKQQNLKKEKGLF

SEQ ID NO: 890 - protein, 417 aa, Homo sapiens
MALKVLLEQEKTFFTLLVLLGYLSCKVTCESGDCRQQEFRDRSGNCVPCNQCGPGMELSKECGFGYGEDAQCVTCRLHRFKEDWGFQKCKPCLDCAVVNRFQKANCSATSDAICGDCLPGFYRKTKLVGFQDMECVPCGDPPPPYEPHCASKVNLVKIASTASSPRDTALAAVICSALATVLLALLILCVIYCKRQFMEKKPSWSLRSQDIQYNGSELSCFDRPQLHEYAHRACCQCRRDSVQTCGPVRLLPSMCCEEACSPNPATLGCGVHSAASLQARNAGPAGEMVPTFFGSLTQSICGEFSDAWPLMQNPMGGDNISFCDSYPELTGEDIHSLNPELESSTSLDSNSSQDLVGGAVPVQSHSENFTAATDLSRYNNTLVESASTQDALTMRSQLDQESGAVIHPATQTSLQEA

SEQ ID NO: 891 - protein, 785 aa, Homo sapiens
MASKVTDAIVWYQKKEFLSVATTAPGPQQVLPGYCQCSLKDQGLFIQCLIGAYDQQIWEKSVEQREIKFIKLGLRNKPKKTAHVKPDLIDVDLVRGSAFAKAKPESPWTSLTRKGIVRVVFFPFFFRWWLQVTSKVIFFWLLVLYLLQVAAIVLFCSTSSPHSIPLTEVIGPIWLMLLLGTVHCQIVSTRTPKPPLSTGGKRRRKLRKAAHLEVHREGDGSSTTDNTQEGAVQNHGTSTSHSVGTVFRDLWHAAFFLSGSKKAKNSIDKSTETDNGYVSLDGKKTVKSGEDGIQNHEPQCETIRPEETAWNTGTLRNGPSKDTQRTITNVSDEVSSEEGPETGYSLRRHVDRTSEGVLRNRKSHHYKKHYPNEDAPKSGTSCSSRCSSSRQDSESARPESETEDVLWEDLLHCAECHSSCTSETDVENHQINPCVKKEYRDDPFHQSHLPWLHSSHPGLEKISAIVWEGNDCKKADMSVLEISGMIMNRVNSHIPGIGYQIFGNAVSLILGLTPFVFRLSQATDLEQLTAHSASELYVIAFGSNEDVIVLSMVIISFVVRVSLVWIFFFLLCVAERTYKQRLLFAKLFGHLTSARRARKSEVPHFRLKKVQNIKMWLSLRSYLKRRGPQRSVDVIVSSAFLLTISVVFICCAQLLHVHEIFLDCHYNWELVIWCISLTLFLLRFVTLGSETSKKYSNTSILLTEQINLYLKMEKKPNKKEELTLVNNVLKLATKLLKELDSPFRLYGLTMNPLLYNITQVVILSAVSGVISDLLGFNLKLWKIKS

SEQ ID NO: 892 - protein, 780 aa, Homo sapiens
MEQVEILRKFIQRVQAMKSPDHNGEDNFARDFMRLRRLSTKYRTEKIYPTATGEKEENVKKNRYKDILPFDHSRVKLTLKTPSQDSDYINANFIKGVYGPKAYVATQGPLANTVIDFWRMIWEYNVVIIVMACREFEMGRKKCERYWPLYGEDPITFAPFKISCEDEQARTDYFIRTLLLEFQNESRRLYQFHYVNWPDHDVPSSFDSILDMISLMRKYQEHEDVPICIHCSAGCGRTGAICAIDYTWNLLKAGKIPEEFNVFNLIQEMRTQRHSAVQTKEQYELVHRAIAQLFEKQLQLYEIHGAQKIADGVNEINTENMVSSIEPEKQDSPPPKPPRTRSCLVEGDAKEEILQPPEPHPVPPILTPSPPSAFPTVTTVWQDNDRYHPKPVLHMVSSEQHSADLNRNYSKSTELPGKNESTIEQIDKKLERNLSFEIKKVPLQEGPKSFDGNTLLNRGHAIKIKSASPCIADKISKPQELSSDLNVGDTSQNSCVDCSVTQSNKVSVTPPEESQNSDTPPRPDRLPLDEKGHVTWSFHGPENAIPIPDLSEGNSSDINYQTRKTVSLTPSPTTQVETPDLVDHDNTSPLFRTPLSFTNPLHSDDSDSDERNSDGAVTQNKTNISTASATVSAATSTESISTRKVLPMSIARHNIAGTTHSGAEKDVDVSEDSPPPLPERTPESFVLASEHNTPVRSEWSELQSQERSEQKKSEGLITSENEKCDHPAGGIHYEMCIECPPTFSDKREQISENPTEATDIGFGNRCGKPKGPRDPPSEWT

SEQ ID NO: 893 - protein, 439 aa, Homo sapiens
MKLANWYWLSSAVLATYGFLVVANNETEEIKDERAKDVCPVRLESRGKCEEAGECPYQVSLPPLTIQLPKQFSRIEEVFKEVQNLKEIVNSLKKSCQDCKLQADDNGDPGRNGLLLPSTGAPGEVGDNRVRELESEVNKLSSELKNAKEEINVLHGRLEKLNLVNMNNIENYVDSKVANLTFVVNSLDGKCSKCPSQEQIQSRPVQHLIYKDCSDYYAIGKRSSETYRVTPDPKNSSFEVYCDMETMGGGWTVLQARLDGSTNFTRTWQDYKAGFGNLRREFWLGNDKIHLLTKSKEMILRIDLEDFNGVELYALYDQFYVANEFLKYRLHVGNYNGTAGDALRFNKHYNHDLKFFTTPDKDNDRYPSGNCGLYYSSGWWFDACLSANLNGKYYHQKYRGVRNGIFWGTWPGVSEAHPGGYKSSFKEAKMMIRPKHFKP

SEQ ID NO: 894 - protein, 1283 aa, Homo sapiens
MWGSDRLAGAGGGGAAVTVAFTNARDCFLHLPRRLVAQLHLLQNQAIEVVWSHQPAFLSWVEGRHFSDQGENVAEINRQVGQKLGLSNGGQVFLKPCSHVVSCQQVEVEPLSADDWEILELHAVSLEQHLLDQIRIVFPKAIFPVWVDQQTYIFIQIVALIPAASYGRLETDTKLLIQPKTRRAKENTFSKADAEYKKLHSYGRDQKGMMKELQTKQLQSNTVGITESNENESEIPVDSSSVASLWTMIGSIFSFQSEKKQETSWGLTEINAFKNMQSKVVPLDNIFRVCKSQPPSIYNASATSVFHKHCAIHVFPWDQEYFDVEPSFTVTYGKLVKLLSPKQQQSKTKQNVLSPEKEKQMSEPLDQKKIRSDHNEEDEKACVLQVVWNGLEELNNAIKYTKNVEVLHLGKVWIPDDLRKRLNIEMHAVVRITPVEVTPKIPRSLKLQPRENLPKDISEEDIKTVFYSWLQQSTTTMLPLVISEEEFIKLETKDGLKEFSLSIVHSWEKEKDKNIFLLSPNLLQKTTIQVLLDPMVKEENSEEIDFILPFLKLSSLGGVNSLGVSSLEHITHSLLGRPLSRQLMSLVAGLRNGALLLTGGKGSGKSTLAKAICKEAFDKLDAHVERVDCKALRGKRLENIQKTLEVAFSEAVWMQPSVVLLDDLDLIAGLPAVPEHEHSPDAVQSQRLAHALNDMIKEFISMGSLVALIATSQSQQSLHPLLVSAQGVHIFQCVQHIQPPNQEQRCEILCNVIKNKLDCDINKFTDLDLQHVAKETGGFVARDFTVLVDRAIHSRLSRQSISTREKLVLTTLDFQKALRGFLPASLRSVNLHKPRDLGWDKIGGLHEVRQILMDTIQLPAKYPELFANLPIRQRTGILLYGPPGTGKTLLAGVIARESRMNFISVKGPELLSKYIGASEQAVRDIFIRAQAAKPCILFFDEFESIAPRRGHDNTGVTDRVVNQLLTQLDGVEGLQGVYVLAATSRPDLIDPALLRPGRLDKCVYCPPPDQVSRLEILNVLSDSLPLADDVDLQHVASVTDSFTGADLKALLYNAQLEALHGMLLSSGLQDGSSSSDSDLSLSSMVFLNHSSGSDDSAGDGECGLDQSLVSLEMSEILPDESKFNMYRLYFGSSYESELGNGTSSDLSSQCLSAPSSMTQDLPGVPGKDQLFSQPPVLRTASQEGCQELTQEQRDQLRADISIIKGRYRSQSGEDESMNQPGPIKTRLAISQSHLMTALGHTRPSISEDDWKNFAELYESFQNPKRRKNQSGTMFRPGQKVTLA

SEQ ID NO: 895 - protein, 1819 aa, Homo sapiens
MASITQLFDDLCEALLPAAKTHLGQRSVNRKRAKRSLKKVAYNALFTNLFQDETQQLQPDMSKLPARNKILMLSFDLRVGGLGPKADRLEELVEELEAAPCCPLLEVGSVLDLLVQLAGSGPPQVLPRKRDYFLNNKHVGRNVPYSGYDCDDLSVFEMDVQSLISREECLCHSMIQETLQVMEAAPGTGLPTVGLFSFGDPCGDRFERDTRVSLFGALVHSRTYDMDVRLGLPPVPDNADLSGLAIKVPPSVDQWEDEGFQSASNLTPDSQSEPSVTPDVDLWEAALTYEASKRRCWERVGCPPGHREEPYLTEAGRDAFDKFCRLHQGELQLLAGGVLQAPQPVLVKECELVKDVLNVLIGVVSATFSLCQPAQAFVVKRGVHVSGASPESISSLLSEVAEYGTCYTRLSHFSLQPVLDSLYSKGLVFQAFTSGLRRYLQYYRACVLSTPPTLSLLTIGFLFKKLGRQLRYLAELCGVGAVLPGTCGGGPRAAFPTGVKLLSYLYQEALHNCSNEHYPVLLSLLKTSCEPYTRFIHDWVYSGVFRDAYGEFMIQVNHEYLSFRDKLYWTHGYVLISKEVEDCVPVFLKHIAHDIYVCGKTINLLKLCCPRHYLCWSDVPVPRISVIFSLEELKEIEKDCAVYVGRMERVARHSSVSKEEKELRMEIAKQELIAHAREAASRVLSALSDRQMSERMALDARKREQFQRLKEQFVKDQERRQAARQEELDDDFSYARELRDRERRLKSLEEELERKARQALVDHYSKLSAEAARREQKALWRIQRHRLESARLRFLLEDEKHIQEMLKAVSEAHQPQEPPDVLLSVHPQVTSPGPEHPEGGQGCDSGSAEQHSPAWDGWNRPGLLTPQPLKPLAVGAGGRGLQQAEGARPFSDSLSIGDFLPVGPGAEPSVQTGMVPLLEVALQTINLDLPPSAPGEAPAAASTQPSRPQEYDFSTVLRPAVATSPAPGPLQAAECSLGSSGLQLWEDSCGKMDACGSASRETLLPSHPPRRAALEEGSSQPTERLFGQVSGGGLPTGDYASEIAPTRPRWNTHGHVSDASIRVGENVSDVAPTQPRWNTHGHVSNASISLGESVSDVAPTRPRWNIHGHVSNASIRVGENVSDVAPTRPRWNTHGHVSNASIRVGENVSDVAPTRPRWNTHGHVSDASISLGESVSDMAPARPRWNTHGHVSDASISLGESVSDMAPTRPRWNTHGHVSDTSIRVGENVSDVAPIRSRCNTHGHVSDASISLGEPVSDVVSTRPRWNTHVPIPPPHMVLGALSPEAEPNTPRPQQSPPGHTSQSALSLGAQSTVLDCGPRLPVEVGPSLSSPSSGCGEGSISVGENVSDVAPTQPWWPNTPGDSVSEELGPGRSGDTEDLSPNWPLNSQEDTAAQSSPGRGEEAEASAAEAQGGEQAYLAGLAGQYHLERYPDSYESMSEPPIAHLLRPVLPRAFAFPVDPQVQSAADETAVQLSELLTLPVLMKRSITAPLAAHISLVNKAAVDYFFVELHLEAHYEALRHFLLMEDGEFAQSLSDLLFEKLGAGQTPGELLNPLVLNSVLSKALQCSLHGDTPHASNLSLALKYLPEVFAPNAPDVLSCLELRYKVDWPLNIVITEGCVSKYSGVFSFLLQLKLMMWALKDVCFHLKRTALLSHMAGSVQFRQLQLFKHEMQHFVKVIQGYIANQILHVTWCEFRARLATVGDLEEIQRAHAEYLHKAVFRGLLTEKAAPVMNVIHSIFSLVLKFRSQLISQAWGPPGGPRGAEHPNFALMQQSYNTFKYYSHFLFKVVTKLVNRGYQPHLEDFLLRINFNNYYQDA

SEQ ID NO: 896 - protein, 569 aa, Homo sapiens
MKKKLVVLGLLAVVLVLVIVGLCLWLPSASKEPDNHVYTRAAVAADAKQCSKIGRDALRDGGSAVDAAIAALLCVGLMNAHSMGIGGGLFLTIYNSTTRKAEVINAREVAPRLAFATMFNSSEQSQKGGLSVAVPGEIRGYELAHQRHGRLPWARLFQPSIQLARQGFPVGKGLAAALENKRTVIEQQPVLCEVFCRDRKVLREGERLTLPQLADTYETLAIEGAQAFYNGSLTAQIVKDIQAAGGIVTAEDLNNYRAELIEHPLNISLGDVVLYMPSAPLSGPVLALILNILKGYNFSRESVESPEQKGLTYHRIVEAFRFAYAKRTLLGDPKFVDVTEVVRNMTSEFFAAQLRAQISDDTTHPISYYKPEFYTPDDGGTAHLSVVAEDGSAVSATSTINLYFGSKVRSPVSGILFNNEMDDFSSPSITNEFGVPPSPANFIQPGKQPLSSMCPTIMVGQDGQVRMVVGAAGGTQITTATALAIIYNLWFGYDVKRAVEEPRLHNQLLPNVTTVERNIDQAVTAALETRHHHTQIASTFIAVVQAIVRTAGGWAAASDSRKGGEPAGY

SEQ ID NO: 897 - protein, 749 aa, Homo sapiens
MSGSHTPACGPFSALTPSIWPQEILAKYTQKEESAEQPEFYYDEFGFRVYKEEGDEPGSSLLANSPLMEDAPQRLRWQAHLEFTHNHDVGDLTWDKIAVSLPRSEKLRSLVLAGIPHGMRPQLWMRLSGALQKKRNSELSYREIVKNSSNDETIAAKQIEKDLLRTMPSNACFASMGSIGVPRLRRVLRALAWLYPEIGYCQGTGMVAACLLLFLEEEDAFWMMSAIIEDLLPASYFSTTLLGVQTDQRVLRHLIVQYLPRLDKLLQEHDIELSLITLHWFLTAFASVVDIKLLLRIWDLFFYEGSRVLFQLTLGMLHLKEEELIQSENSASIFNTLSDIPSQMEDAELLLGVAMRLAGSLTDVAVETQRRKHLAYLIADQGQLLGAGTLTNLSQVVRRRTQRRKSTITALLFGEDDLEALKAKNIKQTELVADLREAILRVARHFQCTDPKNCSVELTPDYSMESHQRDHENYVACSRSHRRRAKALLDFERHDDDELGFRKNDIITIVSQKDEHCWVGELNGLRGWFPAKFVEVLDERSKEYSIAGDDSVTEGVTDLVRGTLCPALKALFEHGLKKPSLLGGACHPWLFIEEAAGREVERDFASVYSRLVLCKTFRLDEDGKVLTPEELLYRAVQSVNVTHDAVHAQMDVKLRSLICVGLNEQVLHLWLEVLCSSLPTVEKWYQPWSFLRSPGWVQIKCELRVLCCFAFSLSQDWELPAKREAQQPLKEGVRDMLVKHHLFSWDVDG

SEQ ID NO: 898 - protein, 1024 aa, Homo sapiens
MPAARPPAAGLRGISLFLALLLGSPAAALERDALPEGDASPLGPYLLPSGAPERGSPGKEHPEERVVTAPPSSSQSAEVLGELVLDGTAPSAHHDIPALSPLLPEEARPKHALPPKKKLPSLKQVNSARKQLRPKATSAATVQRAGSQPASQGLDLLSSSTEKPGPPGDPDPIVASEEASEVPLWLDRKESAVPTTPAPLQISPFTSQPYVAHTLPQRPEPGEPGPDMAQEAPQEDTSPMALMDKGENELTGSASEESQETTTSTIITTTVITTEQAPALCSVSFSNPEGYIDSSDYPLLPLNNFLECTYNVTVYTGYGVELQVKSVNLSDGELLSIRGVDGPTLTVLANQTLLVEGQVIRSPTNTISVYFRTFQDDGLGTFQLHYQAFMLSCNFPRRPDSGDVTVMDLHSGGVAHFHCHLGYELQGAKMLTCINASKPHWSSQEPICSAPCGGAVHNATIGRVLSPSYPENTNGSQFCIWTIEAPEGQKLHLHFERLLLHDKDRMTVHSGQTNKSALLYDSLQTESVPFEGLLSEGNTIRIEFTSDQARAASTFNIRFEAFEKGHCYEPYIQNGNFTTSDPTYNIGTIVEFTCDPGHSLEQGPAIIECINVRDPYWNDTEPLCRAMCGGELSAVAGVVLSPNWPEPYVEGEDCIWKIHVGEEKRIFLDIQFLNLSNSDILTIYDGDEVMPHILGQYLGNSGPQKLYSSTPDLTIQFHSDPAGLIFGKGQGFIMNYIEVSRNDSCSDLPEIQNGWKTTSHTELVRGARITYQCDPGYDIVGSDTLTCQWDLSWSSDPPFCEKIMYCTDPGEVDHSTRLISDPVLLVGTTIQYTCNPGFVLEGSSLLTCYSRETGTPIWTSRLPHCVSEESLACDNPGLPENGYQILYKRLYLPGESLTFMCYEGFELMGEVTIRCILGQPSHWNGPLPVCKVNQDSFEHALEVAEAAAETSLEGGNMALAIFIPVLIISLLLGGAYIYITRCRYYSNLRLPLMYSHPYSQITVETEFDNPIYETGETREYEVSI

SEQ ID NO: 899 - protein, 353 aa, Homo sapiens
MSKPPDLLLRLLRGAPRQRVCTLFIIGFKFTFFVSIMIYWHVVGEPKEKGQLYNLPAEIPCPTLTPPTPPSHGPTPGNIFFLETSDRTNPNFLFMCSVESAARTHPESHVLVLMKGLPGGNASLPRHLGISLLSCFPNVQMLPLDLRELFRDTPLADWYAAVQGRWEPYLLPVLSDASRIALMWKFGGIYLDTDFIVLKNLRNLTNVLGTQSRYVLNGAFLAFERRHEFMALCMRDFVDHYNGWIWGHQGPQLLTRVFKKWCSIRSLAESRACRGVTTLPPEAFYPIPWQDWKKYFEDINPEELPRLLSATYAVHVWNKKSQGTRFEATSRALLAQLHARYCPTTHEAMKMYL

SEQ ID NO: 900 - protein, 422 aa, Homo sapiens
MSVGAMKKGVGRAVGLGGGSGCQATEEDPLPNCGACAPGQGGRRWRLPQPAWVEGSSARLWEQATGTGWMDLEASLLPTGPNASNTSDGPDNLTSAGSPPRTGSISYINIIMPSVFGTICLLGIIGNSTVIFAVVKKSKLHWCNNVPDIFIINLSVVDLLFLLGMPFMIHQLMGNGVWHFGETMCTLITAMDANSQFTSTYILTAMAIDRYLATVHPISSTKFRKPSVATLVICLLWALSFISITPVWLYARLIPFPGGAVGCGIRLPNPDTDLYWFTLYQFFLAFALPFVVITAAYVRILQRMTSSVAPASQRSIRLRTKRVTRTAIAICLVFFVCWAPYYVLQLTQLSISRPTLTFVYLYNAAISLGYANSCLNPFVYIVLCETFRKRLVLSVKPAAQGQLRAVSNAQTADEERTESKGT

SEQ ID NO: 901 - protein, 297 aa, Homo sapiens
MVHQVLYRALVSTKWLAESIRTGKLGPGLRVLDASWYSPGTREARKEYLERHVPGASFFDIEECRDTASPYEMMLPSEAGFAEYVGRLGISNHTHVVVYDGEHLGSFYAPRVWWMFRVFGHRTVSVLNGGFRNWLKEGHPVTSEPSRPEPAVFKATLDRSLLKTYEQVLENLESKRFQLVDSRSQGRFLGTEPEPDAVGLDSGHIRGAVNMPFMDFLTEDGFEKGPEELRALFQTKKVDLSQPLIATCRKGVTACHVALAAYLCGKPDVAVYDGSWSEWFRRAPPESRVSQGKSEKA

SEQ ID NO: 902 - protein, 217 aa, Homo sapiens
MASQKQMEVVTKGTGFRRRPKTITYTPGTCELLRVMMKESKLTNIQQRHIMDIMKRGDALPLQCSPTSSQRVLPSKQIASPIYLPPILAARPHLRPANMCQANGAYSREQFKPQATRDLEKEKQRLQNIFATGKDMEERKRKAPPARQKAPAPELDRFEELVKEIQERKEFLADMEALGQGKQYRGIILAEISQKLREMEDIDHRRSEELRKGLATT

SEQ ID NO: 903 - protein, 568 aa, Homo sapiens
MLLLPSAADGRGTAITHALTSASTLCQVEPVGRWFEAFVKRRNRNASASFQELEDKKELSEESEDEELQLEEFPMLKTLDPKDWKNQDHYAVLGLGHVRYKATQRQIKAAHKAMVLKHHPDKRKAAGEPIKEGDNDYFTCITKAYEMLSDPVKRRAFNSVDPTFDNSVPSKSEAKDNFFEVFTPVFERNSRWSNKKNVPKLGDMNSSFEDVDIFYSFWYNFDSWREFSYLDEEEKEKAECRDERRWIEKQNRATRAQRKKEEMNRIRTLVDNAYSCDPRIKKFKEEEKAKKEAEKKAKAEAKRKEQEAKEKQRQAELEAARLAKEKEEEEVRQQALLAKKEKDIQKKAIKKERQKLRNSCKIEEINEQIRKEKEEAEARMRQASKNTEKSTGGGGNGSKNWSEDDLQLLIKAVNLFPAGTNSRWEVIANYMNIHSSSGVKRTAKDVIGKAKSLQKLDPHQKDDINKKAFDKFKKEHGVVPQADNATPSERFEGPYTDFTPWTTEEQKLLEQALKTYPVNTPERWEKIAEAVPGRTKKDCMKRYKELVEMVKAKKAAQEQVLNASRAKK

SEQ ID NO: 904 - protein, 291 aa, Homo sapiens
MIPIQLTVFFMIIYVLESLTIIVQSSLIVAVLGREWLQVRRLMPVDMILISLGISRFCLQWASMLNNFCSYFNLNYVLCNLTITWEFFNILTFWLNSLLTVFYCIKVSSFTHHIFLWLRWRILRLFPWILLGSLMITCVTIIPSAIGNYIQIQLLTMEHLPRNSTVTDKLENFHQYQFQAHTVALVIPFILFLASTIFLMASLTKQIQHHSTGHCNPSMKARFTALRSLAVLFIVFTSYFLTILITIIGTLFDKRCWLWVWEAFVYAFILMHSTSLMLSSPTLKRILKGKC

SEQ ID NO: 905 - protein, 615 aa, Homo sapiens
MKALRLSASALFCLLLINGLGAAPPGRPEAQPPPLSSEHKEPVAGDAVPGPKDGSAPEVRGARNSEPQDEGELFQGVDPRALAAVLLQALDRPASPPAPSGSQQGPEEEAAEALLTETVRSQTHSLPAPESPEPAAPPRPQTPENGPEASDPSEELEALASLLQELRDFSPSSAKRQQETAAAETETRTHTLTRVNLESPGPERVWRASWGEFQARVPERAPLPPPAPSQFQARMPDSGPLPETHKFGEGVSSPKTHLGEALAPLSKAYQGVAAPFPKARRPESALLGGSEAGERLLQQGLAQVEAGRRQAEATRQAAAQEERLADLASDLLLQYLLQGGARQRGLGGRGLQEAAEERESAREEEEAEQERRGGEERVGEEDEEAAEAEAEAEEAERARQNALLFAEEEDGEAGAEDKRSQEETPGHRRKEAEGTEEGGEEEDDEEMDPQTIDSLIELSTKLHLPADDVVSIIEEVEEKRKRKKNAPPEPVPPPRAAPAPTHVRSPQPPPPAPAPARDELPDWNEVLPPWDREEDEVYPPGPYHPFPNYIRPRTLQPPSALRRRHYHHALPPSRHYPGREAQARRAQEEAEAEERRLQEQEELENYIEHVLLRRP

SEQ ID NO: 906 - protein, 834 aa, Homo sapiens
MEDPAAPGTGGPPANGNGNGGGKGKQAAPKGREAFRSQRRESEGSVDCPTLEFEYGDADGHAAELSELYSYTENLEFTNNRRCFEEDFKTQVQGKEWLELEEDAQKAYIMGLLDRLEVVSRERRLKVARAVLYLAQGTFGECDSEVDVLHWSRYNCFLLYQMGTFSTFLELLHMEIDNSQACSSALRKPAVSIADSTELRVLLSVMYLMVENIRLERETDPCGWRTARETFRTELSFSMHNEEPFALLLFSMVTKFCSGLAPHFPIKKVLLLLWKVVMFTLGGFEHLQTLKVQKRAELGLPPLAEDSIQVVKSMRAASPPSYTLDLGESQLAPPPSKLRGRRGSRRQLLTKQDSLDIYNERDLFKTEEPATEEEEESAGDGERTLDGELDLLEQDPLVPPPPSQAPLSAERVAFPKGLPWAPKVRQKDIEHFLEMSRNKFIGFTLGQDTDTLVGLPRPIHESVKTLKQHKYISIADVQIKNEEELEKCPMSLGEEVVPETPCEILYQGMLYSLPQYMIALLKILLAAAPTSKAKTDSINILADVLPEEMPITVLQSMKLGIDVNRHKEIIVKSISTLLLLLLKHFKLNHIYQFEYVSQHLVFANCIPLILKFFNQNILSYITAKNSISVLDYPCCTIQDLPELTTESLEAGDNSQFCWRNLFSCINLLRLLNKLTKWKHSRTMMLVVFKSAPILKRALKVKQAMLQLYVLKLLKLQTKYLGRQWRKSNMKTMSAIYQKVRHRMNDDWAYGNDIDARPWDFQAEECTLRANIEAFNSRRYDRPQDSEFSPVDNCLQSVLGQRLDLPEDFHYSYELWLEREVFSQPICWEELLQNH

SEQ ID NO: 907 - protein, 223 aa, Homo sapiens
MATPQSIFIFAICILMITELILASKSYYDILGVPKSASERQIKKAFHKLAMKYHPDKNKSPDAEAKFREIAEAYETLSDANRRKEYDTLGHSAFTSGKGQRGSGSSFEQSFNFNFDDLFKDFGFFGQNQNTGSKKRFENHFQTRQDGGSSRQRHHFQEFSFGGGLFDDMFEDMEKMFSFSGFDSTNQHTVQTENRFHGSSKHCRTVTQRRGNMVTTYTDCSGQ

SEQ ID NO: 908 - protein, 653 aa, Homo sapiens
MKLLWQVTVHHHTWNAILLPFVYLTAQVWILCAAIAAAASAGPQNCPSVCSCSNQFSKVVCTRRGLSEVPQGIPSNTRYLNLMENNIQMIQADTFRHLHHLEVLQLGRNSIRQIEVGAFNGLASLNTLELFDNWLTVIPSGAFEYLSKLRELWLRNNPIESIPSYAFNRVPSLMRLDLGELKKLEYISEGAFEGLFNLKYLNLGMCNIKDMPNLTPLVGLEELEMSGNHFPEIRPGSFHGLSSLKKLWVMNSQVSLIERNAFDGLASLVELNLAHNNLSSLPHDLFTPLRYLVELHLHHNPWNCDCDILWLAWWLREYIPTNSTCCGRCHAPMHMRGRYLVEVDQASFQCSAPFIMDAPRDLNISEGRMAELKCRTPPMSSVKWLLPNGTVLSHASRHPRISVLNDGTLNFSHVLLSDTGVYTCMVTNVAGNSNASAYLNVSTAELNTSNYSFFTTVTVETTEISPEDTTRKYKPVPTTSTGYQPAYTTSTTVLIQTTRVPKQVAVPATDTTDKMQTSLDEVMKTTKIIIGCFVAVTLLAAAMLIVFYKLRKRHQQRSTVTAARTVEIIQVDEDIPAATSAAATAAPSGVSGEGAVVLPTIHDHINYNTYKPAHGAHWTENSLGNSLHPTVTTISEPYIIQTHTKDKVQETQI

SEQ ID NO: 909 - protein, 787 aa, Homo sapiens
MAAARPARGPELPLLGLLLLLLLGDPGRGAASSGNATGPGPRSAGGSARRSAAVTGPPPPLSHCGRAAPCEPLRYNVCLGSVLPYGATSTLLAGDSDSQEEAHGKLVLWSGLRNAPRCWAVIQPLLCAVYMPKCENDRVELPSRTLCQATRGPCAIVERERGWPDFLRCTPDRFPEGCTNEVQNIKFNSSGQCEVPLVRTDNPKSWYEDVEGCGIQCQNPLFTEAEHQDMHSYIAAFGAVTGLCTLFTLATFVADWRNSNRYPAVILFYVNACFFVGSIGWLAQFMDGARREIVCRADGTMRLGEPTSNETLSCVIIFVIVYYALMAGVVWFVVLTYAWHTSFKALGTTYQPLSGKTSYFHLLTWSLPFVLTVAILAVAQVDGDSVSGICFVGYKNYRYRAGFVLAPIGLVLIVGGYFLIRGVMTLFSIKSNHPGLLSEKAASKINETMLRLGIFGFLAFGFVLITFSCHFYDFFNQAEWERSFRDYVLCQANVTIGLPTKQPIPDCEIKNRPSLLVEKINLFAMFGTGIAMSTWVWTKATLLIWRRTWCRLTGQSDDEPKRIKKSKMIAKAFSKRHELLQNPGQELSFSMHTVSHDGPVAGLAFDLNEPSADVSSAWAQHVTKMVARRGAILPQDISVTPVATPVPPEEQANLWLVEAEISPELQKRLGRKKKRRKRKKEVCPLAPPPELHPPAPAPSTIPRLPQLPRQKCLVAAGAWGAGDSCRQGAWTLVSNPFCPEPSPPQDPFLPSAPAPVAWAHGRRQGLGPIHSRTNLMDTELMDADSDF

SEQ ID NO: 910 - protein, 348 aa, Homo sapiens
MRKMSEEEFYLFKNISSVGPWDGPQYHIAPVWAFYLQAAFMGTVFLIGFPLNAMVLVATLRYKKLRQPLNYILVNVSFGGFLLCIFSVFPVFVASCNGYFVFGRHVCALEGFLGTVAGLVTGWSLAFLAFERYIVICKPFGNFRFSSKHALTVVLATWTIGIGVSIPPFFGWSRFIPEGLQCSCGPDWYTVGTKYRSESYTWFLFIFCFIVPLSLICFSYTQLLRALKAVAAQQQESATTQKAEREVSRMVVVMVGSFCVCYVPYAAFAMYMVNNRNHGLDLRLVTIPSFFSKSACIYNPIIYCFMNKQFQACIMKMVCGKAMTDESDTCSSQKTEVSTVSSTQVGPN

SEQ ID NO: 911 - protein, 352 aa, Homo sapiens
MLGGSAGRLKMSSSGTLSNYYVDSLIGHEGDEVFAARFGPPGPGAQGRPAGVADGPAATAAEFASCSFAPRSAVFSASWSAVPSQPPAAAAMSGLYHPYVPPPPLAASASEPGRYVRSWMEPLPGFPGGAGGGGGGGGGGPGRGPSPGPSGPANGRHYGIKPETRAAPAPATAASTTSSSSTSLSSSSKRTECSVARESQGSSGPEFSCNSFLQEKAAAATGGTGPGAGIGAATGTGGSSEPSACSDHPIPGCSLKEEEKQHSQPQQQQLDPNNPAANWIHARSTRKKRCPYTKYQTLELEKEFLFNMYLTRDRRYEVARILNLTERQVKIWFQNRRMKMKKMSKEKCPKGD

SEQ ID NO: 912 - protein, 340 aa, Homo sapiens
MSFPNSSPAANTFLVDSLISACRSDSFYSSSASMYMPPPSADMGTYGMQTCGLLPSLAKREVNHQNMGMNVHPYIPQVDSWTDPNRSCRIEQPVTQQVPTCSFTTNIKEESNCCMYSDKRNKLISAEVPSYQRLVPESCPVENPEVPVPGYFRLSQTYATGKTQEYNNSPEGSSTVMLQLNPRGAAKPQLSAAQLQMEKKMNEPVSGQEPTKVSQVESPEAKGGLPEERSCLAEVSVSSPEVQEKESKEEIKSDTPTSNWLTAKSGRKKRCPYTKHQTLELEKEFLFNMYLTRERRLEISKSVNLTDRQVKIWFQNRRMKLKKMSRENRIRELTANLTFS

SEQ ID NO: 913 - protein, 338 aa, Homo sapiens
MNDFDECGQSAASMYLPGCAYYVAPSDFASKPSFLSQPSSCQMTFPYSSNLAPHVQPVREVAFRDYGLERAKWPYRGGGGGGSAGGGSSGGGPGGGGGGAGGYAPYYAAAAAAAAAAAAAEEAAMQRELLPPAGRRPDVLFKAPEPVCAAPGPPHGPAGAASNFYSAVGRNGILPQGFDQFYEAAPGPPFAGPQPPPPPAPPQPEGAADKGDPRTGAGGGGGSPCTKATPGSEPKGAAEGSGGDGEGPPGEAGAEKSSSAVAPQRSRKKRCPYTKYQIRELEREFFFNVYINKEKRLQLSRMLNLTDRQVKIWFQNRRMKEKKLNRDRLQYFTGNPLF

SEQ ID NO: 914 - protein, 698 aa, Homo sapiens
MLSPKIRQARRARSKSLVMGEQSRSPGRMPCPHRLGPVLKAGWLKKQRSIMKNWQQRWFVLRGDQLFYYKDKDEIKPQGFISLQGTQVTELPPGPEDPGKHLFEISPGGAGEREKVPANPEALLLMASSQRDMEDWVQAIRRVIWAPLGGGIFGQRLEETVHHERKYGPRLAPLLVEQCVDFIRERGLTEEGLFRMPGQANLVRDLQDSFDCGEKPLFDSTTDVHTVASLLKLYLRELPEPVVPFARYEDFLSCAQLLTKDEGEGTLELAKQVSNLPQANYNLLRYICKFLDEVQAYSNVNKMSVQNLATVFGPNILRPQVEDPVTIMEGTSLVQHLMTVLIRKHSQLFTAPVPEGPTSPRGGLQCAVGWGSEEVTRDSQGEPGGPGLPAHRTSSLDGAAVAVLSRTAPTGPGSRCSPGKKVQTLPSWKSSFRQPRSLSGSPKGGGSSLEVPIISSGGNWLMNGLSSLRGHRRASSGDRLKDSGSVQRLSTYDNVPAPGLVPGIPSVASMAWSGASSSESSVGGSLSSCTACRASDSSARSSLHTDWALEPSPLPSSSEDPKSLDLDHSMDEAGAGASNSEPSEPDSPTREHARRSEALQGLVTELRAELCRQRTEYERSVKRIEEGSADLRKRMSRLEEELDQEKKKYIMLEIKLRNSERAREDAERRNQLLQREMEEFFSTLGSLTVGAKGARAPK

SEQ ID NO: 915 - protein, 651 aa, Homo sapiens
MADSAELKQMVMSLRVSELQVLLGYAGRNKHGRKHELLTKALHLLKAGCSPAVQMKIKELYRRRFPQKIMTPADLSIPNVHSSPMPATLSPSTIPQLTYDGHPASSPLLPVSLLGPKHELELPHLTSALHPVHPDIKLQKLPFYDLLDELIKPTSLASDNSQRFRETCFAFALTPQQVQQISSSMDISGTKCDFTVQVQLRFCLSETSCPQEDHFPPNLCVKVNTKPCSLPGYLPPTKNGVEPKRPSRPINITSLVRLSTTVPNTIVVSWTAEIGRNYSMAVYLVKQLSSTVLLQRLRAKGIRNPDHSRALIKEKLTADPDSEIATTSLRVSLLCPLGKMRLTIPCRALTCSHLQCFDATLYIQMNEKKPTWVCPVCDKKAPYEHLIIDGLFMEILKYCTDCDEIQFKEDGTWAPMRSKKEVQEVSASYNGVDGCLSSTLEHQVASHHQSSNKNKKVEVIDLTIDSSSDEEEEEPSAKRTCPSLSPTSPLNNKGILSLPHQASPVSRTPSLPAVDTSYINTSLIQDYRHPFHMTPMPYDLQGLDFFPFLSGDNQHYNTSLLAAAAAAVSDDQDLLHSSRFFPYTSSQMFLDQLSAGGSTSLPTTNGSSSGSNSSLVSSNSLRESHSHTVTNRSSTDTASIFGIIPDIISLD

SEQ ID NO: 916 - protein, 518 aa, Homo sapiens
MTSSKIEMPGEVKADPAALMASLHLLPSPTPNLEIKYTKIFINNEWQNSESGRVFPVYNPATGEQVCEVQEADKADIDKAVQAARLAFSLGSVWRRMDASERGRLLDKLADLVERDRAVLATMESLNGGKPFLQAFYVDLQGVIKTFRYYAGWADKIHGMTIPVDGDYFTFTRHEPIGVCGQIIPWNFPLLMFAWKIAPALCCGNTVVIKPAEQTPLSALYMGALIKEAGFPPGVINILPGYGPTAGAAIASHIGIDKIAFTGSTEVGKLIQEAAGRSNLKRVTLELGGKSPNIIFADADLDYAVEQAHQGVFFNQGQCCTAGSRIFVEESIYEEFVRRSVERAKRRVVGSPFDPTTEQGPQIDKKQYNKILELIQSGVAEGAKLECGGKGLGRKGFFIEPTVFSNVTDDMRIAKEEIFGPVQEILRFKTMDEVIERANNSDFGLVAAVFTNDINKALTVSSAMQAGTVWINCYNALNAQSPFGGFKMSGNGREMGEFGLREYSEVKTVTVKIPQKNS

SEQ ID NO: 917 - protein, 316 aa, Homo sapiens
MAAPEAPPLDRVFRTTWLSTECDSHPLPPSYRKFLFETQAADLAGGTTVAAGNLLNESEKDCGQDRRAPGVQPCRLVTMTSVVKTVYSLQPPSALSGGQPADTQTRATSKSLLPVRSKEVDVSKQLHSGGPENDVTKITKLRRENGQMKATDTATRRNVRKGYKPLSKQKSEEELKDKNQLLEAVNKQLHQKLTETQGELKDLTQKVELLEKFRDNCLAILESKGLDPALGSETLASRQESTTDHMDSMLLLETLQEELKLFNETAKKQMEELQALKVKLEMKEERVRFLEQQTLCNNQVNDLTTALKEMEQLLEM

SEQ ID NO: 918 - protein, 3710 aa, Homo sapiens
MVLESVVADLLNRFLGDYVENLNKSQLKLGIWGGNVALDNLQIKENALSELDVPFKVKAGQIDKLTLKIPWKNLYGEAVVATLEGLYLLVVPGASIKYDAVKEEKSLQDVKQKELSRIEEALQKAAEKDKPKEAKKDTFVEKLATQVIKNVQVKITDIHIKYEDDVTDPKRPLSFGVTLGELSLLTANEHWTPCILNEADKIIYKLIRLDSLSAYWNVNCSMSYQRSREQILDQLKNEILTSGNIPPNYQYIFQPISASAKLYMNPYAESELKTPKLDCNIEIQNIAIELTKPQYLSMIDLLESVDYMVRNAPYRKYKPYLPLHTNGRRWWKYAIDSVLEVHIRRYTQMWSWSNIKKHRQLLKSYKIAYKNKLTQSKVSEEIQKEIQDLEKTLDVFNIILARQQAQVEVIRSGQKLRKKSADTGEKRGGWFSGLWGKKESKKKDEESLIPETIDDLMTPEEKDKLFTAIGYSESTHNLTLPKQYVAHIMTLKLVSTSVTIRENKNIPEILKIQIIGLGTQVSQRPGAQALKVEAKLEHWYITGLRQQDIVPSLVASIGDTTSSLLKIKFETNPEDSPADQTLIVQSQPVEVIYDAKTVNAVVEFFQSNKGLDLEQITSATLMKLEEIKERTATGLTHIIETRKVLDLRINLKPSYLVVPQTGFHHEKSDLLILDFGTFQLNSKDQGLQKTTNSSLEEIMDKAYDKFDVEIKNVQLLFARAEETWKKCRFQHPSTMHILQPMDIHVELAKAMVEKDIRMARFKVSGGLPLMHVRISDQKMKDVLYLMNSIPLPQKSSAQSPERQVSSIPIISGGTKGLLGTSLLLDTVESESDDEYFDAEDGEPQTCKSMKGSELKKAAEVPNEELINLLLKFEIKEVILEFTKQQKEEDTILVFNVTQLGTEATMRTFDLTVVSYLKKISLDYHEIEGSKRKPLHLISSSDKPGLDLLKVEYIKADKNGPSFQTAFGKTEQTVKVAFSSLNLLLQTQALVASINYLTTIIPSDDQSISVAKEVQISTEKQQKNSTLPKAIVSSRDSDIIDFRLFAKLNAFCVIVCNEKNNIAEIKIQGLDSSLSLQSRKQSLFARLENIIVTDVDPKTVHKKAVSIMGNEVFRFNLDLYPDATEGDLYTDMSKVDGVLSLNVGCIQIVYLHKFLMSLLNFLNNFQTAKESLSAATAQAAERAATSVKDLAQRSFRVSINIDLKAPVIVIPQSSISTNAVVVDLGLIRVHNQFSLVSDEDYLNPPVIDRMDVQLTKLTLYRTVIQPGIYHPDIQLLHPINLEFLVNRNLAASWYHKVPVVEIKGHLDSMNVSLNQEDLNLLFRILTENLCEGTEDLDKVKPRVQETGEIKEPLEISISQDVHDSKNTLTTGVEEIRSVDIINMLLNFEIKEVVVTLMKKSEKKGRPLHELNVLQLGMEAKVKTYDMTAKAYLKKISMQCFDFTDSKGEPLHIINSSNVTDEPLLKMLLTKADSDGPEFKTIHDSTKQRLKVSFASLDLVLHLEALLSFMDFLSSAAPFSEPSSSEKESELKPLVGESRSIAVKAVSSNISQKDVFDLKITAELNAFNVFVCDQKCNIADIKIHGMDASISVKPKQTDVFARLKDIIVMNVDLQSIHKKAVSILGDEVFRFQLTLYPDATEGEAYADMSKVDGKLSFKVGCIQIVYVHKFFMSLLNFLNNFQTAKEALSTATVQAAERAASSMKDLAQKSFRLLMDINLKAPVIIIPQSSVSPNAVIADLGLIRVENKFSLVPMEHYSLPPVIDKMNIELTQLKLSRTILQASLPQNDIEILKPVNMLLSIQRNLAAAWYVQIPGMEIKGKLKPMQVALSEDDLTVLMKILLENLGEASSQPSPTQSVQETVRVRKVDVSSVPDHLKEQEDWTDSKLSMNQIVSLQFDFHFESLSIILYNNDINQESGVAFHNDSFQLGELRLHLMASSGKMFKDGSMNVSVKLKTCTLDDLREGIERATSRMIDRKNDQDNNSSMIDISYKQDKNGSQIDAVLDKLYVCASVEFLMTVADFFIKAVPQSPENVAKETQILPRQTATGKVKIEKDDSVRPNMTLKAMITDPEVVFVASLTKADAPALTASFQCNLSLSTSKLEQMMEASVRDLKVLACPFLREKRGKNITTVLQPCSLFMEKCTWASGKQNINIMVKEFIIKISPIILNTVLTIMAALSPKTKEDGSKDTSKEMENLWGIKSINDYNTWFLGVDTATEITESFKGIEHSLIEENCGVVVESIQVTLECGLGHRTVPLLLAESKFSGNIKNWTSLMAAVADVTLQVHYYNEIHAVWEPLIERVEGKRQWNLRLDVKKNPVQDKSLLPGDDFIPEPQMAIHISSGNTMNITISKSCLNVFNNLAKGFSEGTASTFDYSLKDRAPFTVKNAVGVPIKVKPNCNLRVMGFPEKSDIFDVDAGQNLELEYASMVPSSQGNLSILSRQESSFFTLTIVPHGYTEVANIPVARPGRRLYNVRNPNASHSDSVLVQIDATEGNKVITLRSPLQIKNHFSIAFIIYKFVKNVKLLERIGIARPEEEFHVPLDSYRCQLFIQPAGILEHQYKESTTYISWKEELHRSREVRCMLQCPSVEVSFLPLIVNTVALPDELSYICTHGEDWDVAYIIHLYPSLTLRNLLPYSLRYLLEGTAETHELAEGSTADVLHSRISGEIMELVLVKYQGKNWNGHFRIRDTLPEFFPVCFSSDSTEVTTVDLSVHVRRIGSRMVLSVFSPYWLINKTTRVLQYRSEDIHVKHPADFRDIILFSFKKKNIFTKNKVQLKISTSAWSSSFSLDTVGSYGCVKCPANNMEYLVGVSIKMSSFNLSRIVTLTPFCTIANKSSLELEVGEIASDGSMPTNKWNYIASSECLPFWPESLSGKLCVRVVGCEGSSKPFFYNRQDNGTLLSLEDLNGGILVDVNTAEHSTVITFSDYHEGSAPALIMNHTPWDILTYKQSGSPEEMVLLPRQARLFAWADPTGTRKLTWTYAANVGEHDLLKDGCGQFPYDANIQIHWVSFLDGRQRVLLFTDDVALVSKALQAEEMEQADYEITLSLHSLGLSLVNNESKQEVSYIGITSSGVVWEVKPKQKWKPFSQKQIILLEQSYQKHQISRDHGWIKLDNNFEVNFDKDPMEMRLPIRSPIKRDFLSGIQIEFKQSSHQRSLRARLYWLQVDNQLPGAMFPVVFHPVAPPKSIALDSEPKPFIDVSVITRFNEYSKVLQFKYFMVLIQEMALKIDQGFLGAIIALFTPTTDPEAERRRTKLIQQDIDALNAELMETSMTDMSILSFFEHFHISPVKLHLSLSLGSGGEESDKEKQEMFAVHSVNLLLKSIGATLTDVDDLIFKLAYYEIRYQFYKRDQLIWSVVRHYSEQFLKQMYVLVLGLDVLGNPFGLIRGLSEGVEALFYEPFQGAVQGPEEFAEGLVIGVRSLFGHTVGGAAGVVSRITGSVGKGLAAITMDKEYQQKRREELSRQPRDFGDSLARGGKGFLRGVVGGVTGIITKPVEGAKKEGAAGFFKGIGKGLVGAVARPTGGIVDMASSTFQGIQRAAESTEEVSSLRPPRLIHEDGIIRPYDRQESEGSDLLENHIKKLEGETYRYHCAIPGSKKTILMVTNRRVLCIKEVEILGLMCVDWQCPFEDFVFPPSVSENVLKISVKEQGLFHKKDSANQGCVRKVYLKDTATAERACNAIEDAQSTRQQQKLMKQSSVRLLRPQLPS

SEQ ID NO: 919 - protein, 428 aa, Homo sapiens
MQELHLLWWALLLGLAQACPEPCDCGEKYGFQIADCAYRDLESVPPGFPANVTTLSLSANRLPGLPEGAFREVPLLQSLWLAHNEIRTVAAGALASLSHLKSLDLSHNLISDFAWSDLHNLSALQLLKMDSNELTFIPRDAFRSLRALRSLQLNHNRLHTLAEGTFTPLTALSHLQINENPFDCTCGIVWLKTWALTTAVSIPEQDNIACTSPHVLKGTPLSRLPPLPCSAPSVQLSYQPSQDGAELRPGFVLALHCDVDGQPAPQLHWHIQIPSGIVEITSPNVGTDGRALPGTPVASSQPRFQAFANGSLLIPDFGKLEEGTYSCLATNELGSAESSVDVALATPGEGGEDTLGRRFHGKAVEGKGCYTVDNEVQPSGPEDNVVIIYLSRAGNPEAAVAEGVPGQLPPGLLLLGQSLLLFFFLTSF

SEQ ID NO: 920 - protein, 780 aa, Homo sapiens
MRTLEDSSGTVLHRLIQEQLRYGNLTETRTLLAIQQQALRGGAGTGGTGSPQASLEILAPEDSQVLQQATRQEPQGQEHQGGENHLAENTLYRLCPQPSKGEELPTYEEAKAHSQYYAAQQAGTRPHAGDRDPRGAPGGSRRQDEALRELRHGHVRSLSERLLQLSLERNGARAPSHMSSSHSFPQLARNQQGPPLRGPPAEGPESRGPPPQYPHVVLAHETTTAVTDPRYRARGSPHFQHAEVRILQAQVPPVFLQQQQQYQYLQQSQEHPPPPHPAALGHGPLSSLSPPAVEGPVSAQASSATSGSAHLAQMEAVLRENARLQRDNERLQRELESSAEKAGRIEKLESEIQRLSEAHESLTRASSKREALEKTMRNKMDSEMRRLQDFNRDLRERLESANRRLASKTQEAQAGSQDMVAKLLAQSYEQQQEQEKLEREMALLRGAIEDQRRRAELLEQALGNAQGRAARAEEELRKKQAYVEKVERLQQALGQLQAACEKREQLELRLRTRLEQELKALRAQQRQAGAPGGSSGSGGSPELSALRLSEQLREKEEQILALEADMTKWEQKYLEERAMRQFAMDAAATAAAQRDTTLIRHSPQPSPSSSFNEGLLTGGHRHQEMESRLKVLHAQILEKDAVIKVLQQRSRRDPGKAIQGSLRPAKSVPSVFAAAAAGTQGWQGLSSSERQTADAPARLTTADRAPTEEPVVTAPPAAHAKHGSRDGSTQTEGPPDSTSTCLPPEPDSLLGCSSSQRAASLDSVATSRVQDLSDMVEILI

SEQ ID NO: 921 - protein, 580 aa, Homo sapiens
MGTTGLESLSLGDRGAAPTVTSSERLVPDPPNDLRKEDVAMELERVGEDEEQMMIKRSSECNPLLQEPIASAQFGATAGTECRKSVPCGWERVVKQRLFGKTAGRFDVYFISPQGLKFRSKSSLANYLHKNGETSLKPEDFDFTVLSKRGIKSRYKDCSMAALTSHLQNQSNNSNWNLRTRSKCKKDVFMPPSSSSELQESRGLSNFTSTHLLLKEDEGVDDVNFRKVRKPKGKVTILKGIPIKKTKKGCRKSCSGFVQSDSKRESVCNKADAESEPVAQKSQLDRTVCISDAGACGETLSVTSEENSLVKKKERSLSSGSNFCSEQKTSGIINKFCSAKDSEHNEKYEDTFLESEEIGTKVEVVERKEHLHTDILKRGSEMDNNCSPTRKDFTGEKIFQEDTIPRTQIERRKTSLYFSSKYNKEALSPPRRKAFKKWTPPRSPFNLVQETLFHDPWKLLIATIFLNRTSGKMAIPVLWKFLEKYPSAEVARTADWRDVSELLKPLGLYDLRAKTIVKFSDEYLTKQWKYPIELHGIGKYGNDSYRIFCVNEWKQVHPEDHKLNKYHDWLWENHEKLSLS

SEQ ID NO: 922 - protein, 953 aa, Homo sapiens
MTAAENVCYTLINVPMDSEPPSEISLKNDLEKGDVKSKTEALKKVIIMILNGEKLPGLLMTIIRFVLPLQDHTIKKLLLVFWEIVPKTTPDGRLLHEMILVCDAYRKDLQHPNEFIRGSTLRFLCKLKEAELLEPLMPAIRACLEHRHSYVRRNAVLAIYTIYRNFEHLIPDAPELIHDFLVNEKDASCKRNAFMMLIHADQDRALDYLSTCIDQVQTFGDILQLVIVELIYKVCHANPSERARFIRCIYNLLQSSSPAVKYEAAGTLVTLSSAPTAIKAAAQCYIDLIIKESDNNVKLIVLDRLIELKEHPAHERVLQDLVMDILRVLSTPDLEVRKKTLQLALDLVSSRNVEELVIVLKKEVIKTNNVSEHEDTDKYRQLLVRTLHSCSVRFPDMAANVIPVLMEFLSDNNEAAAADVLEFVREAIQRFDNLRMLIVEKMLEVFHAIKSVKIYRGALWILGEYCSTKEDIQSVMTEIRRSLGEIPIVESEIKKEAGELKPEEEITVGPVQKLVTEMGTYATQSALSSSRPTKKEEDRPPLRGFLLDGDFFVAASLATTLTKIALRYVALVQEKKKQNSFVAEAMLLMATILHLGKSSLPKKPITDDDVDRISLCLKVLSECSPLMNDIFNKECRQSLSHMLSAKLEEEKLSQKKESEKRNVTVQPDDPISFMQLTAKNEMNCKEDQFQLSLLAAMGNTQRKEAADPLASKLNKVTQLTGFSDPVYAEAYVHVNQYDIVLDVLVVNQTSDTLQNCTLELATLGDLKLVEKPSPLTLAPHDFANIKANVKVASTENGIIFGNIVYDVSGAASDRNCVVLSDIHIDIMDYIQPATCTDAEFRQMWAEFEWENKVTVNTNMVDLNDYLQHILKSTNMKCLTPEKALSGYCGFMAANLYARSIFGEDALANVSIEKPIHQGPDAAVTGHIRIRAKSQGMALSLGDKINLSQKKTSI

SEQ ID NO: 923 - protein, 320 aa, Homo sapiens
MELLSPPLRDVDLTAPDGSLCSFATTDDFYDDPCFDSPDLRFFEDLDPRLMHVGALLKPEEHSHFPAAVHPAPGAREDEHVRAPSGHHQAGRCLLWACKACKRKTTNADRRKAATMRERRRLSKVNEAFETLKRCTSSNPNQRLPKVEILRNAIRYIEGLQALLRDQDAAPPGAAAAFYAPGPLPPGRGGEHYSGDSDASSPRSNCSDGMMDYSGPPSGARRRNCYEGAYYNEAPSEPRPGKSAAVSSLDCLSSIVERISTESPAAPALLLADVPSESPPRRQEAAAPSEGESSGDPTQSPDAAPQCPAGANPNPIYQVL

SEQ ID NO: 924 - protein, 444 aa, Homo sapiens
MIEDNKENKDHSLERGRASLIFSLKNEVGGLIKALKIFQEKHVNLLHIESRKSKRRNSEFEIFVDCDINREQLNDIFHLLKSHTNVLSVNLPDNFTLKEDGMETVPWFPKKISDLDHCANRVLMYGSELDADHPGFKDNVYRKRRKYFADLAMNYKHGDPIPKVEFTEEEIKTWGTVFQELNKLYPTHACREYLKNLPLLSKYCGYREDNIPQLEDVSNFLKERTGFSIRPVAGYLSPRDFLSGLAFRVFHCTQYVRHSSDPFYTPEPDTCHELLGHVPLLAEPSFAQFSQEIGLASLGASEEAVQKLATCYFFTVEFGLCKQDGQLRVFGAGLLSSISELKHALSGHAKVKPFDPKITCKQECLITTFQDVYFVSESFEDAKEKMREFTKTIKRPFGVKYNPYTRSIQILKDTKSITSAMNELQHDLDVVSDALAKVSRKPSI

SEQ ID NO: 925 - protein, 867 aa, Homo sapiens
MENEKENLFCEPHKRGLMKTPLKESTTANIVLAEIQPDFGPLTTPTKPKEGSQGEPWTPTANLKMLISAVSPEIRNRDQKRGLFDNRSGLPEAKDCIHEHLSGDEFEKSQPSRKEKSLGLLCHKFLARYPNYPNPAVNNDICLDEVAEELNVERRRIYDIVNVLESLHMVSRLAKNRYTWHGRHNLNKTLGTLKSIGEENKYAEQIMMIKKKEYEQEFDFIKSYSIEDHIIKSNTGPNGHPDMCFVELPGVEFRAASVNSRKDKSLRVMSQKFVMLFLVSTPQIVSLEVAAKILIGEDHVEDLDKSKFKTKIRRLYDIANVLSSLDLIKKVHVTEERGRKPAFKWTGPEISPNTSGSSPVIHFTPSDLEVRRSSKENCAKNLFSTRGKPNFTRHPSLIKLVKSIESDRRKINSAPSSPIKTNKAESSQNSAPFPSKMAQLAAICKMQLEEQSSESRQKVKVQLARSGPCKPVAPLDPPVNAEMELTAPSLIQPLGMVPLIPSPLSSAVPLILPQAPSGPSYAIYLQPTQAHQSVTPPQGLSPTVCTTHSSKATGSKDSTDATTEKAANDTSKASASTRPGSLLPAPERQGAKSRTREPAGERGSKRASMLEDSGSKKKFKEDLKGLENVSATLFPSGYLIPLTQCSSLGAESILSGKENSSALSPNHRIYSSPIAGVIPVTSSELTAVNFPSFHVTPLKLMVSPTSVAAVPVGNSPALASSHPVPIQNPSSAIVNFTLQHLGLISPNVQLSASPGSGIVPVSPRIESVNVAPENAGTQQGRATNYDSPVPGQSQPNGQSVAVTGAQQPVPVTPKGSQLVAESFFRTPGGPTKPTSSSCMDFEGANKTSLGTLFVPQRKLEVSTEDVH

SEQ ID NO: 926 - protein, 1406 aa, Homo sapiens
MDMVENADSLQAQERKDILMKYDKGHRAGLPEDKGPEPVGINSSIDRFGILHETELPPVTAREAKKIRREMTRTSKWMEMLGEWETYKHSSKLIDRVYKGIPMNIRGPVWSVLLNIQEIKLKNPGRYQIMKERGKRSSEHIHHIDLDVRTTLRNHVFFRDRYGAKQRELFYILLAYSEYNPEVGYCRDLSHITALFLLYLPEEDAFWALVQLLASERHSLPGFHSPNGGTVQGLQDQQEHVVPKSQPKTMWHQDKEGLCGQCASLGCLLRNLIDGISLGLTLRLWDVYLVEGEQVLMPITSIALKVQQKRLMKTSRCGLWARLRNQFFDTWAMNDDTVLKHLRASTKKLTRKQGDLPPPAKREQGSLAPRPVPASRGGKTLCKGYRQAPPGPPAQFQRPICSASPPWASRFSTPCPGGAVREDTYPVGTQGVPSLALAQGGPQGSWRFLEWKSMPRLPTDLDIGGPWFPHYDFEWSCWVRAISQEDQLATCWQAEHCGEVHNKDMSWPEEMSFTANSSKIDRQKVPTEKGATGLSNLGNTCFMNSSIQCVSNTQPLTQYFISGRHLYELNRTNPIGMKGHMAKCYGDLVQELWSGTQKSVAPLKLRRTIAKYAPKFDGFQQQDSQELLAFLLDGLHEDLNRVHEKPYVELKDSDGRPDWEVAAEAWDNHLRRNRSIIVDLFHGQLRSQVKCKTCGHISVRFDPFNFLSLPLPMDSYMDLEITVIKLDGTTPVRYGLRLNMDEKYTGLKKQLRDLCGLNSEQILLAEVHDSNIKNFPQDNQKVQLSVSGFLCAFEIPVPSSPISASSPTQIDFSSSPSTNGMFTLTTNGDLPKPIFIPNGMPNTVVPCGTEKNFTNGMVNGHMPSLPDSPFTGYIIAVHRKMMRTELYFLSPQENRPSLFGMPLIVPCTVHTRKKDLYDAVWIQVSWLARPLPPQEASIHAQDRDNCMGYQYPFTLRVVQKDGNSCAWCPQYRFCRGCKIDCGEDRAFIGNAYIAVDWHPTALHLRYQTSQERVVDKHESVEQSRRAQAEPINLDSCLRAFTSEEELGESEMYYCSKCKTHCLATKKLDLWRLPPFLIIHLKRFQFVNDQWIKSQKIVRFLRESFDPSAFLVPRDPALCQHKPLTPQGDELSKPRILAREVKKVDAQSSAGKEDMLLSKSPSSLSANISSSPKGSPSSSRKSGTSCPSSKNSSPNSSPRTLGRSKGRLRLPQIGSKNKPSSSKKNLDASKENGAGQICELADALSRGHMRGGSQPELVTPQDHEVALANGFLYEHEACGNGCGDGYSNGQLGNHSEEDSTDDQREDTHIKPIYNLYAISCHSGILSGGHYITYAKNPNCKWYCYNDSSCEELHPDEIDTDSAYILFYEQQGIDYAQFLPKIDGKKMADTSSTDEDSESDYEKYSMLQ

SEQ ID NO: 927 - protein, 444 aa, Homo sapiens
MEPPGPVRGPLQDSSWYEPSAELVQTRMAVSLTAAETLALQGTQGQEKMMMMGPKEEEQSCEYETRLPGNHSTSQEIFRQRFRHLRYQETPGPREALSQLRVLCCEWLRPEKHTKEQILEFLVLEQFLTILPEELQSWVRGHHPKSGEEAVTVLEDLEKGLEPEPQVPGPAHGPAQEEPWEKKESLGAAQEALSIQLQPKETQPFPKSEQVYLHFLSVVTEDGPEPKDKGSLPQPPITEVESQVFSEKLATDTSTFEATSEGTLELQQRNPKAERLRWSPAQEESFRQMVVIHKEIPTGKKDHECSECGKTFIYNSHLVVHQRVHSGEKPYKCSDCGKTFKQSSNLGQHQRIHTGEKPFECNECGKAFRWGAHLVQHQRIHSGEKPYECNECGKAFSQSSYLSQHRRIHSGEKPFICKECGKAYGWCSELIRHRRVHARKEPSH

SEQ ID NO: 928 - protein, 321 aa, Homo sapiens
MDAALLLNVEGVKKTILHGGTGELPNFITGSRVIFHFRTMKCDEERTVIDDSRQVGQPMHIIIGNMFKLEVWEILLTSMRVHEVAEFWCDTIVDAPSDYQRETWNLSNHEKMKAVPVLHGEGNRLFKLGRYEEASSKYQEAIICLRNLQTKEKPWEVQWLKLEKMINTLILNYCQCLLKKEEYYEVLEHTSDILRHHPGIVKAYYVRARAHAEVWNEAEAKADLQKVLELEPSMQKAVRRELRLLENRMAEKQEEERLRCRNMLSQGATQPPAEPPTEPPAQSSTEPPAEPPTAPSAELSAGPPAEPATEPPPSPGHSLQH

SEQ ID NO: 929 - protein, 354 aa, Homo sapiens
MRLAVLFSGALLGLLAAQGTGNDCPHKKSATLLPSFTVTPTVTESTGTTSHRTTKSHKTTTHRTTTTGTTSHGPTTATHNPTTTSHGNVTVHPTSNSTATSQGPSTATHSPATTSHGNATVHPTSNSTATSPGFTSSAHPEPPPPSPSPSPTSKETIGDYTWTNGSQPCVHLQAQIQIRVMYTTQGGGEAWGISVLNPNKTKVQGSCEGAHPHLLLSFPYGHLSFGFMQDLQQKVVYLSYMAVEYNVSFPHAAQWTFSAQNASLRDLQAPLGQSFSCSNSSIILSPAVHLDLLSLRLQAAQLPHTGVFGQSFSCPSDRSILLPLIIGLILLGLLALVLIAFCIIRRRPSAYQAL

SEQ ID NO: 930 - protein, 673 aa, Homo sapiens
MGGLASGGDVEPGLPVEVRGSNGAFYKGFVKDVHEDSVTIFFENNWQSERQIPFGDVRLPPPADYNKEITEGDEVEVYSRANEQEPCGWWLARVRMMKGDFYVIEYAACDATYNEIVTLERLRPVNPNPLATKGSFFKVTMAVPEDLREACSNENVHKEFKKALGANCIFLNITNSELFILSTTEAPVKRASLLGDMHFRSLRTKLLLMSRNEEATKHLETSKQLAAAFQEEFTVREDLMGLAIGTHGANIQQARKVPGVTAIELGEETCTFRIYGETPEACRQARSYLEFSEDSVQVPRNLVGKVIGKNGKVIQEIVDKSGVVRVRVEGDNDKKNPREEGMVPFIFVGTRENISNAQALLEYHLSYLQEVEQLRLERLQIDEQLRQIGLGFRPPGSGRGSGGSDKAGYSTDESSSSSLHATRTYGGSYGGRGRGRRTGGPAYGPSSDVSTASETESEKREEPNRAGPGDRDPPTRGEESRRRPTGGRGRGPPPAPRPTSRYNSSSISSVLKDPDSNPYSLLDTSEPEPPVDSEPGEPPPASARRRRSRRRRTDEDRTVMDGGLESDGPNMTENGLEDESRPQRRNRSRRRRNRGNRTDGSISGDRQPVTVADYISRAESQSRQRPPLERTKPSEDSLSGQKGDSVSKLPKGPSENGELSAPLELGSMVNGVS

SEQ ID NO: 931 - protein, 411 aa, Homo sapiens
MGWITEDLIRRNAEHNDCVIFSLEELSLHQQEIERLEHIDKWCRDLKILYLQNNLIGKIENVSKLKKLEYLNLALNNIEKIENLEGCEELAKLDLTVNFIGELSSIKNLQHNIHLKELFLMGNPCASFDHYREFVVATLPQLKWLDGKEIEPSERIKALQDYSVIEPQIREQEKDHCLKRAKLKEEAQRKHQEEDKNEDKRSNAGFDGRWYTDINATLSSLESKDHLQAPDTEEHNTKKLDNSEDDLEFWNKPCLFTPESRLETLRHMEKQRKKQEKLSEKKKKVKPPRTLITEDGKALNVNEPKIDFSLKDNEKQIILDLAVYRYMDTSLIDVDVQPTYVRVMIKGKLVLPAEVKPDSSSAKRSQTTGHLVICMPKVGEVITGGQRAFKSMKTTSDRSREQTNTSYSTGF

SEQ ID NO: 932 - protein, 403 aa, Homo sapiens
MAGAATQASLESAPRIMRLVAECSRSRARAGELWLPHGTVATPVFMPVGTQATMKGITTEQLDALGCRICLGNTYHLGLRPGPELIQKANGLHGFMNWPHNLLTDSGGFQMVSLVSLSEVTEEGVRFRSPYDGNETLLSPEKSVQIQNALGSDIIMQLDDVVSSTVTGPRVEEAMYRSIRWLDRCIAAHQRPDKQNLFAIIQGGLDADLRATCLEEMTKRDVPGFAIGGLSGGESKSQFWRMVALSTSRLPKDKPRYLMGVGYATDLVVCVALGCDMFDCVFPTRTARFGSALVPTGNLQLRKKVFEKDFGPIDPECTCPTCQKHSRAFLHALLHSDNTAALHHLTVHNIAYQLQLMSAVRTSIVEKRFPDFVRDFMGAMYGDPTLCPTWATDALASVGITLG

SEQ ID NO: 933 - protein, 463 aa, Homo sapiens
MLLLLLPLLWGRERAEGQTSKLLTMQSSVTVQEGLCVHVPCSFSYPSHGWIYPGPVVHGYWFREGANTDQDAPVATNNPARAVWEETRDRFHLLGDPHTKNCTLSIRDARRSDAGRYFFRMEKGSIKWNYKHHRLSVNVTALTHRPNILIPGTLESGCPQNLTCSVPWACEQGTPPMISWIGTSVSPLDPSTTRSSVLTLIPQPQDHGTSLTCQVTFPGASVTTNKTVHLNVSYPPQNLTMTVFQGDGTVSTVLGNGSSLSLPEGQSLRLVCAVDAVDSNPPARLSLSWRGLTLCPSQPSNPGVLELPWVHLRDAAEFTCRAQNPLGSQQVYLNVSLQSKATSGVTQGVVGGAGATALVFLSFCVIFVVVRSCRKKSARPAAGVGDTGIEDANAVRGSASQGPLTEPWAEDSPPDQPPPASARSSVGEGELQYASLSFQMVKPWDSRGQEATDTEYSEIKIHR

SEQ ID NO: 934 - protein, 902 aa, Homo sapiens
MGAASCEDEELEFKLVFGEEKEAPPLGAGGLGEELDSEDAPPCCRLALGEPPPYGAAPIGIPRPPPPRPGMHSPPPRPAPSPGTWESQPARSVRLGGPGGGAGGAGGGRVLECPSIRITSISPTPEPPAALEDNPDAWGDGSPRDYPPPEGFGGYREAGGQGGGAFFSPSPGSSSLSSWSFFSDASDEAALYAACDEVESELNEAASRFGLGSPLPSPRASPRPWTPEDPWSLYGPSPGGRGPEDSWLLLSAPGPTPASPRPASPCGKRRYSSSGTPSSASPALSRRGSLGEEGSEPPPPPPLPLARDPGSPGPFDYVGAPPAESIPQKTRRTSSEQAVALPRSEEPASCNGKLPLGAEESVAPPGGSRKEVAGMDYLAVPSPLAWSKARIGGHSPIFRTSALPPLDWPLPSQYEQLELRIEVQPRAHHRAHYETEGSRGAVKAAPGGHPVVKLLGYSEKPLTLQMFIGTADERNLRPHAFYQVHRITGKMVATASYEAVVSGTKVLEMTLLPENNMAANIDCAGILKLRNSDIELRKGETDIGRKNTRVRLVFRVHVPQGGGKVVSVQAASVPIECSQRSAQELPQVEAYSPSACSVRGGEELVLTGSNFLPDSKVVFIERGPDGKLQWEEEATVNRLQSNEVTLTLTVPEYSNKRVSRPVQVYFYVSNGRRKRSPTQSFRFLPVICKEEPLPDSSLRGFPSASATPFGTDMDFSPPRPPYPSYPHEDPACETPYLSEGFGYGMPPLYPQTGPPPSYRPGLRMFPETRGTTGCAQPPAVSFLPRPFPSDPYGGRGSSFSLGLPFSPPAPFRPPPLPASPPLEGPFPSQSDVHPLPAEGYNKVGPGYGPGEGAPEQEKSRGGYSSGFRDSVPIQGITLEEVSEIIGRDLSGFPAPPGEEPPA

SEQ ID NO: 935 - protein, 472 aa, Homo sapiens
MLGTVKMEGHETSDWNSYYADTQEAYSSVPVSNMNSGLGSMNSMNTYMTMNTMTTSGNMTPASFNMSYANPGLGAGLSPGAVAGMPGGSAGAMNSMTAAGVTAMGTALSPSGMGAMGAQQAASMNGLGPYAAAMNPCMSPMAYAPSNLGRSRAGGGGDAKTFKRSYPHAKPPYSYISLITMAIQQAPSKMLTLSEIYQWIMDLFPYYRQNQQRWQNSIRHSLSFNDCFVKVARSPDKPGKGSYWTLHPDSGNMFENGCYLRRQKRFKCEKQPGAGGGGGSGSGGSGAKGGPESRKDPSGASNPSADSPLHRGVHGKTGQLEGAPAPGPAASPQTLDHSGATATGGASELKTPASSTAPPISSGPGALASVPASHPAHGLAPHESQLHLKGDPHYSFNHPFSINNLMSSSEQQHKLDFKAYEQALQYSPYGSTLPASLPLGSASVTTRSPIEPSALEPAYYQGVYSRPVLNTS

SEQ ID NO: 936 - protein, 239 aa, Homo sapiens
MPLGHIMRLDLEKIALEYIVPCLHEVGFCYLDNFLGEVVGDCVLERVKQLHCTGALRDGQLAGPRAGVSKRHLRGDQITWIGGNEEGCEAISFLLSLIDRLVLYCGSRLGKYYVKERSKAMVACYPGNGTGYVRHVDNPNGDGRCITCIYYLNKNWDAKLHGGILRIFPEGKSFIADVEPIFDRLLFFWSDRRNPHEVQPSYATRYAMTVWYFDAEERAEAKKKFRNLTRKTESALTED

SEQ ID NO: 937 - protein, 821 aa, Homo sapiens
MRGFNLLLFWGCCVMHSWEGHIRPTRKPNTKGNNCRDSTLCPAYATCTNTVDSYYCACKQGFLSSNGQNHFKDPGVRCKDIDECSQSPQPCGPNSSCKNLSGRYKCSCLDGFSSPTGNDWVPGKPGNFSCTDINECLTSSVCPEHSDCVNSMGSYSCSCQVGFISRNSTCEDVDECADPRACPEHATCNNTVGNYSCFCNPGFESSSGHLSFQGLKASCEDIDECTEMCPINSTCTNTPGSYFCTCHPGFAPSNGQLNFTDQGVECRDIDECRQDPSTCGPNSICTNALGSYSCGCIAGFHPNPEGSQKDGNFSCQRVLFKCKEDVIPDNKQIQQCQEGTAVKPAYVSFCAQINNIFSVLDKVCENKTTVVSLKNTTESFVPVLKQISTWTKFTKEETSSLATVFLESVESMTLASFWKPSANITPAVRTEYLDIESKVINKECSEENVTLDLVAKGDKMKIGCSTIEESESTETTGVAFVSFVGMESVLNERFFKDHQAPLTTSEIKLKMNSRVVGGIMTGEKKDGFSDPIIYTLENIQPKQKFERPICVSWSTDVKGGRWTSFGCVILEASETYTICSCNQMANLAVIMASGELTMGCAIIAGFLHYLFLACFFWMLVEAVILFLMVRNLKVVNYFSSRNIKMLHICAFGYGLPMLVVVISASVQPQGYGMHNRCWLNTETGFIWSFLGPVCTVIVINSLLLTWTLWILRQRLSSVNAEVSTLKDTRLLTFKAFAQLFILGCSWVLGIFQIGPVAGVMAYLFTIINSLQGAFIFLIHCLLNGQVREEYKRWITGKTKPSSQSQTSRILLSSMPSASKTG

SEQ ID NO: 938 - protein, 252 aa, Homo sapiens
MEPQSMKGQKRPFGGPWRLKVLGGPPWLRRTLPKLGRPKEAPVARMSTQSTHPLKPEAPRLPPGIPESPSCQRRHTLPASEFRCLTPEDAVSAFEIEREAFISVLGVCPLYLDEIRHFLTLCPELSLGWFEEGCLVAFIIGSLWDKERLMQESLTLHRSGGHIAHLHVLAVHRAFRQQGRGPILLWRYLHHLGSQPAVRRAALMCEDALVPFYERFSFHAVGPCAITVGSLTFMELHCSLRGHPFLRRNSGC

SEQ ID NO: 939 - protein, 776 aa, Homo sapiens
MNPEEQIVTWLISLGVLESPKKTICDPEEFLKSSLKNGVVLCKLINRLMPGSVEKFCLDPQTEADCINNINDFLKGCATLQVEIFDPDDLYSGVNFSKVLSTLLAVNKATEDQLSERPCGRSSSLSAANTSQTNPQGAVSSTVSGLQRQSKTVEMTENGSHQLIVKARFNFKQTNEDELSVCKGDIIYVTRVEEGGWWEGTLNGRTGWFPSNYVREIKSSERPLSPKAVKGFETAPLTKNYYTVVLQNILDTEKEYAKELQSLLVTYLRPLQSNNNLSTVEVTSLLGNFEEVCTFQQTLCQALEECSKFPENQHKVGGCLLSLMPHFKSMYLAYCANHPSAVNVLTQHSDELEQFMENQGASSPGILILTTNLSKPFMRLEKYVTLLQELERHMEDTHPDHQDILKAIVAFKTLMGQCQDLRKRKQLELQILSEPIQAWEGEDIKNLGNVIFMSQVMVQYGACEEKEERYLMLFSNVLIMLSASPRMSGFIYQGKIPIAGTVVTRLDEIEGNDCTFEITGNTVERIVVHCNNNQDFQEWLEQLNRLIRGPASCSSLSKTSSSSCSAHSSFSSTGQPRGPLEPPQIIKPWSLSCLRPAPPLRPSAALGYKERMSYILKESSKSPKTMKKFLHKRKTERKPSEEEYVIRKSTAALEEDAQILKVIEAYCTSANFQQGHGSSTRKDSIPQVLLPEEEKLIIEETRSNGQTIMEEKSLVDTVYALKDEVRELKQENKRMKQCLEEELKSRRDLEKLVRRLLKQTDECIRGESSSKTSILP

SEQ ID NO: 940 - protein, 327 aa, Homo sapiens
MQMPAMMSLLLVSVGLMEALQAQSHPITRRDLFSQEIQLDMALASFDDQYAGCAAAMTAALPDLNHTEFQANQVYADSWTLASSQWQERQARWPEWSLSPTRPSPPPLGFRDEHGVALLAYTANSPLHKEFNAAVREAGRSRAHYLHHFSFKTLHFLLTEALQLLGSGQRPPRCHQVFRGVHGLRFRPAGPRATVRLGGFASASLKHVAAQQFGEDTFFGIWTCLGAPIKGYSFFPGEEEVLIPPFETFQVINASRLAQGPARIYLRALGKHSTYNCEYIKDKKCKSGPCHLDNSAMGQSPLSAVWSLLLLLWFLVVRAFPDGPGLL

SEQ ID NO: 941 - protein, 315 aa, Homo sapiens
MAAPSCGGDRKARLTPSLPHESTANPETPNSTISREASTQSSSAATSQGYILPEGKIMPNTVFVGGIDVRMDETEIRSFFARYGSVKEVKIITDRTGVSKGYGFVSFFNDVDVQKIVESQINFHGKKLKLGPAIRKQNLCAYHVQPRPLVFNHPPPPQFQNVWTNPNTETYMQPTTTMNPITQYVQAYPTYPNSPVQVITGYQLPVYNYQMPPQWPVGEQRSYVVPPAYSAVNYHCNEVDPGAEVVPNECSVHEATPPSGNGPQKKSVDRSIQTVVSCLFNPENRLRNSVVTQDDYFKDKRVHHFRRSRAMLKSV

SEQ ID NO: 942 - protein, 1336 aa, Homo sapiens
MMEIQMDEGGGVVVYQDDYCSGSVMSERVSGLAGSIYREFERLIHCYDEEVVKELMPLVVNVLENLDSVLSENQEHEVELELLREDNEQLLTQYEREKALRRQAEEKFIEFEDALEQEKKELQIQVEHYEFQTRQLELKAKNYADQISRLEERESEMKKEYNALHQRHTEMIQTYVEHIERSKMQQVGGNSQTESSLPGRRKERPTSLNVFPLADGTVRAQIGGKLVPAGDHWHLSDLGQLQSSSSYQCPQDEMSESGQSSAAATPSTTGTKSNTPTSSVPSAAVTPLNESLQPLGDYGVGSKNSKRAREKRDSRNMEVQVTQEMRNVSIGMGSSDEWSDVQDIIDSTPELDMCPETRLDRTGSSPTQGIVNKAFGINTDSLYHELSTAGSEVIGDVDEGADLLGEFSVRDDFFGMGKEVGNLLLENSQLLETKNALNVVKNDLIAKVDQLSGEQEVLRGELEAAKQAKVKLENRIKELEEELKRVKSEAIIARREPKEEAEDVSSYLCTESDKIPMAQRRRFTRVEMARVLMERNQYKERLMELQEAVRWTEMIRASREHPSVQEKKKSTIWQFFSRLFSSSSSPPPAKRPYPSVNIHYKSPTTAGFSQRRNHAMCPISAGSRPLEFFPDDDCTSSARREQKREQYRQVREHVRNDDGRLQACGWSLPAKYKQLSPNGGQEDTRMKNVPVPVYCRPLVEKDPTMKLWCAAGVNLSGWRPNEDDAGNGVKPAPGRDPLTCDREGDGEPKSAHTSPEKKKAKELPEMDATSSRVWILTSTLTTSKVVIIDANQPGTVVDQFTVCNAHVLCISSIPAASDSDYPPGEMFLDSDVNPEDPGADGVLAGITLVGCATRCNVPRSNCSSRGDTPVLDKGQGEVATIANGKVNPSQSTEEATEATEVPDPGPSEPETATLRPGPLTEHVFTDPAPTPSSGPQPGSENGPEPDSSSTRPEPEPSGDPTGAGSSAAPTMWLGAQNGWLYVHSAVANWKKCLHSIKLKDSVLSLVHVKGRVLVALADGTLAIFHRGEDGQWDLSNYHLMDLGHPHHSIRCMAVVYDRVWCGYKNKVHVIQPKTMQIEKSFDAHPRRESQVRQLAWIGDGVWVSIRLDSTLRLYHAHTHQHLQDVDIEPYVSKMLGTGKLGFSFVRITALLVAGSRLWVGTGNGVVISIPLTETVVLHRGQLLGLRANKTSPTSGEGARPGGIIHVYGDDSSDRAASSFIPYCSMAQAQLCFHGHRDAVKFFVSVPGNVLATLNGSVLDSPAEGPGPAAPASEVEGQKLRNVLVLSGGEGYIDFRIGDGEDDETEEGAGDMSQVKPVLSKAERSHIIVWQVSYTPE

SEQ ID NO: 943 - protein, 465 aa, Homo sapiens
MVQKKPAELQGFHRSFKGQNPFELAFSLDQPDHGDSDFGLQCSARPDMPASQPIDIPDAKKRGKKKKRGRATDSFSGRFEDVYQLQEDVLGEGAHARVQTCINLITSQEYAVKIIEKQPGHIRSRVFREVEMLYQCQGHRNVLELIEFFEEEDRFYLVFEKMRGGSILSHIHKRRHFNELEASVVVQDVASALDFLHNKGIAHRDLKPENILCEHPNQVSPVKICDFDLGSGIKLNGDCSPISTPELLTPCGSAEYMAPEVVEAFSEEASIYDKRCDLWSLGVILYILLSGYPPFVGRCGSDCGWDRGEACPACQNMLFESIQEGKYEFPDKDWAHISCAAKDLISKLLVRDAKQRLSAAQVLQHPWVQGCAPENTLPTPMVLQRNSCAKDLTSFAAEAIAMNRQLAQHDEDLAEEEAAGQGQPVLVRATSRCLQLSPPSQSKLAQRRQRASLSSAPVVLVGDHA

SEQ ID NO: 944 - protein, 578 aa, Homo sapiens
MEPDVPLPQTLLSHPSYLKVFVPDYTRELLLELRDCVSNGSLGCPVRLTVGPVTLPSNFQKVLTCTGAPWPCRLLLPSPPWDRWLQVTAESLVGPLGTVAFSAVAALTACRPRSVTIQPLLQSSQNQSFNASSGLLSPSPDHQDLGRSGRVDRSPFCLTNYPVTREDMDVVSVHFQPLDRVSVRVCSDTPSVMRLRLNTGMDSGGSLTISLRANKTEMRNETVVVACVNAASPFLGFNTSLNCTTAFFQGYPLSLSAWSRRANLIIPYPETDNWYLSLQLMCPENAEDCEQAVVHVETTLYLVPCLNDCGPYGQCLLLRRHSYLYASCSCKAGWRGWSCTDNSTAQTVAQQRAATLLLTLSNLMFLAPIAVSVRRFFLVEASVYAYTMFFSTFYHACDQPGEAVLCILSYDTLQYCDFLGSGAAIWVTILCMARLKTVLKYVLFLLGTLVIAMSLQLDRRGMWNMLGPCLFAFVIMASMWAYRCGHRRQCYPTSWQRWAFYLLPGVSMASVGIAIYTSMMTSDNYYYTHSIWHILLAGSAALLLPPPDQPAEPWACSQKFPCHYQICKNDREELYAVT

SEQ ID NO: 945 - protein, 1324 aa, Homo sapiens
MSRRKQAKPQHFQSDPEVASLPRRDGDTEKGQPSRPTKSKDAHVCGRCCAEFFELSDLLLHKKNCTKNQLVLIVNENPASPPETFSPSPPPDNPDEQMNDTVNKTDQVDCSDLSEHNGLDREESMEVEAPVANKSGSGTSSGSHSSTAPSSSSSSSSSSGGGGSSSTGTSAITTSLPQLGDLTTLGNFSVINSNVIIENLQSTKVAVAQFSQEARCGGASGGKLAVPALMEQLLALQQQQIHQLQLIEQIRHQILLLASQNADLPTSSSPSQGTLRTSANPLSTLSSHLSQQLAAAAGLAQSLASQSASISGVKQLPPIQLPQSSSGNTIIPSNSGSSPNMNILAAAVTTPSSEKVASSAGASHVSNPAVSSSSSPAFAISSLLSPASNPLLPQQASANSVFPSPLPNIGTTAEDLNSLSALAQQRKSKPPNVTAFEAKSTSDEAFFKHKCRFCAKVFGSDSALQIHLRSHTGERPFKCNICGNRFSTKGNLKVHFQRHKEKYPHIQMNPYPVPEHLDNIPTSTGIPYGMSIPPEKPVTSWLDTKPVLPTLTTSVGLPLPPTLPSLIPFIKTEEPAPIPISHSATSPPGSVKSDSGGPESATRNLGGLPEEAEGSTLPPSGGKSEESGMVTNSVPTASSSVLSSPAADCGPAGSATTFTNPLLPLMSEQFKAKFPFGGLLDSAQASETSKLQQLVENIDKKATDPNECIICHRVLSCQSALKMHYRTHTGERPFKCKICGRAFTTKGNLKTHYSVHRAMPPLRVQHSCPICQKKFTNAVVLQQHIRMHMGGQIPNTPVPDSYSESMESDTGSFDEKNFDDLDNFSDENMEDCPEGSIPDTPKSADASQDSLSSSPLPLEMSSIAALENQMKMINAGLAEQLQASLKSVENGSIEGDVLTNDSSSVGGDMESQSAGSPAISESTSSMQALSPSNSTQEFHKSPSIEEKPQRAVPSEFANGLSPTPVNGGALDLTSSHAEKIIKEDSLGILFPFRDRGKFKNTACDICGKTFACQSALDIHYRSHTKERPFICTVCNRGFSTKGNLKQHMLTHQMRDLPSQLFEPSSNLGPNQNSAVIPANSLSSLIKTEVNGFVHVSPQDSKDTPTSHVPSGPLSSSATSPVLLPALPRRTPKQHYCNTCGKTFSSSSALQIHERTHTGEKPFACTICGRAFTTKGNLKVHMGTHMWNSTPARRGRRLSVDGPMTFLGGNPVKFPEMFQKDLAARSGSGDPSSFWNQYAAALSNGLAMKANEISVIQNGGIPPIPGSLGSGNSSPVSGLTGNLERLQNSEPNAPLAGLEKMASSENGTNFRFTRFVEDSKEIVTS

SEQ ID NO: 946 - protein, 940 aa, Homo sapiens
MEIDQCLLESLPLGQRQRLVKRMRCEQIKAYYEREKAFQKQEGFLKRLKHAKNPKVHFNLTDMLQDAIIHHNDKEVLRLLKEGADPHTLVSSGGSLLHLCARYDNAFIAEILIDRGVNVNHQDEDFWTPMHIACACDNPDIVLLLVLAGANVLLQDVNGNIPLDYAVEGTESSSILLTYLDENGVDLTSLRQMKLQRPMSMLTDVKHFLSSGGNVNEKNDEGVTLLHMACASGYKEVVSLILEHGGDLNIVDDQYWTPLHLAAKYGQTNLVKLLLMHQANPHLVNCNEEKASDIAASEFIEEMLLKAEIAWEEKMKEPLSASTLAQEEPYEEIIHDLPVLSSKLSPLVLPIAKQDSLLEKDIMFKDATKGLCKQQSQDSIPENPMMSGSTKPEQVKLMPPAPNDDLATLSELNDGSLLYEIQKRFGNNQIYTFIGDILLLVNPYKELPIYSSMVSQLYFSSSGKLCSSLPPHLFSCVERAFHQLFREQRPQCFILSGERGSGKSEASKQIIRHLTCRAGASRATLDSRFKHVVCILEAFGHAKTTLNDLSSCFIKYFELQFCERKQQLTGARIYTYLLEKSRLVSQPLGQSNFLIFYLLMDGLSAEEKYGLHLNNLCAHRYLNQTIQDDASTGERSLNREKLAVLKRALNVVGFSSLEVENLFVILAAILHLGDIRFTALNEGNSAFVSDLQLLEQVAGMLQVSTDELASALTTDIQYFKGDMIIRRHTIQIAEFFRDLLAKSLYSRLFSFLVNTMNSCLHSQDEQKSMQTLDIGILDIFGFEEFQKNEFEQLCVNMTNEKMHHYINEVLFLHEQVECVQEGVTMETAYSPGNQNGVLDFFFQKPSGFLTLLDEESQMIWSVESNFPKKLQSLLESSNTNAVYSPMKDGNGNVALKDHGTAFTIMHYAGRVMYDVVGAIEKNKDSLSQNLLFVMKRGRCF

SEQ ID NO: 947 - protein, 510 aa, Homo sapiens
MAGSRQRGLRARVRPLFCALLLSLGRFVRGDGVGGDPAVALPHRRFEYKYSFKGPHLVQSDGTVPFWAHAGNAIPSSDQIRVAPSLKSQRGSVWTKTKAAFENWEVEVTFRVTGRGRIGADGLAIWYAENQGLEGPVFGSADLWNGVGIFFDSFDNDGKKNNPAIVIIGNNGQIHYDHQNDGASQALASCQRDFRNKPYPVRAKITYYQNTLTVMINNGFTPDKNDYEFCAKVENMIIPAQGHFGISAATGGLADDHDVLSFLTFQLTEPGKEPPTPDKEISEKEKEKYQEEFEHFQQELDKKKEEFQKGHPDLQGQPAEEIFESVGDRELRQVFEGQNRIHLEIKQLNRQLDMILDEQRRYVSSLTEEISKRGAGMPGQHGQITQQELDTVVKTQHEILRQVNEMKNSMSETVRLVSGMQHPGSAGGVYETTQHFIDIKEHLHIVKRDIDNLVQRNMPSNEKPKCPELPPFPSCLSTVHFIIFVVVQTVLFIGYIMYRSQQEAAAKKFF

SEQ ID NO: 948 - protein, 3036 aa, Homo sapiens
MHLHQVLTGAVNPGDNCYSVGSVGDVPFTAYGSGCDIVILANDFECVQIIPGAKHGNIQVSCVECSNQQGRIAASYGNAVCIFEPLGINSHKRNCQLKCQWLKTGQFFLSSVTYNLAWDPQDNRLLTATDSIQLWAPPGDDILEEEEEIDNTVPPVLNDWKCVWQCKTSVSVHLMEWSPDGEYFATAGKDDCLLKVWYPMTGWKSSIIPQDHHEVKRRQSSTQFSFVYLAHPRAVTGFSWRKTSKYMPRGSVCNVLLTSCHDGVCRLWAETLLPEDCLLGEQICETTTSSIASSLSHAGRHKDRIQHALETIHHLKNLRKGQRRSSVLVTHAELMPDQTAMHEVQRHISHHANALCHFHIAASINPATDIPNVLVGTAFNVDDGNGGFVVHWLNNKEFHFTSSTEVFMHQLRKLSDKQVDHENDDADREDEEHSQEDRERGLHMKLDHDLSLDRESEAGTGSSEHEDGEREGSPRTYSRLSVPMPLPTVLLDRKIETLLTEWNKNPDMLFTIHPVDGTFLVWHVKYLDEYNPGIFRQVQVSFSSRIPVAFPSGDASSLSKNIMMYACINATKDSHHTLLHQEGMSVGSPHGSQPHSRSHSTHMNILAPTVMMISKHIDGSLNQWAVTFADKSAFTTVLTVSHKFRYCGHRFHLNDLACHSVLPLLLTSSHHNALLTPELDCQWDSDNKLSRLMDPVKHIKGSSKQPLRNAATRTFHDPNAIYSELILWRVDPIGPLSYTGGVSELARINSLHTSAFSNVAWLPTLIPSYCLGTYCNSASACFVASDGKNLRLYQAVVDARKLLDELSDPESSKLIGEVFNIVSQQSTARPGCIIELDAITNQCGSNTQLLHVFQEDFIIGYKPHKEDMEKKETEIFFQPSQGYRPPPFSEKFFLVVIEKDSNNNSILHMWHLHLKSVQACLAKASEGASSESLLSVPGQKNVDSSPETSPSVSPMPHSSSIANLQTASKLILSSRLVYSQPLDLPESVEVIRATPSAGHLSSSSIYPVCLAPYLVVTTCSDNKVRFWKCCMEANPECNKSDEKEIYHWKRWPLMNDEGEDNSSTVSIVGRPVAVSCSYTGRLAVAYKQPIHHNGFVSKEFSMHVCIFECESTGGSEWVLEQTIHLDDLVKVGSVLDSRVSVDSNLFVYSKSDALLSKDRYLIPNIKHLVHLDWVSKEDGSHILTVGVGANIFMYGRLSGIVTEQTNSKDGVAVITLPLGGSIKQGVKSRWVLLRSIDLVSSVDGTPSLPVSLSWVRDGILVVGMDCEMHVYAQWKHAVKFGDTEADSSNAEEAAMQDHSTFKSNMLARKSVVEGTAISDDVFCSPTVIQDGGLFEAAHVLSPTLPQYHPTQLLELMDLGKVRRAKAILSHLVKCIAGEVAIVRDPDAGEGTKRHLSRTISVSGSTAKETVTVGKDGTRDYTEIDSIPPLPLYALLAADQDTSYRISEESTKIPQSYEDQTVSQPEDQYSELFQIQDIPTDDIDLEPEKRENKSKVINLSQYGPAYFGQEHARVLSSHLMHSSLPGLTRLEQMFLVALADTVATTSTELDESRDKSCSGRDTLDECGLRYLLAMRLHTCLLTSLPPLYRVQLLHQGVSTCHFAWAFHSEAEEELINMIPAIQRGDPQWSELRAMGIGWWVRNINTLRRCIEKVAKASFQRNNDALDAALFYLSMKKKAVVWGLFRSQHDEKMTTFFSHNFNEDRWRKAALKNAFSLLGKQRFEQSAAFFLLAGSLKDAIEVCLEKMEDIQLAMVIARLYESEFETSSTYISILNQKILGCQKDGSGFSCKRLHPDPFLRSLAYWVMKDYTRALDTLLEQTPKEDDEHQVIIKSCNPVAFSFYNYLRTHPLLIRRNLASPEGTLATLGLKTEKNFVDKINLIERKLFFTTANAHFKVGCPVLALEVLSKIPKVTKTSALSAKKDQPDFISHRMDDVPSHSKALSDGNGSSGIEWSNVTSSQYDWSQPIVKVDEEPLNLDWGEDHDSALDEEEDDAVGLVMKSTDAREKDKQSDQKASDPNMLLTPQEEDDPEGDTEVDVIAEQLKFRACLKILMTELRTLATGYEVDGGKLRFQLYNWLEKEIAALHEICNHESVIKEYSSKTYSKVESDLLDQEEMVDKPDIGSYERHQIERRRLQAKREHAERRKSWLQKNQDLLRVFLSYCSLHGAQGGGLASVRMELKFLLQESQQETTVKQLQSPLPLPTTLPLLSASIASTKTVIANPVLYLNNHIHDILYTIVQMKTPPHPSIEDVKVHTLHSLAASLSASIYQALCDSHSYSQTEGNQFTGMAYQGLLLSDRRRLRTESIEEHATPNSSPAQWPGVSSLINLLSSAQDEDQPKLNILLCEAVVAVYLSLLIHALATNSSSELFRLAAHPLNNRMWAAVFGGGVKLVVKPRRQSENISAPPVLSEDIDKHRRRFNMRMLVPGRPVKDATPPPVPAERPSYKEKFIPPELSMWDYFVAKPFLPLSDSGVIYDSDESIHSDEEDDAFFSDTQIQEHQDPNSYSWALLHLTMVKLALHNVKNFFPIAGLEFSELPVTSPLGIAVIKNLENWEQILQEKMDQFEGPPPNYINTYPTDLSVGAGPAILRNKAMLEPENTPFKSRDSSAFPVKRLWHFLVKQEVLQETFIRYIFTKKRKQSEVEADLGYPGGKAKVIHKESDMIMAFSVNKANCNEIVLASTHDVQELDVTSLLACQSYIWIGEEYDRESKSSDDVDYRGSTTTLYQPSATSYSASQVHPPSSLPWLGTGQTSTGASVLMKRNLHNVKRMTSHPVHQYYLTGAQDGSVRMFEWTRPQQLVCFRQAGNARVTRLYFNSQGNKCGVADGEGFLSIWQVNQTASNPKPYMSWQCHSKATSDFAFITSSSLVATSGHSNDNRNVCLWDTLISPGNSLIHGFTCHDHGATVLQYAPKQQLLISGGRKGHVCIFDIRQRQLIHTFQAHDSAIKALALDPYEEYFTTGSAEGNIKVWRLTGHGLIHSFKSEHAKQSIFRNIGAGVMQIDIIQGNRLFSCGADGTLKTRVLPNAFNIPNRILDIL

SEQ ID NO: 949 - protein, 847 aa, Homo sapiens
MEAARPSGSWNGALCRLLLLTLAILIFASDACKNVTLHVPSKLDAEKLVGRVNLKECFTAANLIHSSDPDFQILEDGSVYTTNTILLSSEKRSFTILLSNTENQEKKKIFVFLEHQTKVLKKRHTKEKVLRRAKRRWAPIPCSMLENSLGPFPLFLQQVQSDTAQNYTIYYSIRGPGVDQEPRNLFYVERDTGNLYCTRPVDREQYESFEIIAFATTPDGYTPELPLPLIIKIEDENDNYPIFTEETYTFTIFENCRVGTTVGQVCATDKDEPDTMHTRLKYSIIGQVPPSPTLFSMHPTTGVITTTSSQLDRELIDKYQLKIKVQDMDGQYFGLQTTSTCIINIDDVNDHLPTFTRTSYVTSVEENTVDVEILRVTVEDKDLVNTANWRANYTILKGNENGNFKIVTDAKTNEGVLCVVKPLNYEEKQQMILQIGVVNEAPFSREASPRSAMSTATVTVNVEDQDEGPECNPPIQTVRMKENAEVGTTSNGYKAYDPETRSSSGIRYKKLTDPTGWVTIDENTGSIKVFRSLDREAETIKNGIYNITVLASDQGGRTCTGTLGIILQDVNDNSPFIPKKTVIICKPTMSSAEIVAVDPDEPIHGPPFDFSLESSTSEVQRMWRLKAINDTAARLSYQNDPPFGSYVVPITVRDRLGMSSVTSLDVTLCDCITENDCTHRVDPRIGGGGVQLGKWAILAILLGIALLFCILFTLVCGASGTSKQPKVIPDDLAQQNLIVSNTEAPGDDKVYSANGFTTQTVGASAQGVCGTVGSGIKNGGQETIEMVKGGHQTSESCRGAGHHHTLDSCRGGHTEVDNCRYTYSEWHSFTQPRLGEESIRGHTLIKN

SEQ ID NO: 950 - protein, 630 aa, Homo sapiens
MMFRDQVGVLAGWFKGWNECEQTVALLSLLKRVSQTQARFLQLCLEHSLADCAELHVLEREANSPGIINQWQQESKDKVISLLLTHLPLLKPGNLDAKVEYMKLLPKILAHSIEHNQHIEESRQLLSYALIHPATSLEDRSALAMWLNHLEDRTSTSFGGQNRGRSDSVDYGQTHYYHQRQNSDDKLNGWQNSRDSGICINASNWQDKSMGCENGHVPLYSSSSVPTTINTIGTSTSTNVPAWLKSLRLHKYAALFSQMTYEEMMALTECQLEAQNVTKGARHKIVISIQKLKERQNLLKSLERDIIEGGSLRIPLQELHQMILTPIKAYSSPSTTPEARRREPQAPRQPSLMGPESQSPDCKDGAAATGATATPSAGASGGLQPHQLSSCDGELAVAPLPEGDLPGQFTRVMGKVCTQLLVSRPDEENISSYLQLIDKCLIHEAFTETQKKRLLSWKQQVQKLFRSFPRKTLLDISGYRQQRNRGFGQSNSLPTAGSVGGGMGRRNPRQYQIPSRNVPSARLGLLGTSGFVSSNQRNTTATPTIMKQGRQNLWFANPGGSNSMPSRTHSSVQRTRSLPVHTSPQNMLMFQQPEFQLPVTEPDINNRLESLCLSMTEHALGDGVDRTSTI

SEQ ID NO: 951 - protein, 1251 aa, Homo sapiens
MLGWVQRVLPQPPGTPRKTKMQEEEEVEPEPEMEAEVEPEPNPEEAETESESMPPEESFKEEEVAVADPSPQETKEAALTSTISLRAQGAEISEMNSPSRRVLTWLMKGVEKVIPQPVHSITEDPAQILGHGSTGDTGCTDEPNEALEAQDTRPGLRLLLWLEQNLERVLPQPPKSSEVWRDEPAVATGAASDPAPPGRPQEMGPKLQARETPSLPTPIPLQPKEEPKEAPAPEPQPGSQAQTSSLPPTRDPARLVAWVLHRLEMALPQPVLHGKIGEQEPDSPGICDVQTISILPGGQVEPDLVLEEVEPPWEDAHQDVSTSPQGTEVVPAYEEENKAVEKMPRELSRIEEEKEDEEEEEEEEEEEEEEEVTEVLLDSCVVSQVGVGQSEEDGTRPQSTSDQKLWEEVGEEAKKEAEEKAKEEAEEVAEEEAEKEPQDWAETKEEPEAEAEAASSGVPATKQHPEVQVEDTDADSCPLMAEENPPSTVLPPPSPAKSDTLIVPSSASGTHRKKLPSEDDEAEELKALSPAESPVVAWSDPTTPKDTDGQDRAASTASTNSAIINDRLQELVKLFKERTEKVKEKLIDPDVTSDEESPKPSPAKKAPEPAPDTKPAEAEPVEEEHYCDMLCCKFKHRPWKKYQFPQSIDPLTNLMYVLWLFFVVMAWNWNCWLIPVRWAFPYQTPDNIHHWLLMDYLCDLIYFLDITVFQTRLQFVRGGDIITDKKDMRNNYLKSRRFKMDLLSLLPLDFLYLKVGVNPLLRLPRCLKYMAFFEFNSRLESILSKAYVYRVIRTTAYLLYSLHLNSCLYYWASAYQGLGSTHWVYDGVGNSYIRCYYFAVKTLITIGGLPDPKTLFEIVFQLLNYFTGVFAFSVMIGQMRDVVGAATAGQTYYRSCMDSTVKYMNFYKIPKSVQNRVKTWYEYTWHSQGMLDESELMVQLPDKMRLDLAIDVNYNIVSKVALFQGCDRQMIFDMLKRLRSVVYLPNDYVCKKGEIGREMYIIQAGQVQVLGGPDGKSVLVTLKAGSVFGEISLLAVGGGNRRTANVVAHGFTNLFILDKKDLNEILVHYPESQKLLRKKARRMLRSNNKPKEEKSVLILPPRAGTPKLFNAALAMTGKMGGKGAKGGKLAHLRARLKELAALEAAAKQQELVEQAKSSQDVKGEEGSAAPDQHTHPKEAATDPPAPRTPPEPPGSPPSSPPPASLGRPEGEEEGPAEPEEHSVRICMSPGPEPGEQILSVKMPEEREEKAE

SEQ ID NO: 952 - protein, 514 aa, Homo sapiens
MKEAGQMQNLESARAGRSVSTQTGSMTGQIPRLSKVNLFTLLSLWMELFPAEAQRQKSQKNEEGKHGPLGDNEERTRVSTDKRQVKRTGLVVVKNMKIVGLHCSSEDLHAGQIALIKHGSRLKNCDLYFSRKPCSACLKMIVNAGVNRISYWPADPEISLLTEASSSEDAKLDAKAVERLKSNSRAHVCVLLQPLVCYMVQFVEETSYKCDFIQKITKTLPDANTDFYYECKQERIKEYEMLFLVSNEEMHKQILMTIGLENLCENPYFSNLRQNMKDLILLLATVASSVPNFKHFGFYRSNPEQINEIHNQSLPQEIARHCMVQARLLAYRTEDHKTGVGAVIWAEGKSRSCDGTGAMYFVGCGYNAFPVGSEYADFPHMDDKQKDREIRKFRYIIHAEQNALTFRCQEIKPEERSMIFVTKCPCDECVPLIKGAGIKQIYAGDVDVGKKKADISYMRFGELEGVSKFTWQLNPSGAYGLEQNEPERRENGVLRPVPQKEEQHQDKKLRLGIH

SEQ ID NO: 953 - protein, 2539 aa, Homo sapiens
MNHPFGKEEAASQKQLFGFFCECLRRGEWELAQACVPQLQEGQGDIPKRVEDILQALVVCPNLLRCGQDINPQRVAWVWLLVLEKWLAREKKLLPVVFRRKLEFLLLSEDLQGDIPENILEELYETLTQGAVGHVPDGNPRRESWTPRLSSEAVSVLWDLLRQSPQPAQALLELLLEEDDGTGLCHWPLQNALVDLIRKALRALQGPDSVPPGVVDAIYGALRTLRCPAEPLGVELHLLCEELLEACRTEGSPLREERLLSCLLHKASRGLLSLYGHTYAEKVTEKPPRATASGKVSPDHLDPERAMLALFSNPNPAEAWKVAYFYCLSNNKHFLEQILVTALTLLKEEDFPNLGCLLDREFRPLSCLLVLLGWTHCQSLESAKRLLQTLHRTQGPGCDELLRDACDGLWAHLEVLEWCIQQSSNPIPKRDLLYHLHGGDSHSVLYTLHHLTNLPALREEDVLKLLQKVPAKDPQQEPDAVDAPVPEHLSQCQNLTLYQGFCAMKYAIYALCVNSHQHSQCQDCKDSLSEDLASATEPANDSLSSPGAANLFSTYLARCQQYLCSIPDSLCLELLENIFSLLLITSADLHPEPHLPEDYAEDDDIEGKSPSGLRSPSESPQHIAHPERKSERGSLGVPKTLAYTMPSHVKAEPKDSYPGPHRHSFLDLKHFTSGISGFLADEFAIGAFLRLLQEQLDEISSRSPPEKPKQESQSCSGSRDGLQSRLHRLSKVVSEAQWRHKVVTSNHRSEEQPSRRYQPATRHPSLRRGRRTRRSQADGRDRGSNPSLESTSSELSTSTSEGSLSAMSGRNELHSRLHPHPQSSLIPMMFSPPESLLASCILRGNFAEAHQVLFTFNLKSSPSSGELMFMERYQEVIQELAQVEHKIENQNSDAGSSTIRRTGSGRSTLQAIGSAAAAGMVFYSISDVTDKLLNTSGDPIPMLQEDFWISTALVEPTAPLREVLEDLSPPAMAAFDLACSQCQLWKTCKQLLETAERRLNSSLERRGRRIDHVLLNADGIRGFPVVLQQISKSLNYLLMSASQTKSESVEEKGGGPPRCSITELLQMCWPSLSEDCVASHTTLSQQLDQVLQSLREALELPEPRTPPLSSLVEQAAQKAPEAEAHPVQIQTQLLQKNLGKQTPSGSRQMDYLGTFFSYCSTLAAVLLQSLSSEPDHVEVKVGNPFVLLQQSSSQLVSHLLFERQVPPERLAALLAQENLSLSVPQVIVSCCCEPLALCSSRQSQQTSSLLTRLGTLAQLHASHCLDDLPLSTPSSPRTTENPTLERKPYSSPRDSSLPALTSSALAFLKSRSKLLATVACLGASPRLKVSKPSLSWKELRGRREVPLAAEQVARECERLLEQFPLFEAFLLAAWEPLRGSLQQGQSLAVNLCGWASLSTVLLGLHSPIALDVLSEAFEESLVARDWSRALQLTEVYGRDVDDLSSIKDAVLSCAVACDKEGWQYLFPVKDASLRSRLALQFVDRWPLESCLEILAYCISDTAVQEGLKCELQRKLAELQVYQKILGLQSPPVWCDWQTLRSCCVEDPSTVMNMILEAQEYELCEEWGCLYPIPREHLISLHQKHLLHLLERRDHDKALQLLRRIPDPTMCLEVTEQSLDQHTSLATSHFLANYLTTHFYGQLTAVRHREIQALYVGSKILLTLPEQHRASYSHLSSNPLFMLEQLLMNMKVDWATVAVQTLQQLLVGQEIGFTMDEVDSLLSRYAEKALDFPYPQREKRSDSVIHLQEIVHQAADPETLPRSPSAEFSPAAPPGISSIHSPSLRERSFPPTQPSQEFVPPATPPARHQWVPDETESICMVCCREHFTMFNRRHHCRRCGRLVCSSCSTKKMVVEGCRENPARVCDQCYSYCNKDVPEEPSEKPEALDSSKNESPPYSFVVRVPKADEVEWILDLKEEENELVRSEFYYEQAPSASLCIAILNLHRDSIACGHQLIEHCCRLSKGLTNPEVDAGLLTDIMKQLLFSAKMMFVKAGQSQDLALCDSYISKVDVLNILVAAAYRHVPSLDQILQPAAVTRLRNQLLEAEYYQLGVEVSTKTGLDTTGAWHAWGMACLKAGNLTAAREKFSRCLKPPFDLNQLNHGSRLVQDVVEYLESTVRPFVSLQDDDYFATLRELEATLRTQSLSLAVIPEGKIMNNTYYQECLFYLHNYSTNLAIISFYVRHSCLREALLHLLNKESPPEVFIEGIFQPSYKSGKLHTLENLLESIDPTLESWGKYLIAACQHLQKKNYYHILYELQQFMKDQVRAAMTCIRFFSHKAKSYTELGEKLSWLLKAKDHLKIYLQETSRSSGRKKTTFFRKKMTAADVSRHMNTLQLQMEVTRFLHRCESAGTSQITTLPLPTLFGNNHMKMDVACKVMLGGKNVEDGFGIAFRVLQDFQLDAAMTYCRAARQLVEKEKYSEIQQLLKCVSESGMAAKSDGDTILLNCLEAFKRIPPQELEGLIQAIHNDDNKVRAYLICCKLRSAYLIAVKQEHSRATALVQQVQQAAKSSGDAVVQDICAQWLLTSHPRGAHGPGSRK

SEQ ID NO: 954 - protein, 1738 aa, Homo sapiens
MLKRKQSSRVEAQPVTDFGPDESLSDNADILWINKPWVHSLLRICAIISVISVCMNTPMTFEHYPPLQYVTFTLDTLLMFLYTAEMIAKMHIRGIVKGDSSYVKDRWCVFDGFMVFCLWVSLVLQVFEIADIVDQMSPWGMLRIPRPLIMIRAFRIYFRFELPRTRITNILKRSGEQIWSVSIFLLFFLLLYGILGVQMFGTFTYHCVVNDTKPGNVTWNSLAIPDTHCSPELEEGYQCPPGFKCMDLEDLGLSRQELGYSGFNEIGTSIFTVYEAASQEGWVFLMYRAIDSFPRWRSYFYFITLIFFLAWLVKNVFIAVIIETFAEIRVQFQQMWGSRSSTTSTATTQMFHEDAAGGWQLVAVDVNKPQGRAPACLQKMMRSSVFHMFILSMVTVDVIVAASNYYKGENFRRQYDEFYLAEVAFTVLFDLEALLKIWCLGFTGYISSSLHKFELLLVIGTTLHVYPDLYHSQFTYFQVLRVVRLIKISPALEDFVYKIFGPGKKLGSLVVFTASLLIVMSAISLQMFCFVEELDRFTTFPRAFMSMFQILTQEGWVDVMDQTLNAVGHMWAPVVAIYFILYHLFATLILLSLFVAVILDNLELDEDLKKLKQLKQSEANADTKEKLPLRLRIFEKFPNRPQMVKISKLPSDFTVPKIRESFMKQFIDRQQQDTCCLLRSLPTTSSSSCDHSKRSAIEDNKYIDQKLRKSVFSIRARNLLEKETAVTKILRACTRQRMLSGSFEGQPAKERSILSVQHHIRQERRSLRHGSNSQRISRGKSLETLTQDHSNTVRYRNAQREDSEIKMIQEKKEQAEMKRKVQEEELRENHPYFDKPLFIVGREHRFRNFCRVVVRARFNASKTDPVTGAVKNTKYHQLYDLLGLVTYLDWVMIIVTICSCISMMFESPFRRVMHAPTLQIAEYVFVIFMSIELNLKIMADGLFFTPTAVIRDFGGVMDIFIYLVSLIFLCWMPQNVPAESGAQLLMVLRCLRPLRIFKLVPQMRKVVRELFSGFKEIFLVSILLLTLMLVFASFGVQLFAGKLAKCNDPNIIRREDCNGIFRINVSVSKNLNLKLRPGEKKPGFWVPRVWANPRNFNFDNVGNAMLALFEVLSLKGWVEVRDVIIHRVGPIHGIYIHVFVFLGCMIGLTLFVGVVIANFNENKGTALLTVDQRRWEDLKSRLKIAQPLHLPPRPDNDGFRAKMYDITQHPFFKRTIALLVLAQSVLLSVKWDVEDPVTVPLATMSVVFTFIFVLEVTMKIIAMSPAGFWQSRRNRYDLLVTSLGVVWVVLHFALLNAYTYMMGACVIVFRFFSICGKHVTLKMLLLTVVVSMYKSFFIIVGMFLLLLCYAFAGVVLFGTVKYGENINRHANFSSAGKAITVLFRIVTGEDWNKIMHDCMVQPPFCTPDEFTYWATDCGNYAGALMYFCSFYVIIAYIMLNLLVAIIVENFSLFYSTEEDQLLSYNDLRHFQIIWNMVDDKREGVIPTFRVKFLLRLLRGRLEVDLDKDKLLFKHMCYEMERLHNGGDVTFHDVLSMLSYRSVDIRKSLQLEELLAREQLEYTIEEEVAKQTIRMWLKKCLKRIRAKQQQSCSIIHSLRESQQQELSRFLNPPSIETTQPSEDTNANSQDNSMQPETSSQQQLLSPTLSDRGGSRQDAADAGKPQRKFGQWRLPSAPKPISHSVSSVNLRFGGRTTMKSVVCKMNPMTDAASCGSEVKKWWTRQLTVESDESGDDLLDI

SEQ ID NO: 955 - protein, 2131 aa, Homo sapiens
MAERRAFAQKISRTVAAEVRKQISGQYSGSPQLLKNLNIVGNISHHTTVPLTEAVDPVDLEDYLITHPLAVDSGPLRDLIEFPPDDIEVVYSPRDCRTLVSAVPEESEMDPHVRDCIRSYTEDWAIVIRKYHKLGTGFNPNTLDKQKERQKGLPKQVFESDEAPDGNSYQDDQDDLKRRSMSIDDTPRGSWACSIFDLKNSLPDALLPNLLDRTPNEEIDRQNDDQRKSNRHKELFALHPSPDEEEPIERLSVPDIPKEHFGQRLLVKCLSLKFEIEIEPIFASLALYDVKEKKKISENFYFDLNSEQMKGLLRPHVPPAAITTLARSAIFSITYPSQDVFLVIKLEKVLQQGDIGECAEPYMIFKEADATKNKEKLEKLKSQADQFCQRLGKYRMPFAWTAIHLMNIVSSAGSLERDSTEVEISTGERKGSWSERRNSSIVGRRSLERTTSGDDACNLTSFRPATLTVTNFFKQEGDRLSDEDLYKFLADMRRPSSVLRRLRPITAQLKIDISPAPENPHYCLTPELLQVKLYPDSRVRPTREILEFPARDVYVPNTTYRNLLYIYPQSLNFANRQGSARNITVKVQFMYGEDPSNAMPVIFGKSSCSEFSKEAYTAVVYHNRSPDFHEEIKVKLPATLTDHHHLLFTFYHVSCQQKQNTPLETPVGYTWIPMLQNGRLKTGQFCLPVSLEKPPQAYSVLSPEVPLPGMKWVDNHKGVFNVEVVAVSSIHTQDPYLDKFFALVNALDEHLFPVRIGDMRIMENNLENELKSSISALNSSQLEPVVRFLHLLLDKLILLVIRPPVIAGQIVNLGQASFEAMASIINRLHKNLEGNHDQHGRNSLLASYIHYVFRLPNTYPNSSSPGPGGLGGSVHYATMARSAVRPASLNLNRSRSLSNSNPDISGTPTSPDDEVRSIIGSKGLDRSNSWVNTGGPKAAPWGSNPSPSAESTQAMDRSCNRMSSHTETSSFLQTLTGRLPTKKLFHEELALQWVVCSGSVRESALQQAWFFFELMVKSMVHHLYFNDKLEAPRKSRFPERFMDDIAALVSTIASDIVSRFQKDTEMVERLNTSLAFFLNDLLSVMDRGFVFSLIKSCYKQVSSKLYSLPNPSVLVSLRLDFLRIICSHEHYVTLNLPCSLLTPPASPSPSVSSATSQSSGFSTNVQDQKIANMFELSVPFRQQHYLAGLVLTELAVILDPDAEGLFGLHKKVINMVHNLLSSHDSDPRYSDPQIKARVAMLYLPLIGIIMETVPQLYDFTETHNQRGRPICIATDDYESESGSMISQTVAMAIAGTSVPQLTRPGSFLLTSTSGRQHTTFSAESSRSLLICLLWVLKNADETVLQKWFTDLSVLQLNRLLDLLYLCVSCFEYKGKKVFERMNSLTFKKSKDMRAKLEEAILGSIGARQEMVRRSRGQLERSPSGSAFGSQENLRWRKDMTHWRQNTEKLDKSRAEIEHEALIDGNLATEANLIILDTLEIVVQTVSVTESKESILGGVLKVLLHSMACNQSAVYLQHCFATQRALVSKFPELLFEEETEQCADLCLRLLRHCSSSIGTIRSHASASLYLLMRQNFEIGNNFARVKMQVTMSLSSLVGTSQNFNEEFLRRSLKTILTYAEEDLELRETTFPDQVQDLVFNLHMILSDTVKMKEHQEDPEMLIDLMYRIAKGYQTSPDLRLTWLQNMAGKHSERSNHAEAAQCLVHSAALVAEYLSMLEDRKYLPVGCVTFQNISSNVLEESAVSDDVVSPDEEGICSGKYFTESGLVGLLEQAAASFSMAGMYEAVNEVYKVLIPIHEANRDAKKLSTIHGKLQEAFSKIVHQSTGWERMFGTYFRVGFYGTKFGDLDEQEFVYKEPAITKLAEISHRLEGFYGERFGEDVVEVIKDSNPVDKCKLDPNKAYIQITYVEPYFDTYEMKDRITYFDKNYNLRRFMYCTPFTLDGRAHGELHEQFKRKTILTTSHAFPYIKTRVNVTHKEEIILTPIEVAIEDMQKKTQELAFATHQDPADPKMLQMVLQGSVGTTVNQGPLEVAQVFLSEIPSDPKLFRHHNKLRLCFKDFTKRCEDALRKNKSLIGPDQKEYQRELERNYHRLKEALQPLINRKIPQLYKAVLPVTCHRDSFSRMSLRKMDL

SEQ ID NO: 956 - protein, 925 aa, Homo sapiens
MNRFRVSKFRHTEARPPRRESWISDIRAGTAPSCRNHIKSSCSLIAFNSDRPGVLGIVPLQGQGEDKRRVAHLGCHSDLVTDLDFSPFDDFLLATGSADRTVKLWRLPGPGQALPSAPGVVLGPEDLPVEVLQFHPTSDGILVSAAGTTVKVWDAAKQQPLTELAAHGDLVQSAVWSRDGALVGTACKDKQLRIFDPRTKPRASQSTQAHENSRDSRLAWMGTWEHLVSTGFNQMREREVKLWDTRFFSSALASLTLDTSLGCLVPLLDPDSGLLVLAGKGERQLYCYEVVPQQPALSPVTQCVLESVLRGAALVPRQALAVMSCEVLRVLQLSDTAIVPIGYHVPRKAVEFHEDLFPDTAGCVPATDPHSWWAGDNQQVQKVSLNPACRPHPSFTSCLVPPAEPLPDTAQPAVMETPVGDADASEGFSSPPSSLTSPSTPSSLGPSLSSTSGIGTSPSLRSLQSLLGPSSKFRHAQGTVLHRDSHITNLKGLNLTTPGESDGFCANKLRVAVPLLSSGGQVAVLELRKPGRLPDTALPTLQNGAAVTDLAWDPFDPHRLAVAGEDARIRLWRVPAEGLEEVLTTPETVLTGHTEKICSLRFHPLAANVLASSSYDLTVRIWDLQAGADRLKLQGHQDQIFSLAWSPDGQQLATVCKDGRVRVYRPRSGPEPLQEGPGPKGGRGARIVWVCDGRCLLVSGFDSQSERQLLLYEAEALAGGPLAVLGLDVAPSTLLPSYDPDTGLVLLTGKGDTRVFLYELLPESPFFLECNSFTSPDPHKGLVLLPKTECDVREVELMRCLRLRQSSLEPVAFRLPRVRKEFFQDDVFPDTAVIWEPVLSAEAWLQGANGQPWLLSLQPPDMSPVSQAPREAPARRAPSSAQYLEEKSDQQKKEELLNAMVAKLGNREDPLPQDSFEGVDEDEWD

SEQ ID NO: 957 - protein, 696 aa, Homo sapiens
MVQRYQSPVRVYKYPFELVMAAYEKRFPTCPQIPVFLGSEVLRESRSPDGAVHVVERSCRLRVDAPRLLRKIAGVEHVVFVQTNILNWKERTLLIEAHNETFANRVVVNEHCSYTVHPENEDWTCFEQSASLDIRSFFGFENALEKIAMKQYTANVKRGKEVIEHYLNELISQGTSHIPRWTPAPVREEDARNQAGPRDPSSLEAHGPRSTLGPALEAVSMDGDKLDADYIERCLGHLTPMQESCLIQLRHWLQETHKGKIPKDEHILRFLRAHDFHLDKAREMLRQSLSWRKQHQVDLLLQTWQPPALLEEFYAGGWHYQDIDGRPLYILRLGQMDTKGLMKAVGEEALLRHVLSVNEEGQKRCEGSTRQLGRPISSWTCLLDLEGLNMRHLWRPGVKALLRMIEVVEDNYPETLGRLLIVRAPRVFPVLWTLISPFINENTRRKFLIYSGSNYQGPGGLVDYLDREVIPDFLGGESVCNVPEGGLVPKSLYMTEEEQEHTDQLWQWSETYHSASVLRGAPHEVAVEILEGESVITWDFDILRGDVVFSLYHTKQAPRLGAREPGTRASGQLIDKGWVLGRDYSRVEAPLVCREGESIQGSHVTRWPGVYLLQWQMHSPPSSVACSLPGVDDVLTALHSPGPKCKLLYYCEVLASEDFRGSMSSLESCTSGFSQLSAATSSSSSGQSHSSSLVSR

SEQ ID NO: 958 - protein, 1332 aa, Homo sapiens
MTGEVGSEVHLEINDPNVISQEEADSPSDSGQGSYETIGPLSEGDSDEEIFVSKKLKNRKVLQDSDSETEDTNASPEKTTYDSAEEENKENLYAGKNTKIKRIYKTVADSDESYMEKSLYQENLEAQVKPCLELSLQSGNSTDFTTDRKSSKKHIHDKEGTAGKAKVKSKRRLEKEERKMEKIRQLKKKETKNQEDDVEQPFNDSGCLLVDKDLFETGLEDENNSPLEDEESLESIRAAVKNKVKKHKKKEPSLESGVHSFEEGSELSKGTTRKERKAARLSKEALKQLHSETQRLIRESALNLPYHMPENKTIHDFFKRKPRPTCHGNAMALLKSSKYQSSHHKEIIDTANTTEMNSDHHSKGSEQTTGAENEVETNALPVVSKETQIITGSDESCRKDLVKNEELEIQEKQKQSDIRPSPGDSSVLQQESNFLGNNHSEECQVGGLVAFEPHALEGEGPQNPEETDEKVEEPEQQNKSSAVGPPEKVRRFTLDRLKQLGVDVSIKPRLGADEDSFVILEPETNRELEALKQRFWKHANPAAKPRAGQTVNVNVIVKDMGTDGKEELKADVVPVTLAPKKLDGASHTKPGEKLQVLKAKLQEAMKLRRFEERQKRQALFKLDNEDGFEEEEEEEEEMTDESEEDGEEKVEKEEKEEELEEEEEKEEEEEEEGNQETAEFLLSSEEIETKDEKEMDKENNDGSSEIGKAVGFLSVPKSLSSDSTLLLFKDSSSKMGYFPTEEKSETDENSGKQPSKLDEDDSCSLLTKESSHNSSFELIGSTIPSYQPCNRQTGRGTSFFPTAGGFRSPSPGLFRASLVSSASKSSGKLSEPSLPIEDSQDLYNASPEPKTLFLGAGDFQFCLEDDTQSQLLDADGFLNVRNHRNQYQALKPRLPLASMDENAMDANMDELLDLCTGKFTSQAEKHLPRKSDKKENMEELLNLCSGKFTSQDASTPASSELNKQEKESSMGDPMEEALALCSGSFPTDKEEEDEEEEFGDFRLVSNDNEFDSDEDEHSDSGNDLALEDHEDDDEEELLKRSEKLKRQMRLRKYLEDEAEVSGSDVGSEDEYDGEEIDEYEEDVIDEVLPSDEELQSQIKKIHMKTMLDDDKRQLRLYQERYLADGDLHSDGPGRMRKFRWKNIDDASQMDLFHRDSDDDQTEEQLDESEARWRKERIEREQWLRDMAQQGKITAEEEEEIGEDSQFMILAKKVTAKALQKNASRPMVIQESKSLLRNPFEAIRPGSAQQVKTGSLLNQPKAVLQKLAALSDHNPSAPRNSRNFVFHTLSPVKAEAAKESSKSQKIPEKDSDWLTWSGAPIPGFFRLSFDPHG

SEQ ID NO: 959 - protein, 779 aa, Homo sapiens
MSRFPAVAGRAPRRQEEGERSRDLQEERLSAVCIADREEKGCTSQEGGTTPTFPIQKQRKKIIQAVRDNSFLIVTGNTGSGKTTQLPKYLYEAGFSQHGMIGVTQPRKVAAISVAQRVAEEMKCTLGSKVGYQVRFDDCSSKETAIKYMTDGCLLKHILGDPNLTKFSVIILDEAHERTLTTDILFGLLKKLFQEKSPNRKEHLKVVVMSATMELAKLSAFFGNCPIFDIPGRLYPVREKFCNLIGPRDRENTAYIQAIVKVTMDIHLNEMAGDILVFLTGQFEIEKSCELLFQMAESVDYDYDVQDTTLDGLLILPCYGSMTTDQQRRIFLPPPPGIRKCVISTNISATSLTIDGIRYVVDGGFVKQLNHNPRLGLDILEVVPISKSEALQRSGRAGRTSSGKCFRIYSKDFWNQCMPDHVIPEIKRTSLTSVVLTLKCLAIHDVIRFPYLDPPNERLILEALKQLYQCDAIDRSGHVTRLGLSMVEFPLPPHLTCAVIKAASLDCEDLLLPIAAMLSVENVFIRPVDPEYQKEAEQRHRELAAKAGGFNDFATLAVIFEQCKSSGAPASWCQKHWIHWRCLFSAFRVEAQLRELIRKLKQQSDFPKETFEGPKHEVLRRCLCAGYFKNVARRSVGRTFCTMDGRGSPVHIHPSSALHEQETKLEWIIFHEVLVTTKVYARIVCPIRYEWVRDLLPKLHEFNAHDLSSVARREVREDARRRWTNKENVKQLKDGISKDVLKKMQRRNDDKSISDARARFLERKQQRTQDHSDTRKETG

SEQ ID NO: 960 - protein, 304 aa, Homo sapiens
MSLNPPIFLKRSEENSSKFVETKQSQTTSIASEDPLQNLCLASQEVLQKAQQSGRSKCLKCGGSRMFYCYTCYVPVENVPIEQIPLVKLPLKIDIIKHPNETDGKSTAIHAKLLAPEFVNIYTYPCIPEYEEKDHEVALIFPGPQSISIKDISFHLQKRIQNNVRGKNDDPDKPSFKRKRTEEQEFCDLNDSKCKGTTLKKIIFIDSTWNQTNKIFTDERLQGLLQVELKTRKTCFWRHQKGKPDTFLSTIEAIYYFLVDYHTDILKEKYRGQYDNLLFFYSFMYQLIKNAKCSGDKETGKLTH

SEQ ID NO: 961 - protein, 2845 aa, Homo sapiens
MALGKVLAMALVLALAVLGSLSPGARAGDCKGQRQVLREAPGFVTDGAGNYSVNGNCEWLIEAPSPQHRILLDFLFLDTECTYDYLFVYDGDSPRGPLLASLSGSTRPPPIEASSGKMLLHLFSDANYNLLGFNASFRFSLCPGGCQSHGQCQPPGVCACEPGWGGPDCGLQECSAYCGSHGTCASPLGPCRCEPGFLGRACDLHLWENQGAGWWHNVSARDPAFSARIGAAGAFLSPPGLLAVFGGQDLNNALGDLVLYNFSANTWESWDLSPAPAARHSHVAVAWAGSLVLMGGELADGSLTNDVWAFSPLGRGHWELLAPPASSSSGPPGLAGHAAALVDDVWLYVSGGRTPHDLFSSGLFRFRLDSTSGGYWEQVIPAGGRPPAATGHSMVFHAPSRALLVHGGHRPSTARFSVRVNSTELFHVDRHVWTTLKGRDGLQGPRERAFHTASVLGNYMVVYGGNVHTHYQEEKCYEDGIFFYHLGCHQWVSGAELAPPGTPEGRAAPPSGRYSHVAAVLGGSVLLVAGGYSGRPRGDLMAYKVPPFVFQAPAPDYHLDYCSMYTDHSVCSRDPECSWCQGACQAAPPPGTPLGACPAASCLGLGRLLGDCQACLAFSSPTAPPRGPGTLGWCVHNESCLPRPEQARCRGEQISGTVGWWGPAPVFVTSLEACVTQSFLPGLHLLTFQQPPNTSQPDKVSIVRSTTITLTPSAETDVSLVYRGFIYPMLPGGPGGPGAEDVAVWTRAQRLHVLARMARGPDTENMEEVGRWVAHQEKETRRLQRPGSARLFPLPGRDHKYAVEIQGQLNGSAGPGHSELTLLWDRTGVPGGSEISFFFLEPYRSSSCTSYSSCLGCLADQGCGWCLTSATCHLRQGGAHCGDDGAGGSLLVLVPTLCPLCEEHRDCHACTQDPFCEWHQSTSRKGDAACSRRGRGRGALKSPEECPPLCSQRLTCEDCLANSSQCAWCQSTHTCFLFAAYLARYPHGGCRGWDDSVHSEPRCRSCDGFLTCHECLQSHECGWCGNEDNPTLGRCLQGDFSGPLGGGNCSLWVGEGLGLPVALPARWAYARCPDVDECRLGLARCHPRATCLNTPLSYECHCQRGYQGDGISHCNRTCLEDCGHGVCSGPPDFTCVCDLGWTSDLPPPTPAPGPPAPRCSRDCGCSFHSHCRKRGPGFCDECQDWTWGEHCERCRPGSFGNATGSRGCRPCQCNGHGDPRRGHCDNLSGLCFCQDHTEGAHCQLCSPGYYGDPRAGGSCFRECGGRALLTNVSSVALGSRRVGGLLPPGGGAARAGPGLSYCVWVVSATEELQPCAPGTLCPPLTLTFSPDSSTPCTLSYVLAFDGFPRFLDTGVVQSDRSLIAAFCGQRRDRPLTVQALSGLLVLHWEANGSSSWGFNASVGSARCGSGGPGSCPVPQECVPQDGAAGAGLCRCPQGWAGPHCRMALCPENCNAHTGAGTCNQSLGVCICAEGFGGPDCATKLDGGQLVWETLMDSRLSADTASRFLHRLGHTMVDGPDATLWMFGGLGLPQGLLGNLYRYSVSERRWTQMLAGAEDGGPGPSPRSFHAAAYVPAGRGAMYLLGGLTAGGVTRDFWVLNLTTLQWRQEKAPQTVELPAVAGHTLTARRGLSLLLVGGYSPENGFNQQLLEYQLATGTWVSGAQSGTPPTGLYGHSAVYHEATDSLYVFGGFRFHVELAAPSPELYSLHCPDRTWSLLAPSQGAKRDRMRNVRGSSRGLGQVPGEQPGSWGFREVRKKMALWAALAGTGGFLEEISPHLKEPRPRLFHASALLGDTMVVLGGRSDPDEFSSDVLLYQVNCNAWLLPDLTRSASVGPPMEESVAHAVAAVGSRLYISGGFGGVALGRLLALTLPPDPCRLLSSPEACNQSGACTWCHGACLSGDQAHRLGCGGSPCSPMPRSPEECRRLRTCSECLARHPRTLQPGDGEASTPRCKWCTNCPEGACIGRNGSCTSENDCRINQREVFWAGNCSEAACGAADCEQCTREGKCMWTRQFKRTGETRRILSVQPTYDWTCFSHSLLNVSPMPVESSPPLPCPTPCHLLPNCTSCLDSKGADGGWQHCVWSSSLQQCLSPSYLPLRCMAGGCGRLLRGPESCSLGCAQATQCALCLRRPHCGWCAWGGQDGGGRCMEGGLSGPRDGLTCGRPGASWAFLSCPPEDECANGHHDCNETQNCHDQPHGYECSCKTGYTMDNMTGLCRPVCAQGCVNGSCVEPDHCRCHFGFVGRNCSTECRCNRHSECAGVGARDHCLLCRNHTKGSHCEQCLPLFVGSAVGGGTCRPCHAFCRGNSHICISRKELQMSKGEPKKYSLDPEEIENWVTEGPSEDEAVCVNCQNNSYGEKCESCLQGYFLLDGKCTKCQCNGHADTCNEQDGTGCPCQNNTETGTCQGSSPSDRRDCYKYQCAKCRESFHGSPLGGQQCYRLISVEQECCLDPTSQTNCFHEPKRRALGPGRTVLFGVQPKFTNVDIRLTLDVTFGAVDLYVSTSYDTFVVRVAPDTGVHTVHIQPPPAPPPPPPPADGGPRGAGDPGGAGASSGPGAPAEPRVREVWPRGLITYVTVTEPSAVLVVRGVRDRLVITYPHEHHALKSSRFYLLLLGVGDPSGPGANGSADSQGLLFFRQDQAHIDLFVFFSVFFSCFFLFLSLCVLLWKAKQALDQRQEQRRHLQEMTKMASRPFAKVTVCFPPDPTAPASAWKPAGLPPPAFRRSEPFLAPLLLTGAGGPWGPMGGGCCPPAIPATTAGLRAGPITLEPTEDGMAGVATLLLQLPGGPHAPNGACLGSALVTLRHRLHEYCGGGGGAGGSGHGTGAGRKGLLSQDNLTSMSL

SEQ ID NO: 962 - protein, 617 aa, Homo sapiens
MISPSLELLHSGLCKFPEVEGKMTTFKEAVTFKDVAVVFTEEELGLLDPAQRKLYRDVMLENFRNLLSVGNQPFHQDTFHFLGKEKFWKMKTTSQREGNSGGKIQIEMETVPEAGPHEEWSCQQIWEQIASDLTRSQNSIRNSSQFFKEGDVPCQIEARLSISHVQQKPYRCNECKQSFSDVSVFDLHQQSHSGEKSHTCGECGKSFCYSPALHIHQRVHMGEKCYKCDVCGKEFNQSSHLQTHQRVHTGEKPFKCGQCGKGFHSRSALNVHCKLHTGEKPYNCEECGKAFIHDSQLQEHQRIHTGEKPFKCDICGKSFRVRSRLNRHSMVHTGEKPFRCDTCGKNFRQRSALNSHSMVHIEEKPYKCEQCGKGFICRRDFCKHQMVHTGEKPYNCKECGKTFRWSSCLLNHQQVHSGQKSFKCEECGKGFYTNSRRSSHQRSHNGEKPYNCEECGKDYKRRLDLEFHQRVHTGERPYNCKECGKSFGWASCLLKHQRLHSGEKPFKCEECGKRFTQSSQLHSHQTCHTGEKLYKCEQCEKGYNSKFNLDMHQRVHGGERPYNCKECGKSFGWASCLLKHQRLHSGEKPLKSGVWEEIYSEFTASFTSVSLCGRKAI

SEQ ID NO: 963 - protein, 889 aa, Homo sapiens
MDARGGGGRPGESPGATPAPGPPPPPPPAPPQQQPPPPPPPAPPPGPGPAPPQHPPRAEALPPEAADEGGPRGRLRSRDSSCGRPGTPGAASTAKGSPNGECGRGEPQCSPAGPEGPARGPKVSFSCRGAASGPAPGPGPAEEAGSEEAGPAGEPRGSQASFMQRQFGALLQPGVNKFSLRMFGSQKAVEREQERVKSAGAWIIHPYSDFRFYWDFTMLLFMVGNLIIIPVGITFFKDETTAPWIVFNVVSDTFFLMDLVLNFRTGIVIEDNTEIILDPEKIKKKYLRTWFVVDFVSSIPVDYIFLIVEKGIDSEVYKTARALRIVRFTKILSLLRLLRLSRLIRYIHQWEEIFHMTYDLASAVMRICNLISMMLLLCHWDGCLQFLVPMLQDFPRNCWVSINGMVNHSWSELYSFALFKAMSHMLCIGYGRQAPESMTDIWLTMLSMIVGATCYAMFIGHATALIQSLDSSRRQYQEKYKQVEQYMSFHKLPADFRQKIHDYYEHRYQGKMFDEDSILGELNGPLREEIVNFNCRKLVASMPLFANADPNFVTAMLTKLKFEVFQPGDYIIREGTIGKKMYFIQHGVVSVLTKGNKEMKLSDGSYFGEICLLTRGRRTASVRADTYCRLYSLSVDNFNEVLEEYPMMRRAFETVAIDRLDRIGKKNSILLHKVQHDLNSGVFNNQENAIIQEIVKYDREMVQQAELGQRVGLFPPPPPPPQVTSAIATLQQAAAMSFCPQVARPLVGPLALGSPRLVRRPPPGPAPAAASPGPPPPASPPGAPASPRAPRTSPYGGLPAAPLAGPALPARRLSRASRPLSASQPSLPHGAPGPAASTRPASSSTPRLGPTPAARAAAPSPDRRDSASPGAAGGLDPQDSARSRLSSNL

SEQ ID NO: 964 - protein, 467 aa, Homo sapiens
MRTAPSLRRCVCLLLAAILDLARGYLTVNIEPLPPVVAGDAVTLKCNFKTDGRMREIVWYRVTDGGTIKQKIFTFDAMFSTNYSHMENYRKREDLVYQSTVRLPEVRISDNGPYECHVGIYDRATREKVVLASGNIFLNVMAPPTSIEVVAADTPAPFSRYQAQNFTLVCIVSGGKPAPMVYFKRDGEPIDAVPLSEPPAASSGPLQDSRPFRSLLHRDLDDTKMQKSLSLLDAENRGGRPYTERPSRGLTPDPNILLQPTTENIPETVVSREFPRWVHSAEPTYFLRHSRTPSSDGTVEVRALLTWTLNPQIDNEALFSCEVKHPALSMPMQAEVTLVAPKGPKIVMTPSRARVGDTVRILVHGFQNEVFPEPMFTWTRVGSRLLDGSAEFDGKELVLERVPAELNGSMYRCTAQNPLGSTDTHTRLIVFENPNIPRGTEDSNGSIGPTGARLTLVLALTVILELT

SEQ ID NO: 965 - protein, 1196 aa, Homo sapiens
MTECTSLQFVSPFAFEAMQKVDVVCLASLSDPELRLLLPCLVRMALCAPADQSQSWAQDKKLILRLLSGVEAVNSIVALLSVDFHALEQDASKEQQLRHKLGGGSGESILVSQLQHGLTLEFEHSDSPRRLRLVLSELLAIMNKVSESNGEFFFKSSELFESPVYLEEAADVLCILQAELPSLLPIVDVAEALLHVRNGAWFLCLLVANVPDSFNEVCRGLIKNGERQDEESLGGRRRTDALRFLCKMNPSQALKVRGMVVEECHLPGLGVALTLDHTKNEACEDGVSDLVCFVSGLLLGTNAKVRTWFGTFIRNGQQRKRETSSSVLWQMRRQLLLELMGILPTVRSTRIVEEADVDMEPNVSVYSGLKEEHVVKASALLRLYCALMGIAGLKPTEEEAEQLLQLMTSRPPATPAGVRFVSLSFCMLLAFSTLVSTPEQEQLMVVWLSWMIKEEAYFESTSGVSASFGEMLLLVAMYFHSNQLSAIIDLVCSTLGMKIVIKPSSLSRMKTIFTQEIFTEQVVTAHAVRVPVTSNLSANITGFLPIHCIYQLLRSRSFTKHKVSIKDWIYRQLCETSTPLHPQLLPLIDVYINSILTPASKSNPEATNQPVTEQEILNIFQGVIGGDNIRLNQRFSITAQLLVLYYILSYEEALLANTKTLAAMQRKPKSYSSSLMDQIPIKFLIRQAQGLQQELGGLHSALLRLLATNYPHLCIVDDWICEEEITGTDALLRRMLLTNNAKNHSPKQLQEAFSAVPVNNTQVMQIIEHLTLLSASELIPYAEVLTSNMSQLLNSGVPRRILQTVNKLWMVLNTVMPRRLWVMTVNALQPSIKFVRQQKYTQNDLMIDPLIVLRCDQRVHRCPPLMDITLHMLNGYLLASKAYLSAHLKETEQDRPSQNNTIGLVGQTDAPEVTREELKNALLAAQDSAAVQILLEICLPTEEEKANGVNPDSLLRNVQSVITTSAPNKGMEEGEDNLLCNLREVQCLICCLLHQMYIADPNIAKLVHFQGYPCELLPLTVAGIPSMHICLDFIPELIAQPELEKQIFAIQLLSHLCIQYALPKSLSVARLAVNVMGTLLTVLTQAKRYAFFMPTLPSLVSFCRAFPPLYEDIMSLLIQIGQVCASDVATQTRDIDPIITRLQQIKEKPSGWSQICKDSSYKNGSRDTGSMDPDVQLCHCIERTVIEIINMSVSGI

SEQ ID NO: 966 - protein, 678 aa, Homo sapiens
MPTWGARPASPDRFAVSAEAENKVREQQPHVERIFSVGVSVLPKDCPDNPHIWLQLEGPKENASRAKEYLKGLCSPELQDEIHYPPKLHCIFLGAQGFFLDCLAWSTSAHLVPRAPGSLMISGLTEAFVMAQSRVEELAERLSWDFTPGPSSGASQCTGVLRDFSALLQSPGDAHREALLQLPLAVQEELLSLVQEASSGQGPGALASWEGRSSALLGAQCQGVRAPPSDGRESLDTGSMGPGDCRGARGDTYAVEKEGGKQGGPREMDWGWKELPGEEAWEREVALRPQSVGGGARESAPLKGKALGKEEIALGGGGFCVHREPPGAHGSCHRAAQSRGASLLQRLHNGNASPPRVPSPPPAPEPPWHCGDRGDCGDRGDVGDRGDKQQGMARGRGPQWKRGARGGNLVTGTQRFKEALQDPFTLCLANVPGQPDLRHIVIDGSNVAMVHGLQHYFSSRGIAIAVQYFWDRGHRDITVFVPQWRFSKDAKVRESHFLQKLYSLSLLSLTPSRVMDGKRISSYDDRFMVKLAEETDGIIVSNDQFRDLAEESEKWMAIIRERLLPFTFVGNLFMVPDDPLGRNGPTLDEFLKKPARTQGSSKAQHPSRGFAEHGKQQQGREEEKGSGGIRKTRETERLRRQLLEVFWGQDHKVDFILQREPYCRDINQLSEALLSLNF

SEQ ID NO: 967 - protein, 489 aa, Homo sapiens
MTPIVTVLICLRLSLGPRTHVQAGTLPKPTLWAEPGSVITQGSPVTLWCQGILETQEYRLYREKKTAPWITRIPQEIVKKGQFPIPSITWEHTGRYRCFYGSHTAGWSEPSDPLELVVTGAYIKPTLSALPSPVVTSGGNVTLHCVSQVAFGSFILCKEGEDEHPQCLNSQPRTHGWSRAIFSVGPVSPSRRWSYRCYAYDSNSPHVWSLPSDLLELLVLGVSKKPSLSVQPGPIVAPGESLTLQCVSDVSYDRFVLYKEGERDFLQLPGPQPQAGLSQANFTLGPVSRSYGGQYRCSGAYNLSSEWSAPSDPLDILIAGQFRGRPFISVHPGPTVASGENVTLLCQSWGPFHTFLLTKAGAADAPLRLRSIHEYPKYQAEFPMSPVTSAHSGTYRCYGSLSSNPYLLSHPSDSLELMVSGAAETLSPPQNKSDSKAGAANTLSPSQNKTASHPQDYTVENLIRMGIAGLVLVVLGILLFEAQHSQRSL

SEQ ID NO: 968 - protein, 466 aa, Homo sapiens
MTPILTVLICLGLSLGPRTHVQAGHLPKPTLWAEPGSVIIQGSPVTLRCQGSLQAEEYHLYRENKSASWVRRIQEPGKNGQFPIPSITWEHAGRYHCQYYSHNHSSEYSDPLELVVTGAYSKPTLSALPSPVVTSGGNVTLQCVSQVAFDGFILCKEGEDEHPQRLNSHSHARGWSWAIFSVGPVSPSRRWSYRCYAYDSNSPYVWSLPSDLLELLVPGVSKKPSLSVQPGPMVAPGESLTLQCVSDVGYDRFVLYKEGERDFLQRPGWQPQAGLSQANFTLGPVSPSHGGQYRCYSAHNLSSEWSAPSDPLDILITGQFYDRPSLSVQPVPTVAPGKNVTLLCQSRGQFHTFLLTKEGAGHPPLHLRSEHQAQQNQAEFRMGPVTSAHVGTYRCYSSLSSNPYLLSLPSDPLELVVSASLGQHPQDYTVENLIRMGVAGLVLVVLGILLFEAQHSQRSLQDAAGR

SEQ ID NO: 969 - protein, 483 aa, Homo sapiens
MTPILTVLICLGLSLGPRTHVQAGHLPKPTLWAEPGSVIIQGSPVTLRCQGSLQAEEYHLYRENKSASWVRRIQEPGKNGQFPIPSITWEHAGRYHCQYYSHNHSSEYSDPLELVVTGAYSKPTLSALPSPVVTSGGNVTLQCVSQVAFDGFILCKEGEDEHPQRLNSHSHARGWSWAIFSVGPVSPSRRWSYRCYAYDSNSPYVWSLPSDLLELLVPGVSKKPSLSVQPGPMVAPGESLTLQCVSDVGYDRFVLYKEGERDFLQRPGWQPQAGLSQANFTLGPVSPSHGGQYRCYSAHNLSSEWSAPSDPLDILITGQFYDRPSLSVQPVPTVAPGKNVTLLCQSRGQFHTFLLTKEGAGHPPLHLRSEHQAQQNQAEFRMGPVTSAHVGTYRCYSSLSSNPYLLSLPSDPLELVVSEAAETLSPSQNKTDSTTTSLGQHPQDYTVENLIRMGVAGLVLVVLGILLFEAQHSQRSLQDAAGR

SEQ ID NO: 970 - protein, 451 aa, Homo sapiens
MPREIITLQLGQCGNQIGFEFWKQLCAEHGISPEGIVEEFATEGTDRKDVFFYQADDEHYIPRAVLLDLEPRVIHSILNSPYAKLYNPENIYLSEHGGGAGNNWASGFSQGEKIHEDIFDIIDREADGSDSLEGFVLCHSIAGGTGSGLGSYLLERLNDRYPKKLVQTYSVFPNQDEMSDVVVQPYNSLLTLKRLTQNADCVVVLDNTALNRIATDRLHIQNPSFSQINQLVSTIMSASTTTLRYPGYMNNDLIGLIASLIPTPRLHFLMTGYTPLTTDQSVASVRKTTVLDVMRRLLQPKNVMVSTGRDRQTNHCYIAILNIIQGEVDPTQVHKSLQRIRERKLANFIPWGPASIQVALSRKSPYLPSAHRVSGLMMANHTSISSLFERTCRQYDKLRKREAFLEQFRKEDMFKDNFDEMDTSREIVQQLIDEYHAATRPDYISWGTQEQ

SEQ ID NO: 971 - protein, 331 aa, Homo sapiens
MLLLINVILTLWVSCANGQEVKPCDFPEIQHGGLYYKSLRRLYFPAAAGQSYSYYCDQNFVTPSGSYWDYIHCTQDGWSPTVPCLRTCSKSDIEIENGFISESSSIYILNKEIQYKCKPGYATADGNSSGSITCLQNGWSAQPICIKFCDMPVFENSRAKSNGMRFKLHDTLDYECYDGYEISYGNTTGSIVCGEDGWSHFPTCYNSSEKCGPPPPISNGDTTSFLLKVYVPQSRVEYQCQSYYELQGSNYVTCSNGEWSEPPRCIHPCIITEENMNKNNIQLKGKSDIKYYAKTGDTIEFMCKLGYNANTSVLSFQAVCREGIVEYPRCE

SEQ ID NO: 972 - protein, 1570 aa, Homo sapiens
MSDSLWTALSNFSMPSFPGGSMFRRTKSCRTSNRKSLILTSTSPTLPRPHSPLPGHLGSSPLDSPRNFSPNTPAHFSFASSRRADGRRWSLASLPSSGYGTNTPSSTVSSSCSSQERLHQLPYQPTVDELHFLSKHFGSTESITDEDGGRRSPAVRPRSRSLSPGRSPSSYDNEIVMMNHVYKERFPKATAQMEEKLRDFTRAYEPDSVLPLADGVLSFIHHQIIELARDCLTKSRDGLITTVYFYELQENLEKLLQDAYERSESLEVAFVTQLVKKLLIIISRPARLLECLEFNPEEFYHLLEAAEGHAKEGHLVKTDIPRYIIRQLGLTRDPFPDVVHLEEQDSGGSNTPEQDDLSEGRSSKAKKPPGENDFDTIKLISNGAYGAVYLVRHRDTRQRFAMKKINKQNLILRNQIQQAFVERDILTFAENPFVVGMFCSFETRRHLCMVMEYVEGGDCATLLKNIGALPVEMARMYFAETVLALEYLHNYGIVHRDLKPDNLLITSMGHIKLTDFGLSKMGLMSLTTNLYEGHIEKDAREFLDKQVCGTPEYIAPEVILRQGYGKPVDWWAMGIILYEFLVGCVPFFGDTPEELFGQVISDDILWPEGDEALPTEAQLLISSLLQTNPLVRLGAGGAFEVKQHSFFRDLDWTGLLRQKAEFIPHLESEDDTSYFDTRSDRYHHVNSYDEDDTTEEEPVEIRQFSSCSPRFSKVYSSMEQLSQHEPKTPVAAAGSSKREPSTKGPEEKVAGKREGLGGLTLREKTWRGGSPEIKRFSASEASFLEGEASPPLGARRRFSALLEPSRFSAPQEDEDEARLRRPPRPSSDPAGSLDARAPKEETQGEGTSSAGDSEATDRPRPGDLCPPSKDGDASGPRATNDLVLRRARHQQMSGDVAVEKRPSRTGGKVIKSASATALSVMIPAVDPHGSSPLASPMSPRSLSSNPSSRDSSPSRDYSPAVSGLRSPITIQRSGKKYGFTLRAIRVYMGDTDVYSVHHIVWHVEEGGPAQEAGLCAGDLITHVNGEPVHGMVHPEVVELILKSGNKVAVTTTPFENTSIRIGPARRSSYKAKMARRNKRPSAKEGQESKKRSSLFRKITKQSNLLHTSRSLSSLNRSLSSSDSLPGSPTHGLPARSPTHSYRSTPDSAYLGASSQSSSPASSTPNSPASSASHHIRPSTLHGLSPKLHRQYRSARCKSAGNIPLSPLAHTPSPTQASPPPLPGHTVGSSHTTQSFPAKLHSSPPVVRPRPKSAEPPRSPLLKRVQSAEKLGASLSADKKGALRKHSLEVGHPDFRKDFHGELALHSLAESDGETPPVEGLGAPRQVAVRRLGRQESPLSLGADPLLPEGASRPPVSSKEKESPGGAEACTPPRATTPGGRTLERDVGCTRHQSVQTEDGTGGMARAVAKAALSPVQEHETGRRSSSGEAGTPLVPIVVEPARPGAKAVVPQPLGADSKGLQEPAPLAPSVPEAPRGRERWVLEVVEERTTLSGPRSKPASPKLSPEPQTPSLAPAKCSAPSSAVTPVPPASLLGSGTKPQVGLTSRCPAEAVPPAGLTKKGVSSPAPPGP

SEQ ID NO: 973 - protein, 1015 aa, Homo sapiens
MGAERRLLSIKEAFRLAQQPHQNQAKLVVALSRTYRTMDDKTVFHEEFIHYLKYVMVVYKREPAVERVIEFAAKFVTSFHQSDMEDDEEEEDGGLLNYLFTFLLKSHEANSNAVRFRVCLLINKLLGSMPENAQIDDDVFDKINKAMLIRLKDKIPNVRIQAVLALSRLQDPKDDECPVVNAYATLIENDSNPEVRRAVLSCIAPSAKTLPKIVGRTKDVKEAVRKLAYQVLAEKVHMRAMSIAQRVMLLQQGLNDRSDAVKQAMQKHLLQGWLRFSEGNILELLHRLDVENSSEVAVSVLNALFSITPLSELVGLCKNNDGRKLIPVETLTPEIALYWCALCEYLKSKGDEGEEFLEQILPEPVVYADYLLSYIQSIPVVNEEHRGDFSYIGNLMTKEFIGQQLILIIKSLDTSEEGGRKKLLAVLQEILILPTIPISLVSFLVERLLHIIIDDNKRTQIVTEIISEIRAPIVTVGVNNDPADVRKKELKMAEIKVKLIEAKEALENCITLQDFNRASELKEEIKALEDARINLLKETEQLEIKEVHIEKNDAETLQKCLILCYELLKQMSISTGLSATMNGIIESLILPGIISIHPVVRNLAVLCLGCCGLQNQDFARKHFVLLLQVLQIDDVTIKISALKAIFDQLMTFGIEPFKTKKIKTLHCEGTEINSDDEQESKEVEETATAKNVLKLLSDFLDSEVSELRTGAAEGLAKLMFSGLLVSSRILSRLILLWYNPVTEEDVQLRHCLGVFFPVFAYASRTNQECFEEAFLPTLQTLANAPASSPLAEIDITNVAELLVDLTRPSGLNPQAKTSQDYQALTVHDNLAMKICNEILTSPCSPEIRVYTKALSSLELSSHLAKDLLVLLNEILEQVKDRTCLRALEKIKIQLEKGNKEFGDQAEAAQDATLTTTTFQNEDEKNKEVYMTPLRGVKATQASKSTQLKTNRGQRKVTVSARTNRRCQTAEADSESDHEVPEPESEMKMRLPRRAKTAALEKSKLNLAQFLNEDLS

SEQ ID NO: 974 - protein, 815 aa, Homo sapiens
MEVRASLQKVSGSSDSVATMNSEEFVLVPQYADDNSTKHEEKPQLKIVSNGDEQLEKAMEEILRDSEKRPSSLLVDCQSSSEISDHSFGDIPASQTNKPSLQLILDPSNTEISTPRPSSPGGLPEEDSVLFNKLTYLGCMKVSSPRNEVEALRAMATMKSSSQYPFPVTLYVPNVPEGSVRIIDQSSNVEIASFPIYKVLFCARGHDGTTESNCFAFTESSHGSEEFQIHVFSCEIKEAVSRILYSFCTAFKRSSRQVSDVKDSVIPTPDSDVFTFSVSLEVKEDDGKGNFSPVPKDRDKFYFKLKQGIEKKVVITVQQLSNKELAIERCFGMLLSPGRNVKNSDMHLLDMESMGKSYDGRAYVITGMWNPNAPVFLALNEETPKDKQVYMTVAVDMVVTEVVEPVRFLLETVVRVYPANERFWYFSRKTFTETFFMRLKQSEGKGHTNAGDAIYEVVSLQRESDKEEPVTPTSGGGPMSPQDDEAEEESDNELSSGTGDVSKDCPEKILYSWGELLGKWHSNLGARPKGLSTLVKSGVPEALRAEVWQLLAGCHDNQAMLDRYRILITKDSAQESVITRDIHRTFPAHDYFKDTGGDGQESLYKICKAYSVYDEDIGYCQGQSFLAAVLLLHMPEEQAFCVLVKIMYDYGLRDLYRNNFEDLHCKFYQLERLMQEQLPDLHSHFSDLNLEAHMYASQWFLTLFTAKFPLCMVFHIIDLLLCEGLNIIFHVALALLKTSKEDLLQADFEGALKFFRVQLPKRYRAEENARRLMEQACNIKVPTKKLKKYEKEYQTMRESQLQQEDPMDRYKFVYL

SEQ ID NO: 975 - protein, 663 aa, Homo sapiens
MGRYRIRVATGAWLFSGSYNRVQLWLVGTRGEAELELQLRPARGEEEEFDHDVAEDLGLLQFVRLRKHHWLVDDAWFCDRITVQGPGACAEVAFPCYRWVQGEDILSLPEGTARLPGDNALDMFQKHREKELKDRQQIYCWATWKEGLPLTIAADRKDDLPPNMRFHEEKRLDFEWTLKAGALEMALKRVYTLLSSWNCLEDFDQIFWGQKSALAEKVRQCWQDDELFSYQFLNGANPMLLRRSTSLPSRLVLPSGMEELQAQLEKELQNGSLFEADFILLDGIPANVIRGEKQYLAAPLVMLKMEPNGKLQPMVIQIQPPNPSSPTPTLFLPSDPPLAWLLAKSWVRNSDFQLHEIQYHLLNTHLVAEVIAVATMRCLPGLHPIFKFLIPHIRYTMEINTRARTQLISDGGIFDKAVSTGGGGHVQLLRRAAAQLTYCSLCPPDDLADRGLLGLPGALYAHDALRLWEIIARYVEGIVHLFYQRDDIVKGDPELQAWCREITEVGLCQAQDRGFPVSFQSQSQLCHFLTMCVFTCTAQHAAINQGQLDWYAWVPNAPCTMRMPPPTTKEDVTMATVMGSLPDVRQACLQMAISWHLSRRQPDMVPLGHHKEKYFSGPKPKAVLNQFRTDLEKLEKEITARNEQLDWPYEYLKPSCIENSVTI

SEQ ID NO: 976 - protein, 1211 aa, Homo sapiens
MDPPAGAARRLLCPALLLLLLLLPPPLLPPPPPPANARLAAAADPPGGPLGHGAERILAVPVRTDAQGRLVSHVVSAATSRAGVRARRAAPVRTPSFPGGNEEEPGSHLFYNVTVFGRDLHLRLRPNARLVAPGATMEWQGEKGTTRVEPLLGSCLYVGDVAGLAEASSVALSNCDGLAGLIRMEEEEFFIEPLEKGLAAQEAEQGRVHVVYRRPPTSPPLGGPQALDTGASLDSLDSLSRALGVLEEHANSSRRRARRHAADDDYNIEVLLGVDDSVVQFHGKEHVQKYLLTLMNIVNEIYHDESLGAHINVVLVRIILLSYGKSMSLIEIGNPSQSLENVCRWAYLQQKPDTGHDEYHDHAIFLTRQDFGPSGMQGYAPVTGMCHPVRSCTLNHEDGFSSAFVVAHETGHVLGMEHDGQGNRCGDEVRLGSIMAPLVQAAFHRFHWSRCSQQELSRYLHSYDCLLDDPFAHDWPALPQLPGLHYSMNEQCRFDFGLGYMMCTAFRTFDPCKQLWCSHPDNPYFCKTKKGPPLDGTMCAPGKHCFKGHCIWLTPDILKRDGSWGAWSPFGSCSRTCGTGVKFRTRQCDNPHPANGGRTCSGLAYDFQLCSRQDCPDSLADFREEQCRQWDLYFEHGDAQHHWLPHEHRDAKERCHLYCESRETGEVVSMKRMVHDGTRCSYKDAFSLCVRGDCRKVGCDGVIGSSKQEDKCGVCGGDNSHCKVVKGTFTRSPKKHGYIKMFEIPAGARHLLIQEVDATSHHLAVKNLETGKFILNEENDVDASSKTFIAMGVEWEYRDEDGRETLQTMGPLHGTITVLVIPVGDTRVSLTYKYMIHEDSLNVDDNNVLEEDSVVYEWALKKWSPCSKPCGGGSQFTKYGCRRRLDHKMVHRGFCAALSKPKAIRRACNPQECSQPVWVTGEWEPCSQTCGRTGMQVRSVRCIQPLHDNTTRSVHAKHCNDARPESRRACSRELCPGRWRAGPWSQCSVTCGNGTQERPVLCRTADDSFGICQEERPETARTCRLGPCPRNISDPSKKSYVVQWLSRPDPDSPIRKISSKGHCQGDKSIFCRMEVLSRYCSIPGYNKLCCKSCNLYNNLTNVEGRIEPPPGKHNDIDVFMPTLPVPTVAMEVRPSPSTPLEVPLNASSTNATEDHPETNAVDEPYKIHGLEDEVQPPNLIPRRPSPYEKTRNQRIQELIDEMRKKEMLGKF

SEQ ID NO: 977 - protein, 434 aa, Homo sapiens
MLRCLYHWHRPVLNRRWSRLCLPKQYLFTMKLQSPEFQSLFTEGLKSLTELFVKENHELRIAGGAVRDLLNGVKPQDIDFATTATPTQMKEMFQSAGIRMINNRGEKHGTITARLHEENFEITTLRIDVTTDGRHAEVEFTTDWQKDAERRDLTINSMFLGFDGTLFDYFNGYEDLKNKKVRFVGHAKQRIQEDYLRILRYFRFYGRIVDKPGDHDPETLEAIAENAKGLAGISGERIWVELKKILVGNHVNHLIHLIYDLDVAPYIGLPANASLEEFDKVSKNVDGFSPKPVTLLASLFKVQDDVTKLDLRLKIAKEEKNLGLFIVKNRKDLIKATDSSDPLKPYQDFIIDSREPDATTRVCELLKYQGEHCLLKEMQQWSIPPFPVSGHDIRKVGISSGKEIGALLQQLREQWKKSGYQMEKDELLSYIKKT

SEQ ID NO: 978 - protein, 1369 aa, Homo sapiens
MGGKNKKHKAPAAAVVRAAVSASRAKSAEAGIAGEAQSKKPVSRPATAAAAAAGSREPRVKQGPKIYSFNSTNDSSGPANLDKSILKVVINNKLEQRIIGVINEHKKQNNDKGMISGRLTAKKLQDLYMALQAFSFKTKDIEDAMTNTLLYGGDLHSALDWLCLNLSDDALPEGFSQEFEEQQPKSRPKFQSPQIQATISPPLQPKTKTYEEDPKSKPKKEEKNMEVNMKEWILRYAEQQNEEEKNENSKSLEEEEKFDPNERYLHLAAKLLDAKEQAATFKLEKNKQGQKEAQEKIRKFQREMETLEDHPVFNPAMKISHQQNERKKPPVATEGESALNFNLFEKSAAATEEEKDKKKEPHDVRNFDYTARSWTGKSPKQFLIDWVRKNLPKSPNPSFEKVPVGRYWKCRVRVIKSEDDVLVVCPTILTEDGMQAQHLGATLALYRLVKGQSVHQLLPPTYRDVWLEWSDAEKKREELNKMETNKPRDLFIAKLLNKLKQQQQQQQQHSENKRENSEDPEESWENLVSDEDFSALSLESANVEDLEPVRNLFRKLQSTPKYQKLLKERQQLPVFKHRDSIVETLKRHRVVVVAGETGSGKSTQVPHFLLEDLLLNEWEASKCNIVCTQPRRISAVSLANRVCDELGCENGPGGRNSLCGYQIRMESRACESTRLLYCTTGVLLRKLQEDGLLSNVSHVIVDEVHERSVQSDFLLIILKEILQKRSDLHLILMSATVDSEKFSTYFTHCPILRISGRSYPVEVFHLEDIIEETGFVLEKDSEYCQKFLEEEEEVTINVTSKAGGIKKYQEYIPVQTGAHADLNPFYQKYSSRTQHAILYMNPHKINLDLILELLAYLDKSPQFRNIEGAVLIFLPGLAHIQQLYDLLSNDRRFYSERYKVIALHSILSTQDQAAAFTLPPPGVRKIVLATNIAETGITIPDVVFVIDTGRTKENKYHESSQMSSLVETFVSKASALQRQGRAGRVRDGFCFRMYTRERFEGFMDYSVPEILRVPLEELCLHIMKCNLGSPEDFLSKALDPPQLQVISNAMNLLRKIGACELNEPKLTPLGQHLAALPVNVKIGKMLIFGAIFGCLDPVATLAAVMTEKSPFTTPIGRKDEADLAKSALAMADSDHLTIYNAYLGWKKARQEGGYRSEITYCRRNFLNRTSLLTLEDVKQELIKLVKAAGFSSSTTSTSWEGNRASQTLSFQEIALLKAVLVAGLYDNVGKIIYTKSVDVTEKLACIVETAQGKAQVHPSSVNRDLQTHGWLLYQEKIRYARVYLRETTLITPFPVLLFGGDIEVQHRERLLSIDGWIYFQAPVKIAVIFKQLRVLIDSVLRKKLENPKMSLENDKILQIITELIKTENN

SEQ ID NO: 979 - protein, 678 aa, Homo sapiens
MELRSYQWEVIMPALEGKNIIIWLPTGAGKTRAAAYVAKRHLETVDGAKVVVLVNRVHLVTQHGEEFRRMLDGRWTVTTLSGDMGPRAGFGHLARCHDLLICTAELLQMALTSPEEEEHVELTVFSLIVVDECHHTHKDTVYNVIMSQYLELKLQRAQPLPQVLGLTASPGTGGASKLDGAINHVLQLCANLDTWCIMSPQNCCPQLQEHSQQPCKQYNLCHRRSQDPFGDLLKKLMDQIHDHLEMPELSRKFGTQMYEQQVVKLSEAAALAGLQEQRVYALHLRRYNDALLIHDTVRAVDALAALQDFYHREHVTKTQILCAERRLLALFDDRKNELAHLATHGPENPKLEMLEKILQRQFSSSNSPRGIIFTRTRQSAHSLLLWLQQQQGLQTVDIRAQLLIGAGNSSQSTHMTQRDQQEVIQKFQDGTLNLLVATSVAEEGLDIPHCNVVVRYGLLTNEISMVQARGRARADQSVYAFVATEGSRELKRELINEALETLMEQAVAAVQKMDQAEYQAKIRDLQQAALTKRAAQAAQRENQRQQFPVEHVQLLCINCMVAVGHGSDLRKVEGTHHVNVNPNFSNYYNVSRDPVVINKVFKDWKPGGVISCRNCGEVWGLQMIYKSVKLPVLKVRSMLLETPQGRIQAKKWSRVPFSVPDFDFLQHCAENLSDLSLD

SEQ ID NO: 980 - protein, 494 aa, Homo sapiens
MDLSNNTMSLSVRTPGLSRRLSSQSVIGRPRGMSASSVGSGYGGSAFGFGASCGGGFSAASMFGSSSGFGGGSGSSMAGGLGAGYGRALGGGSFGGLGMGFGGSPGGGSLGILSGNDGGLLSGSEKETMQNLNDRLASYLDKVRALEEANTELENKIREWYETRGTGTADASQSDYSKYYPLIEDLRNKIISASIGNAQLLLQIDNARLAAEDFRMKYENELALRQGVEADINGLRRVLDELTLTRTDLEMQIESLNEELAYMKKNHEDELQSFRVGGPGEVSVEMDAAPGVDLTRLLNDMRAQYETIAEQNRKDAEAWFIEKSGELRKEISTNTEQLQSSKSEVTDLRRAFQNLEIELQSQLAMKKSLEDSLAEAEGDYCAQLSQVQQLISNLEAQLLQVRADAERQNVDHQRLLNVKARLELEIETYRRLLDGEAQGDGLEESLFVTDSKSQAQSTDSSKDPTKTRKIKTVVQEMVNGEVVSSQVQEIEELM

SEQ ID NO: 981 - protein, 2177 aa, Homo sapiens
MEEILRKLQKEASGSKYKAIKESCTWALETLGGLDTIVKIPPHVLREKCLLPLQLALESKNVKLAQHALAGMQKLLSEERFVSMETDSDEKQLLNQILNAVKVTPSLNEDLQVEVMKVLLCITYTPTFDLNGSAVLKIAEVCIETYISSCHQRSINTAVRATLSQMLSDLTLQLRQRQENTIIENPDVPQDFGNQGSTVESLCDDVVSVLTVLCEKLQAAINDSQQLQLLYLECILSVLSSSSSSMHLHRRFTDLIWKNLCPALIVILGNPIHDKTITSAHTSSTSTSLESDSASPGVSDHGRGSGCSCTAPALSGPVARTIYYIAAELVRLVGSVDSMKPVLQSLYHRVLLYPPPQHRVEAIKIMKEILGSPQRLCDLAGPSSTESESRKRSISKRKSHLDLLKLIMDGMTEACIKGGIEACYAAVSCVCTLLGALDELSQGKGLSEGQVQLLLLRLEELKDGAEWSRDSMEINEADFRWQRRVLSSEHTPWESGNERSLDISISVTTDTGQTTLEGELGQTTPEDHSGNHKNSLKSPAIPEGKETLSKVLETEAVDQPDVVQRSHTVPYPDITNFLSVDCRTRSYGSRYSESNFSVDDQDLSRTEFDSCDQYSMAAEKDSGRSDVSDIGSDNCSLADEEQTPRDCLGHRSLRTAALSLKLLKNQEADQHSARLFIQSLEGLLPRLLSLSNVEEVDTALQNFASTFCSGMMHSPGFDGNSSLSFQMLMNADSLYTAAHCALLLNLKLSHGDYYRKRPTLAPGVMKDFMKQVQTSGVLMVFSQAWIEELYHQVLDRNMLGEAGYWGSPEDNSLPLITMLTDIDGLESSAIGGQLMASAATESPFAQSRRIDDSTVAGVAFARYILVGCWKNLIDTLSTPLTGRMAGSSKGLAFILGAEGIKEQNQKERDAICMSLDGLRKAARLSCALGVAANCASALAQMAAASCVQEEKEEREAQEPSDAITQVKLKVEQKLEQIGKVQGVWLHTAHVLCMEAILSVGLEMGSHNPDCWPHVFRVCEYVGTLEHNHFSDGASQPPLTISQPQKATGSAGLLGDPECEGSPPEHSPEQGRSLSTAPVVQPLSIQDLVREGSRGRASDFRGGSLMSGSSAAKVVLTLSTQADRLFEDATDKLNLMALGGFLYQLKKASQSQLFHSVTDTVDYSLAMPGEVKSTQDRKSALHLFRLGNAMLRIVRSKARPLLHVMRCWSLVAPHLVEAACHKERHVSQKAVSFIHDILTEVLTDWNEPPHFHFNEALFRPFERIMQLELCDEDVQDQVVTSIGELVEVCSTQIQSGWRPLFSALETVHGGNKSEMKEYLVGDYSMGKGQAPVFDVFEAFLNTDNIQVFANAATSYIMCLMKFVKGLGEVDCKEIGDCAPAPGAPSTDLCLPALDYLRRCSQLLAKIYKMPLKPIFLSGRLAGLPRRLQEQSASSEDGIESVLSDFDDDTGLIEVWIILLEQLTAAVSNCPRQHQPPTLDLLFELLRDVTKTPGPGFGIYAVVHLLLPVMSVWLRRSHKDHSYWDMASANFKHAIGLSCELVVEHIQSFLHSDIRYESMINTMLKDLFELLVACVAKPTETISRVGCSCIRYVLVTAGPVFTEEMWRLACCALQDAFSATLKPVKDLLGCFHSGTESFSGEGCQVRVAAPSSSPSAEAEYWRIRAMAQQVFMLDTQCSPKTPNNFDHAQSCQLIIELPPDEKPNGHTKKSVSFREIVVSLLSHQVLLQNLYDILLEEFVKGPSPGEEKTIQVPEAKLAGFLRYISMQNLAVIFDLLLDSYRTAREFDTSPGLKCLLKKVSGIGGAANLYRQSAMSFNIYFHALVCAVLTNQETITAEQVKKVLFEDDERSTDSSQQCSSEDEDIFEETAQVSPPRGKEKRQWRARMPLLSVQPVSNADWVWLVKRLHKLCMELCNNYIQMHLDLENCMEEPPIFKGDPFFILPSFQSESSTPSTGGFSGKETPSEDDRSQSREHMGESLSLKAGGGDLLLPPSPKVEKKDPSRKKEWWENAGNKIYTMAADKTISKLMTEYKKRKQQHNLSAFPKEVKVEKKGEPLGPRGQDSPLLQRPQHLMDQGQMRHSFSAGPELLRQDKRPRSGSTGSSLSVSVRDAEAQIQAWTNMVLTVLNQIQILPDQTFTALQPAVFPCISQLTCHVTDIRVRQAVREWLGRVGRVYDIIV

SEQ ID NO: 982 - protein, 1235 aa, Homo sapiens
MFGDLFEEEYSTVSNNQYGKGKKLKTKALEPPAPREFTNLSGIRNQGGTCYLNSLLQTLHFTPEFREALFSLGPEELGLFEDKDKPDAKVRIIPLQLQRLFAQLLLLDQEAASTADLTDSFGWTSNEEMRQHDVQELNRILFSALETSLVGTSGHDLIYRLYHGTIVNQIVCKECKNVSERQEDFLDLTVAVKNVSGLEDALWNMYVEEEVFDCDNLYHCGTCDRLVKAAKSAKLRKLPPFLTVSLLRFNFDFVKCERYKETSCYTFPLRINLKPFCEQSELDDLEYIYDLFSVIIHKGGCYGGHYHVYIKDVDHLGNWQFQEEKSKPDVNLKDLQSEEEIDHPLMILKAILLEENNLIPVDQLGQKLLKKIGISWNKKYRKQHGPLRKFLQLHSQIFLLSSDESTVRLLKNSSLQAESDFQRNDQQIFKMLPPESPGLNNSISCPHWFDINDSKVQPIREKDIEQQFQGKESAYMLFYRKSQLQRPPEARANPRYGVPCHLLNEMDAANIELQTKRAECDSANNTFELHLHLGPQYHFFNGALHPVVSQTESVWDLTFDKRKTLGDLRQSIFQLLEFWEGDMVLSVAKLVPAGLHIYQSLGGDELTLCETEIADGEDIFVWNGVEVGGVHIQTGIDCEPLLLNVLHLDTSSDGEKCCQVIESPHVFPANAEVGTVLTALAIPAGVIFINSAGCPGGEGWTAIPKEDMRKTFREQGLRNGSSILIQDSHDDNSLLTKEEKWVTSMNEIDWLHVKNLCQLESEEKQVKISATVNTMVFDIRIKAIKELKLMKELADNSCLRPIDRNGKLLCPVPDSYTLKEAELKMGSSLGLCLGKAPSSSQLFLFFAMGSDVQPGTEMEIVVEETISVRDCLKLMLKKSGLQGDAWHLRKMDWCYEAGEPLCEEDATLKELLICSGDTLLLIEGQLPPLGFLKVPIWWYQLQGPSGHWESHQDQTNCTSSWGRVWRATSSQGASGNEPAQVSLLYLGDIEISEDATLAELKSQAMTLPPFLEFGVPSPAHLRAWTVERKRPGRLLRTDRQPLREYKLGRRIEICLEPLQKGENLGPQDVLLRTQVRIPGERTYAPALDLVWNAAQGGTAGSLRQRVADFYRLPVEKIEIAKYFPEKFEWLPISSWNQQITKRKKKKKQDYLQGAPYYLKDGDTIGVKNLLIDDDDDFSTIRDDTGKEKQKQRALGRRKSQEALHEQSSYILSSAETPARPRAPETSLSIHVGSFR

SEQ ID NO: 983 - protein, 327 aa, Homo sapiens
MQKIKSLMTRQGLKSPQESLSDLGAIESLRVPGKEEFRELREQPSDPQAEQELINSIEQVYFSVDSFDIVKYELEKLPPVLNLQELEAYRDKLKQQQAAVSKKVADLILEKQPAYVKELERVTSLQTGLQLAAVICTNGRRHLNIAKEGFTQASLGLLANQRKRQLLIGLLKSLRTIKTLQRTDVRLSEMLEEEDYPGAIQLCLECQKAASTFKHYSCISELNSKLQDTLEQIEEQLDVALSKICKNFDINHYTKVQQAYRLLGKTQTAMDQLHMHFTQAIHNTVFQVVLGYVELCAGNTDTKFQKLQYKDLCTVCSDLITIHISLL

SEQ ID NO: 984 - protein, 1137 aa, Homo sapiens
MKVKEEKAGVGKLDHTNHRRRFPDQKECPPIHIGLPVPTYPQRKTDQKGHLSGLQKVHWGLRPDQPQQELTGPGSGASSQDSSMDLISRTRSPAAEQLQDILGEEDEAPNPTLFTEMDTLQHDGDQMEWKESARWIKFEEKVEEGGERWSKPHVSTLSLHSLFELRTCLQTGTVLLDLDSGSLPQIIDDVIEKQIEDGLLRPELRERVSYVLLRRHRHQTKKPIHRSLADIGKSVSTTNRSPARSPGAGPSLHHSTEDLRMRQSANYGRLCHAQSRSMNDISLTPNTDQRKNKFMKKIPKDSEASNVLVGEVDFLDQPFIAFVRLIQSAMLGGVTEVPVPTRFLFILLGPSGRAKSYNEIGRAIATLMVDDLFSDVAYKARNREDLIAGIDEFLDEVIVLPPGEWDPNIRIEPPKKVPSADKRKSVFSLAELGQMNGSVGGGGGAPGGGNGGGGGGGSGGGAGSGGAGGTSSGDDGEMPAMHEIGEELIWTGRFFGGLCLDIKRKLPWFPSDFYDGFHIQSISAILFIYLGCITNAITFGGLLGDATDNYQGVMESFLGTAMAGSLFCLFSGQPLIILSSTGPILIFEKLLFDFSKGNGLDYMEFRLWIGLHSAVQCLILVATDASFIIKYITRFTEEGFSTLISFIFIYDAIKKMIGAFKYYPINMDFKPNFITTYKCECVAPDTVNTTVFNASAPLAPDTNASLYNLLNLTALDWSLLSKKECLSYGGRLLGNSCKFIPDLALMSFILFFGTYSMTLTLKKFKFSRYFPTKVRALVADFSIVFSILMFCGIDACFGLETPKLHVPSVIKPTRPDRGWFVAPFGKNPWWVYPASILPALLVTILIFMDQQITAVIVNRKENKLKKAAGYHLDLFWVGILMALCSFMGLPWYVAATVISIAHIDSLKMETETSAPGEQPQFLGVREQRVTGIIVFILTGISVFLAPILKCIPLPVLYGVFLYMGVASLNGIQMGTGGSEFKIQKKLTPFWERCKLFLMPAKHQPDHAFLRHVPLRRIHLFTLVQILCLAVLWILKSTVAAIIFPVMILGLIIVRRLLDFIFSQHDLAWIDNILPEKEKKETDKKRKRKKGAHEDCDEEPQFPPPSVIKIPMESVQSDPQNGIHCIARKRSSSWSYSL

SEQ ID NO: 985 - protein, 926 aa, Homo sapiens
MTTKDYPSLWGFGTTKTFKIPIEHLDFKYIEKCSDVKHLEKILCVLRSGEEGYYPELTEFCEKHLQALAPESRALRKDKPAATAASFTAEEWEKIDGDIKSWVSEIKKEEDKMHFHETETFPAMKDNLPPVRGSNSCLHVGKEKYSKRPTKKKTPRDYAEWDKFDVEKECLKIDEDYKEKTVIDKSHLSKIETRIDTAGLTEKEKDFLATREKEKGNEAFNSGDYEEAVMYYTRSISALPTVVAYNNRAQAEIKLQNWNSAFQDCEKVLELEPGNVKALLRRATTYKHQNKLREATEDLSKVLDVEPDNDLAKKTLSEVERDLKNSEAASETQTKGKRMVIQEIENSEDEEGKSGRKHEDGGGDKKPAEPAGAARAAQPCVMGNIQKKLTGKAEGGKRPARGAPQRGQTPEAGADKRSPRRASAAAAAGGGATGHPGGGQGAENPAGLKSQGNELFRSGQFAEAAGKYSAAIALLEPAGSEIADDLSILYSNRAACYLKEGNCSGCIQDCNRALELHPFSMKPLLRRAMAYETLEQYGKAYVDYKTVLQIDCGLQLANDSVNRLSRILMELDGPNWREKLSPIPAVPASVPLQAWHPAKEMISKQAGDSSSHRQQGITDEKTFKALKEEGNQCVNDKNYKDALSKYSECLKINNKECAIYTNRALCYLKLCQFEEAKQDCDQALQLADGNVKAFYRRALAHKGLKNYQKSLIDLNKVILLDPSIIEAKMELEEVTRLLNLKDKTAPFNKEKERRKIEIQEVNEGKEEPGRPAGEVSMGCLASEKGGKSSRSPEDPEKLPIAKPNNAYEFGQIINALSTRKDKEACAHLLAITAPKDLPMFLSNKLEGDTFLLLIQSLKNNLIEKDPSLVYQHLLYLSKAERFKMMLTLISKGQKELIEQLFEDLSDTPNNHFTLEDIQALKRQYEL

SEQ ID NO: 986 - protein, 351 aa, Homo sapiens
MGDPERPEAAGLDQDERSSSDTNESEIKSNEEPLLRKSSRRFVIFPIQYPDIWKMYKQAQASFWTAEEVDLSKDLPHWNKLKADEKYFISHILAFFAASDGIVNENLVERFSQEVQVPEARCFYGFQILIENVHSEMYSLLIDTYIRDPKKREFLFNAIETMPYVKKKADWALRWIADRKSTFGERVVAFAAVEGVFFSGSFAAIFWLKKRGLMPGLTFSNELISRDEGLHCDFACLMFQYLVNKPSEERVREIIVDAVKIEQEFLTEALPVGLIGMNCILMKQYIEFVADRLLVELGFSKVFQAENPFDFMENISLEGKTNFFEKRVSEYQRFAVMAETTDNVFTLDADF

SEQ ID NO: 987 - protein, 727 aa, Homo sapiens
MDSDMDYERPNVETIKCVVVGDNAVGKTRLICARACNATLTQYQLLATHVPTVWAIDQYRVCQEVLERSRDVVDDVSVSLRLWDTFGDHHKDRRFAYGRSDVVVLCFSIANPNSLHHVKTMWYPEIKHFCPRAPVILVGCQLDLRYADLEAVNRARRPLARPIKPNEILPPEKGREVAKELGIPYYETSVVAQFGIKDVFDNAIRAALISRRHLQFWKSHLRNVQRPLLQAPFLPPKPPPPIIVVPDPPSSSEECPAHLLEDPLCADVILVLQERVRIFAHKIYLSTSSSKFYDLFLMDLSEGELGGPSEPGGTHPEDHQGHSDQHHHHHHHHHGRDFLLRAASFDVCESVDEAGGSGPAGLRASTSDGILRGNGTGYLPGRGRVLSSWSRAFVSIQEEMAEDPLTYKSRLMVVVKMDSSIQPGPFRAVLKYLYTGELDENERDLMHIAHIAELLEVFDLRMMVANILNNEAFMNQEITKAFHVRRTNRVKECLAKGTFSDVTFILDDGTISAHKPLLISSCDWMAAMFGGPFVESSTREVVFPYTSKSCMRAVLEYLYTGMFTSSPDLDDMKLIILANRLCLPHLVALTEQYTVTGLMEATQMMVDIDGDVLVFLELAQFHCAYQLADWCLHHICTNYNNVCRKFPRDMKAMSPENQEYFEKHRWPPVWYLKEEDHYQRARKEREKEDYLHLKRQPKRRWLFWNSPSSPSSSAASSSSPSSSSAVV

SEQ ID NO: 988 - protein, 648 aa, Homo sapiens [sequence omitted]

SEQ ID NO: 989 - protein, 1189 aa, Homo sapiens
MSVKSPFNVMSRNNLEAPPCKMTEPFNFEKNENKLPPHESLRSPGTLPNHPNFRLKSSENGNKKNNFLLCEQTKQYLASQEDNSVSSNPNGINGEVVGSKGDRKKLPAGNSVSPPSAESNSPPKEVNIKPGNNVRPAKSKKLNKLVENSLSISNPGLFTSLGPPLRSTTCHRCGLFGSLRCSQCKQTYYCSTACQRRDWSAHSIVCRPVQPNFHKLENKSSIETKDVEVNNKSDCPLGVTKEIAIWAERIMFSDLRSLQLKKTMEIKGTVTEFKHPGDFYVQLYSSEVLEYMNQLSASLKETYANVHEKDYIPVKGEVCIAKYTVDQTWNRAIIQNVDVQQKKAHVLYIDYGNEEIIPLNRIYHLNRNIDLFPPCAIKCFVANVIPAEGNWSSDCIKATKPLLMEQYCSIKIVDILEEEVVTFAVEVELPNSGKLLDHVLIEMGYGLKPSGQDSKKENADQSDPEDVGKMTTENNIVVDKSDLIPKVLTLNVGDEFCGVVAHIQTPEDFFCQQLQSGRKLAELQASLSKYCDQLPPRSDFYPAIGDICCAQFSEDDQWYRASVLAYASEESVLVGYVDYGNFEILSLMRLCPIIPKLLELPMQAIKCVLAGVKPSLGIWTPEAICLMKKLVQNKIITVKVVDKLENSSLVELIDKSETPHVSVSKVLLDAGFAVGEQSMVTDKPSDVKETSVPLGVEGKVNPLEWTWVELGVDQTVDVVVCVIYSPGEFYCHVLKEDALKKLNDLNKSLAEHCQQKLPNGFKAEIGQPCCAFFAGDGSWYRALVKEILPNGHVKVHFVDYGNIEEVTADELRMISSTFLNLPFQGIRCQLADIQSRNKHWSEEAITRFQMCVAGIKLQARVVEVTENGIGVELTDLSTCYPRIISDVLIDEHLVLKSASPHKDLPNDRLVNKHELQVHVQGLQATSSAEQWKTIELPVDKTIQANVLEIISPNLFYALPKGMPENQEKLCMLTAELLEYCNAPKSRPPYRPRIGDACCAKYTSDDFWYRAVVLGTSDTDVEVLYADYGNIETLPLCRVQPITSSHLALPFQIIRCSLEGLMELNGSSSQLIIMLLKNFMLNQNVMLSVKGITKNVHTVSVEKCSENGTVDVADKLVTFGLAKNITPQRQSALNTEKMYRMNCCCTELQKQVEKHEHILLFLLNNSTNQNKFIEMKKLLKKTASLGGKPL

SEQ ID NO: 990 - protein, 1165 aa, Homo sapiens
MYFLSGWPKRLLCPLGSPAEAPFHVQSDPQRAFFAVLAAARLSIWYSRPSVLIVTYKEPAKSSTQFGSYKQAEWRPDSTMIAVSTANGYILFFHITSTRGDKYLYEPVYPKGSPQMKGTPHFKEEQCAPALNLEMRKILDLQAPIMSLQSVLEDLLVATSDGLLHLIHWEGMTNGRKAINLCTVPFSVDLQSSRVGSFLGFTDVHIRDMEYCATLDGFAVVFNDGKVGFITPVSSRFTAEQLHGVWPQDVVDGTCVAVNNKYRLMAFGCVSGSVQVYTIDNSTGAMLLSHKLELTAKQYPDIWNKTGAVKLMRWSPDNSVVIVTWEYGGLSLWSVFGAQLICTLGGDFAYRSDGTKKDPLKINSMSWGAEGYHLWVISGFGSQNTEIESDLRSVVKQPSILLFQFIKSVLTVNPCMSNQEQVLLQGEDRLYLNCGEASQTQNPRSSSTHSEHKPSREKSPFADGGLESQGLSTLLGHRHWHVVQISSTYLESNWPIRFSAIDKLGQNIAVVGKFGFAHYSLLTKKWKLFGNITQEQNMIVTGGLAWWNDFMVLACYNINDRQEELRVYLRTSNLDNAFAHVTKAQAETLLLSVFQDMVIVFRADCSICLYSIERKSDGPNTTAGIQVLQEVSMSRYIPHPFLVVSVTLTSVSTENGITLKMPQQARGAESIMLNLAGQLIMMQRDRSGPQIREKDSNPNNQRKLLPFCPPVVLAQSVENVWTTCRANKQKRHLLEALWLSCGGAGMKVWLPLFPRDHRKPHSFLSQRIMLPFHINIYPLAVLFEDALVLGAVNDTLLYDSLYTRNNAREQLEVLFPFCVVERTSQIYLHHILRQLLVRNLGEQALLLAQSCATLPYFPHVLELMLHEVLEEEATSREPIPDPLLPTVAKFITEFPLFLQTVVHCARKTEYALWNYLFAAVGNPKDLFEECLMAQDLDTAASYLIILQNMEVPAVSRQHATLLFNTALEQGKWDLCRHMIRFLKAIGSGESETPPSTPTAQEPSSSGGFEFFRNRSISLSQSAENVPASKFSLQKTLSMPSGPSGKRWSKDSDCAENMYIDMMLWRHARRLLEDVRLKDLGCFAAQLGFELISWLCKERTRAARVDNFVIALKRLHKDFLWPLPIIPASSISSPFKNGKYRTGNVDFMSLVQGELYFTPCIYTFCY

SEQ ID NO: 991 - protein, 700 aa, Homo sapiens
MGQTVNEDSMDVKKENQEKTPQSSTSSVQRDDFHWEEYLKETGSISAPSECFRQSQIPPVNDFKVGMKLEARDPRNATSVCIATVIGITGARLRLRLDGSDNRNDFWRLVDSPDIQPVGTCEKEGDLLQPPLGYQMNTSSWPMFLLKTLNGSEMASATLFKKEPPKPPLNNFKVGMKLEAIDKKNPYLICPATIGDVKGDEVHITFDGWSGAFDYWCKYDSRDIFPAGWCRLTGDVLQPPGTSVPIVKNIAKTESSPSEASQHSMQSPQKTTLILPTQQVRRSSRIKPPGPTAVPKRSSSVKNITPRKKGPNSGKKEKPLPVICSTSAASLKSLTRDRGMLYKDVASGPCKIVMSTVCVYVNKHGNFGPHLDPKRIQQLPDHFGPGPVNVVLRRIVQACVDCALETKTVFGYLKPDNRGGEVITASFDGETHSIQLPPVNSASFALRFLENFCHSLQCDNLLSSQPFSSSRGHTHSSAEHDKNQSAKEDVTERQSTKRSPQQTVPYVVPLSPKLPKTKEYASEGEPLFAGGSAIPKEENLSEDSKSSSLNSGNYLNPACRNPMYIHTSVSQDFSRSVPGTTSSPLVGDISPKSSPHEVKFQMQRKSEAPSYIAVPDPSVLKQGFSKDPSTWSVDEVIQFMKHTDPQISGPLADLFRQHEIDGKALFLLKSDVMMKYMGLKLGPALKLCYYIEKLKEGKYS

SEQ ID NO: 992 - protein, 405 aa, Homo sapiens
MSSPALTAGASGKVMDFNNGTYLVSFTLFWEGQVSLSLLLIHPSEGASALWRARNQGYDKIIFKGKFVNGTSHVFTECGLTLNSNAELCEYLDDRDQEAFYCMKPQHMPCEALTYMTTRNREVSYLTDKENSLFHRSKVGVEMMKDRKHIDVTNCNKREKIEETCQVGMKPPVPGGYTLQGKWITTFCNQVQLDTIKINGCLKGKLIYLLGDSTLRQWIYYFPKVVKTLKFFDLHETGIFKKHLLLDAERHTQIQWKKHSYPFVTFQLYSLIDHDYIPREIDRLSGDKNTAIVITFGQHFRPFPIDIFIRRAIGVQKAIERLFLRSPATKVIIKTENIREMHIETERFGDFHGYIHYLIMKDIFKDLNVGIIDAWDMTIAYGTDTIHPPDHVIGNQINMFLNYIC

SEQ ID NO: 993 - protein, 954 aa, Homo sapiens
MNNHQLELAKQLHKEGHLFYCTCRVLTCPGQAKSIASAPGKCQDSAALTSTAFSGLDFGLLSGYLHKQALVTATHPTCTLLFPSCHAFFPLPLTPTLYKMHKGWKNYCSQKSLNEASMDEYLGSLGLFRKLTAKDASCLFRAISEQLFCSQVHHLEIRKACVSYMRENQQTFESYVEGSFEKYLERLGDPKESAGQLEIRALSLIYNRDFILYRFPGKPPTYVTDNGYEDKILLCYSSSGHYDSVYSKQFQSSAAVCQAVLYEILYKDVFVVDEEELKTAIKLFRSGSKKNRNNAVTGSEDAHTDYKSSNQNRMEEWGACYNAENIPEGYNKGTEETKSPENPSKMPFPYKVLKALDPEIYRNVEFDVWLDSRKELQKSDYMEYAGRQYYLGDKCQVCLESEGRYYNAHIQEVGNENNSVTVFIEELAEKHVVPLANLKPVTQVMSVPAWNAMPSRKGRGYQKMPGGYVPEIVISEMDIKQQKKMFKKIRGKEVYMTMAYGKGDPLLPPRLQHSMHYGHDPPMHYSQTAGNVMSNEHFHPQHPSPRQGRGYGMPRNSSRFINRHNMPGPKVDFYPGPGKRCCQSYDNFSYRSRSFRRSHRQMSCVNKESQYGFTPGNGQMPRGLEETITFYEVEEGDETAYPTLPNHGGPSTMVPATSGYCVGRRGHSSGKQTLNLEEGNGQSENGRYHEEYLYRAEPDYETSGVYSTTASTANLSLQDRKSCSMSPQDTVTSYNYPQKMMGNIAAVAASCANNVPAPVLSNGAAANQAISTTSVSSQNAIQPLFVSPPTHGRPDTKVLQYYFNLGLQCYYHSYWHSMVYVPQMQQQLHVENYPVYTEPPLVDQTVPQCYSEVRREDGIQAEASANDTFPNADSSSVPHGAVYYPVMSDPYGQPPLPGFDSCLPVVPDYSCVPPWHPVGTAYGGSSQIHGAINPGPIGCIAPSPPASHYVPQGM

SEQ ID NO: 994 - protein, 390 aa, Homo sapiens
MAVSESQLKKMVSKYKYRDLTVRETVNVITLYKDLKPVLDSYVFNDGSSRELMNLTGTIPVPYRGNTYNIPICLWLLDTYPYNPPICFVKPTSSMTIKTGKHVDANGKIYLPYLHEWKHPQSDLLGLIQVMIVVFGDEPPVFSRPISASYPPYQATGPPNTSYMPGMPGGISPYPSGYPPNPSGYPGCPYPPGGPYPATTSSQYPSQPPVTTVGPSRDGTISEDTIRASLISAVSDKLRWRMKEEMDRAQAELNALKRTEEDLKKGHQKLEEMVTRLDQEVAEVDKNIELLKKKDEELSSALEKMENQSENNDIDEVIIPTAPLYKQILNLYAEENAIEDTIFYLGEALRRGVIDLDVFLKHVRLLSRKQFQLRALMQKARKTAGLSDLY

SEQ ID NO: 995 - protein, 1032 aa, Homo sapiens
MPGRAEAGEAEEEAGAGSGSEAEEDALWERIEGVRHRLARALNPAKLTPYLRQCRVIDEQDEEEVLSTYRFPCRVNRTGRLMDILRCRGKRGYEAFLEALEFYYPEHFTLLTGQEPAQRCSMILDEEGPEGLTQFLMTEVRRLREARKSQLQREQQLQARGRVLEEERAGLEQRLRDQQQAQERCQRLREDWEAGSLELLRLKDENYMIAMRLAQLSEEKNSAVLRSRDLQLAVDQLKLKVSRLEEECALLRRARGPPPGAEEKEKEKEKEKEPDNVDLVSELRAENQRLTASLRELQEGLQQEASRPGAPGSERILLDILEHDWREAQDSRQELCQKLHAVQGELQWAEELRDQYLQEMEDLRLKHRTLQKDCDLYKHRMATVLAQLEEIEKERDQAIQSRDRIQLQYSQSLIEKDQYRKQVRGLEAERDELLTTLTSLEGTKALLEVQLQRAQGGTCLKACASSHSLCSNLSSTWSLSEFPSPLGGPEATGEAAVMGGPEPHNSEEATDSEKEINRLSILPFPPSAGSILRRQREEDPAPPKRSFSSMSDITGSVTLKPWSPGLSSSSSSDSVWPLGKPEGLLARGCGLDFLNRSLAIRVSGRSPPGGPEPQDKGPDGLSFYGDRWSGAVVRRVLSGPGSARMEPREQRVEAAGLEGACLEAEAQQRTLLWNQGSTLPSLMDSKACQSFHEALEAWAKGPGAEPFYIRANLTLPERADPHALCVKAQEILRLVDSAYKRRQEWFCTRVDPLTLRDLDRGTVPNYQRAQQLLEVQEKCLPSSRHRGPRSNLKKRALDQLRLVRPKPVGAPAGDSPDQLLLEPCAEPERSLRPYSLVRPLLVSALRPVVLLPECLAPRLIRNLLDLPSSRLDFQVCPAESLSGEELCPSSAPGAPKAQPATPGLGSRIRAIQESVGKKHCLLELGARGVRELVQNEIYPIVIHVEVTEKNVREVRGLLGRPGWRDSELLRQCRGSEQVLWGLPCSWVQVPAHEWGHAEELAKVVRGRILQEQARLVWVECGSSRGCPSSSEA

SEQ ID NO: 996 - protein, 409 aa, Homo sapiens
MGSQAAAEWRNWASWEVSSSLSGCSMGCFKDDRIVFWTWMFSTYFMEKWAPRQDDMLFYVRRKLAYSGSESGADGRKAAEPEVEVEVYRRDSKKLPGLGDPDIDWEESVCLNLILQKLDYMVTCAVCTRADGGDIHIHKKKSQQVFASPSKHPMDSKGEESKISYPNIFFMIDSFEEVFSDMTVGEGEMVCVELVASDKTNTFQGVIFQGSIRYEALKKVYDNRVSVAARMAQKMSFGFYKYSNMEFVRMKGPQGKGHAEMAVSRVSTGDTSPCGTEEDSSPASPMHERVTSFSTPPTPERNNRPAFFSPSLKRKVPRNRIAEMKKSHSANDSEEFFREDDGGADLHNATNLRSRSLSGTGRSLVGSWLKLNRADGNFLLYAHLTYVTLPLHRILTDILEVRQKPILMT

SEQ ID NO: 997 - protein, 703 aa, Homo sapiens
MAAPVGPVKFWRPGTEGPGVSISEERQSLAENSGTTVVYNPYAALSIEQQRQKLPVFKLRNHILYLIENYQTVVIVGETGCGKSTQIPQYLAEAGWTAEGRVVGVTQPRRVAAVTVAGRVAEERGAVLGHEVGYCIRFDDCTDQLATRIKFLTDGMLVREMMVDPLLTKYSVIMLDEAHERTLYTDIAIGLLKKIQKKRGDLRLIVASATLDADKFRDFFNQNETSDPARDTCVILTVEGRTFPVDIFYLQSPVPDYIKSTVETVVKIHQTEGDGDVLAFLTGQEEVETVVSMLIEQARALARTGMKRHLRVLPMYAGLPSFEQMKVFERVSRSVRKVIVATNVAETSITISGIVYVIDCGFVKLRAYNPRTAIECLVVVPVSQASANQRAGRGGRSRSGKCYRLYTEEAFDKLPQSTVPEMQRSNLAPVILQLKALGIDNVLRFHFMSPPPAQSMVQALELLYALGGLDKDCRLTEPLGMRIAEFPLNPMFAKMLLESGNFGCSQEILSIAAMMQIQNIFVVPPNQKSHAIRVHRKFAVEEGDHLTMLNIYEAFIKHNKDSKWCQEHFLNYKGLVRAATVREQLKKLLVKFQVPRKSSEGDPDLVLRCIVSGFFANAARFHSTGAYRTIRDDHELHIHPASVLYAEKPPRWVIYNEVIQTSKYYMRDVTAIESAWLLELAPHFYQQGTHLSLKAKRAKVQDP

SEQ ID NO: 998 - protein, 797 aa, Homo sapiens
MAAAPVAAGSGAGRGRRSAATVAAWGGWGGRPRPGNILLQLRQGQLTGRGLVRAVQFTETFLTERDKQSKWSGIPQLLLKLHTTSHLHSDFVECQNILKEISPLLSMEAMAFVTEERKLTQETTYPNTYIFDLFGGVDLLVEILMRPTISIRGQKLKISDEMSKDCLSILYNTCVCTEGVTKRLAEKNDFVIFLFTLMTSKKTFLQTATLIEDILGVKKEMIRLDEVPNLSSLVSNFDQQQLANFCRILAVTISEMDTGNDDKHTLLAKNAQQKKSLSLGPSAAEINQAALLSIPGFVERLCKLATRKVSESTGTASFLQELEEWYTWLDNALVLDALMRVANEESEHNQASIVFPPPGASEENGLPHTSARTQLPQSMKIMHEIMYKLEVLYVLCVLLMGRQRNQVHRMIAEFKLIPGLNNLFDKLIWRKHSASALVLHGHNQNCDCSPDITLKIQFLRLLQSFSDHHENKYLLLNNQELNELSAISLKANIPEVEAVLNTDRSLVCDGKRGLLTRLLQVMKKEPAESSFRFWQARAVESFLRGTTSYADQMFLLKRGLLEHILYCIVDSECKSRDVLQSYFDLLGELMKFNVDAFKRFNKYINTDAKFQVFLKQINSSLVDSNMLVRCVTLSLDRFENQVDMKVAEVLSECRLLAYISQVPTQMSFLFRLINIIHVQTLTQENVSCLNTSLVILMLARRKERLPLYLRLLQRMEHSKKYPGFLLNNFHNLLRFWQQHYLHKDKDSTCLENSSCISFSYWKETVSILLNPDRQSPSALVSYIEEPYMDIDRDFTEE

SEQ ID NO: 999 - protein, 1868 aa, Homo sapiens
MARLADYFVLVAFGPHPRGSGEGQGQILQRFPEKDWEDNPFPQGIELFCQPSGWQLCPERNPPTFFVAVLTDINSERHYCACLTFWEPAEPSQQETTRVEDATEREEEGDEGGQTHLSPTAPAPSAQLFAPKTLVLVSRLDHTEVFRNSLGLIYAIHVEGLNVCLENVIGNLLTCTVPLAGGSQRTISLGAGDRQVIQTPLADSLPVSRCSVALLFRQLGITNVLSLFCAALTEHKVLFLSRSYQRLADACRGLLALLFPLRYSFTYVPILPAQLLEVLSTPTPFIIGVNAAFQAETQELLDVIVADLDGGTVTIPECVHIPPLPEPLQSQTHSVLSMVLDPELELADLAFPPPTTSTSSLKMQDKELRAVFLRLFAQLLQGYRWCLHVVRIHPEPVIRFHKAAFLGQRGLVEDDFLMKVLEGMAFAGFVSERGVPYRPTDLFDELVAHEVARMRADENHPQRVLRHVQELAEQLYKNENPYPAVAMHKVQRPGESSHLRRVPRPFPRLDEGTVQWIVDQAAAKMQGAPPAVKAERRTTVPSGPPMTAILERCSGLHVNSARRLEVVRNCISYVFEGKMLEAKKLLPAVLRALKGRAARRCLAQELHLHVQQNRAVLDHQQFDFVVRMMNCCLQDCTSLDEHGIAAALLPLVTAFCRKLSPGVTQFAYSCVQEHVVWSTPQFWEAMFYGDVQTHIRALYLEPTEDLAPAQEVGEAPSQEDERSALDVASEQRRLWPTLSREKQQELVQKEESTVFSQAIHYANRMSYLLLPLDSSKSRLLRERAGLGDLESASNSLVTNSMAGSVAESYDTESGFEDAETCDVAGAVVRFINRFVDKVCTESGVTSDHLKGLHVMVPDIVQMHIETLEAVQRESRRLPPIQKPKLLRPRLLPGEECVLDGLRVYLLPDGREEGAGGSAGGPALLPAEGAVFLTTYRVIFTGMPTDPLVGEQVVVRSFPVAALTKEKRISVQTPVDQLLQDGLQLRSCTFQLLKMAFDEEVGSDSAELFRKQLHKLRYPPDIRATFAFTLGSAHTPGRPPRVTKDKGPSLRTLSRNLVKNAKKTIGRQHVTRKKYNPPSWEHRGQPPPEDQEDEISVSEELEPSTLTPSSALKPSDRMTMSSLVERACCRDYQRLGLGTLSSSLSRAKSEPFRISPVNRMYAICRSYPGLLIVPQSVQDNALQRVSRCYRQNRFPVVCWRSGRSKAVLLRSGGLHGKGVVGLFKAQNAPSPGQSQADSSSLEQEKYLQAVVSSMPRYADASGRNTLSGFSSAHMGSHGKWGSVRTSGRSSGLGTDVGSRLAGRDALAPPQANGGPPDPGFLRPQRAALYILGDKAQLKGVRSDPLQQWELVPIEVFEARQVKASFKKLLKACVPGCPAAEPSPASFLRSLEDSEWLIQIHKLLQVSVLVVELLDSGSSVLVGLEDGWDITTQVVSLVQLLSDPFYRTLEGFRLLVEKEWLSFGHRFSHRGAHTLAGQSSGFTPVFLQFLDCVHQVHLQFPMEFEFSQFYLKFLGYHHVSRRFRTFLLDSDYERIELGLLYEEKGERRGQVPCRSVWEYVDRLSKRTPVFHNYMYAPEDAEVLRPYSNVSNLKVWDFYTEETLAEGPPYDWELAQGPPEPPEEERSDGGAPQSRRRVVWPCYDSCPRAQPDAISRLLEELQRLETELGQPAERWKDTWDRVKAAQRLEGRPDGRGTPSSLLVSTAPHHRRSLGVYLQEGPVGSTLSLSLDSDQSSGSTTSGSRQAARRSTSTLYSQFQTAESENRSYEGTLYKKGAFMKPWKARWFVLDKTKHQLRYYDHRVDTECKGVIDLAEVEAVAPGTPTMGAPKTVDEKAFFDVKTTRRVYNFCAQDVPSAQQWVDRIQSCLSDA

SEQ ID NO: 1000 - protein, 482 aa, Homo sapiens
MAALMTPGTGAPPAPGDFSGEGSQGLPDPSPEPKQLPELIRMKRDGGRLSEADIRGFVAAVVNGSAQGAQIGAMLMAIRLRGMDLEETSVLTQALAQSGQQLEWPEAWRQQLVDKHSTGGVGDKVSLVLAPALAACGCKVPMISGRGLGHTGGTLDKLESIPGFNVIQSPEQMQVLLDQAGCCIVGQSEQLVPADGILYAARDVTATVDSLPLITASILSKKLVEGLSALVVDVKFGGAAVFPNQEQARELAKTLVGVGASLGLRVAAALTAMDKPLGRCVGHALEVEEALLCMDGAGPPDLRDLVTTLGGALLWLSGHAGTQAQGAARVAAALDDGSALGRFERMLAAQGVDPGLARALCSGSPAERRQLLPRAREQEELLAPADGTVELVRALPLALVLHELGAGRSRAGEPLRLGVGAELLVDVGQRLRRGTPWLRVHRDGPALSGPQSRALQEALVLSDRAPFAAPSPFAELVLPPQQ

SEQ ID NO: 1001 - protein, 1177 aa, Homo sapiens
MDVYPPRRQGLPRARSPGGSSRGSPSVSCSRLRQVQSILTQSSKSRPDGILCILGIDSRYNEGCRELANYLLFGLYNQNTSDFEKTGFSEEVLDDVIILIKSDSVHLYCNPVNFRYLLPYVAHWRNLHFHCMTENEYEDEEAAEEFKITSFVDMVRDCSRIGIPYSSQGHLQIFDMFVVEKWPIVQAFALEGIGGDGFFTMKYELQDVSLNLWNVYSKMDPMSLESLLSDDLVAFEHQWTSFFANFDTEIPFLLELSESQAGEPFRSYFSHGMISSHITENSPNRQPFVLFGNHSTRENLNAGNFNFPSEGHLVRSTGPGGSFAKHMVAQCVSPKGPLACSRTYFFGATHVPYLGGDSKLPKKTEQIRLLSQIYAAVIEAVLAGIACYAKTSSLTKAKEVAEQTLGSGLDSFELIPFKAALRSKMTFHIHAVNNQGRIVPLDSEDSLSFVKTACMAVYDIPDLLGGNGCLGSVVFSESFLTSQILVKEKDGTVTTETSSVVLTAAVPRFCSWLVEDNEVKLSEKTQQAVRGDESFLGTYLTGGEGAYLYSSNLQSWPEEGNVHFFSSGLLFSHCRHRSIIISKDHMNSISFYDGDSTSTVAALLIDFKSSLLPHLPVHFHGSSNFLMIALFPKSKIYQAFYSEVFSLWKQQDNSGISLKVIQEDGLSVEQKRLHSSAQKLFSALSQPAGEKRSSLKLLSAKLPELDWFLQHFAISSISQEPVMRTHLPVLLQQAEINTTHRIESDKVIISIVTGLPGCHASELCAFLVTLHKECGRWMVYRQIMDSSECFHAAHFQRYLSSALEAQQNRSARQSAYIRKKTRLLVVLQGYTDVIDVVQALQTHPDSNVKASFTIGAITACVEPMSCYMEHRFLFPKCLDQCSQGLVSNVVFTSHTTEQRHPLLVQLQSLIRAANPAAAFILAENGIVTRNEDIELILSENSFSSPEMLRSRYLMYPGWYEGKLNAGSVYPLMVQICVWFGRPLEKTRFVAKCKAIQSSIKPSPFSGNIYHILGKVKFSDSERTMEVCYNTLANSLSIMPVLEGPTPPPDSKSVSQDSSGQQECYLVFIGCSLKEDSIKDWLRQSAKQKPQRKALKTRGMLTQQEIRSIHVKRHLEPLPAGYFYNGTQFVNFFGDKTDFHPLMDQFMNDYVEEANREIEKYNQELEQQEYHDLFELKP

SEQ ID NO: 1002 - protein, 724 aa, Homo sapiens
MAGLTAAAPRPGVLLLLLSILHPSRPGGVPGAIPGGVPGGVFYPGAGLGALGGGALGPGGKPLKPVPGGLAGAGLGAGLGAFPAVTFPGALVPGGVADAAAAYKAAKAGAGLGGVPGVGGLGVSAGAVVPQPGAGVKPGKVPGVGLPGVYPGGVLPGARFPGVGVLPGVPTGAGVKPKAPGVGGAFAGIPGVGPFGGPQPGVPLGYPIKAPKLPGGYGLPYTTGKLPYGYGPGGVAGAAGKAGYPTGTGVGPQAAAAAAAKAAAKFGAGAAGVLPGVGGAGVPGVPGAIPGIGGIAGVGTPAAAAAAAAAAKAAKYGAAAGLVPGGPGFGPGVVGVPGAGVPGVGVPGAGIPVVPGAGIPGAAVPGVVSPEAAAKAAAKAAKYGARPGVGVGGIPTYGVGAGGFPGFGVGVGGIPGVAGVPGVGGVPGVGGVPGVGISPEAQAAAAAKAAKYGVGTPAAAAAKAAAKAAQFGLVPGVGVAPGVGVAPGVGVAPGVGLAPGVGVAPGVGVAPGVGVAPGIGPGGVAAAAKSAAKVAAKAQLRAAAGLGAGIPGLGVGVGVPGLGVGAGVPGLGVGAGVPGFGAVPGALAAAKAAKYGAAVPGVLGGLGALGGVGIPGGVVGAGPAAAAAAAKAAAKAAQFGLVGAAGLGGLGVGGLGVPGVGGLGGIPPAAAAKAAKYGAAGLGGVLGGAGQFPLGGVAARPGFGLSPIFPGGACLGKACGRKRK

SEQ ID NO: 1003 - protein, 327 aa, Homo sapiens
MGGSALNQGVLEGDDAPGQSLYERLSQRMLDISGDRGVLKDVIREGAGDLVAPDASVLVKYSGYLEHMDRPFDSNYFRKTPRLMKLGEDITLWGMELGLLSMRRGELARFLFKPNYAYGTLGCPPLIPPNTTVLFEIELLDFLDCAESDKFCALSAEQQDQFPLQKVLKVAATEREFGNYLFRQNRFYDAKVRYKRALLLLRRRSAPPEEQHLVEAAKLPVLLNLSFTYLKLDRPTIALCYGEQALIIDQKNAKALFRCGQACLLLTEYQKARDFLVRAQKEQPFNHDINNELKKLASCYRDYVDKEKEMWHRMFAPCGDGSTAGES

SEQ ID NO: 1004 - protein, 2517 aa, Homo sapiens
MVGERHAGDLMVPLGPRLQAYPEELIRQRPGHDGHPEYLIRWSVLKCGEVGKVGVEEGKAEHILMWLSAPEVYANCPGLLGERALSKGLQHEPAGVSGSFPRDPGGLDEVAMGEMEADVQALVRRAARQLAESGTPSLTAAVLHTIHVLSAYASIGPLTGVFRETGALDLLMHMLCNPEPQIRRSAGKMLQALAAHDAGSRAHVLLSLSQQDGIEQHMDFDSRYTLLELFAETTSSEEHCMAFEGIHLPQIPGKLLFSLVKRYLCVTSLLDQLNSSPELGAGDQSSPCATREKSRGQRELEFSMAVGNLISELVRSMGWARNLSEQGMSPPRPTRSIFQPYISGPSLLLPTIVTTPRRQGWVFRQRSEFSSRSGYGEYVQQTLQPGMRVRMLDDYEEISAGDEGEFRQSNNGIPPVQVFWQSTGRTYWVHWHMLEILGPEEATEDKASAAVEKGAGATVLGTAFPSWDWNPMDGLYPLPYLQPEPQKNERVGYLTQAEWWELLFFIKKLDLCEQQPIFQNLWKNLDETLGEKALGEISVSVEMAESLLQVLSSRFEGSTLNDLLNSQIYTKYGLLSNEPSSSSTSRNHSCTPDPEEESKSEASFSEEETESLKAKAEAPKTEAEPTKTRTETPMAQSDSQLFNQLLVTEGMTLPTEMKEAASEMARALRGPGPRSSLDQHVAAVVATVQISSLDTNLQLSGLSALSQAVEEVTERDHPLVRPDRSLREKLVKMLVELLTNQVGEKMVVVQALRLLYLLMTKHEWRPLFAREGGIYAVLVCMQEYKTSVLVQQAGLAALKMLAVASSSEIPTFVTGRDSIHSLFDAQMTREIFASIDSATRPGSESLLLTVPAAVILMLNTEGCSSAARNGLLLLNLLLCNHHTLGDQIITQELRDTLFRHSGIAPRTEPMPTTRTILMMLLNRYSEPPGSPERAALETPIIQGQDGSPELLIRSLVGGPSAELLLDLERVLCREGSPGGAVRPLLKRLQQETQPFLLLLRTLDAPGPNKTLLLSVLRVITRLLDFPEAMVLPWHEVLEPCLNCLSGPSSDSEIVQELTCFLHRLASMHKDYAVVLCCLGAKEILSKVLDKHSAQLLLGCELRDLVTECEKYAQLYSNLTSSILAGCIQMVLGQIEDHRRTHQPINIPFFDVFLRHLCQGSSVEVKEDKCWEKVEVSSNPHRASKLTDHNPKTYWESNGSTGSHYITLHMHRGVLVRQLTLLVASEDSSYMPARVVVFGGDSTSCIGTELNTVNVMPSASRVILLENLNRFWPIIQIRIKRCQQGGIDTRVRGVEVLGPKPTFWPLFREQLCRRTCLFYTIRAQAWSRDIAEDHRRLLQLCPRLNRVLRHEQNFADRFLPDDEAAQALGKTCWEALVSPLVQNITSPDAEGVSALGWLLDQYLEQRETSRNPLSRAASFASRVRRLCHLLVHVEPPPGPSPEPSTRPFSKNSKGRDRSPAPSPVLPSSSLRNITQCWLSVVQEQVSRFLAAAWRAPDFVPRYCKLYEHLQRAGSELFGPRAAFMLALRSGFSGALLQQSFLTAAHMSEQFARYIDQQIQGGLIGGAPGVEMLGQLQRHLEPIMVLSGLELATTFEHFYQHYMADRLLSFGSSWLEGAVLEQIGLCFPNRLPQLMLQSLSTSEELQRQFHLFQLQRLDKLFLEQEDEEEKRLEEEEEEEEEEEAEKELFIEDPSPAISILVLSPRCWPVSPLCYLYHPRKCLPTEFCDALDRFSSFYSQSQNHPVLDMGPHRRLQWTWLGRAELQFGKQILHVSTVQMWLLLKFNQTEEVSVETLLKDSDLSPELLLQALVPLTSGNGPLTLHEGQDFPHGGVLRLHEPGPQRSGEALWLIPPQAYLNVEKDEGRTLEQKRNLLSCLLVRILKAHGEKGLHIDQLVCLVLEAWQKGPNPPGTLGHTVAGGVACTSTDVLSCILHLLGQGYVKRRDDRPQILMYAAPEPMGPCRGQADVPFCGSQSETSKPSPEAVATLASLQLPAGRTMSPQEVEGLMKQTVRQVQETLNLEPDVAQHLLAHSHWGAEQLLQSYSEDPEPLLLAAGLCVHQAQAVPVRPDHCPVCVSPLGCDDDLPSLCCMHYCCKSCWNEYLTTRIEQNLVLNCTCPIADCPAQPTGAFIRAIVSSPEVISKYEKALLRGYVESCSNLTWCTNPQGCDRILCRQGLGCGTTCSKCGWASCFNCSFPEAHYPASCGHMSQWVDDGGYYDGMSVEAQSKHLAKLISKRCPSCQAPIEKNEGCLHMTCAKCNHGFCWRCLKSWKPNHKDYYNCSAMVSKAARQEKRFQDYNERCTFHHQAREFAVNLRNRVSAIHEVPPPRSFTFLNDACQGLEQARKVLAYACVYSFYSQDAEYMDVVEQQTENLELHTNALQILLEETLLRCRDLASSLRLLRADCLSTGMELLRRIQERLLAILQHSAQDFRVGLQSPSVEAWEAKGPNMPGSQPQASSGPEAEEEEEDDEDDVPEWQQDEFDEELDNDSFSYDESENLDQETFFFGDEEEDEDEAYD

SEQ ID NO: 1005 - protein, 932 aa, Homo sapiens
MIPARLHRDYKGLVLLGILLGTLWETGCTQIRYSVPEELEKGSRVGDISRDLGLEPRELAERGVRIIPRGRTQLFALNPRSGSLVTAGRIDREELCMGAIKCQLNLDILMEDKVKIYGVEVEVRDINDNAPYFRESELEIKISENAATEMRFPLPHAWDPDIGKNSLQSYELSPNTHFSLIVQNGADGSKYPELVLKRALDREEKAAHHLVLTASDGGDPVRTGTARIRVMVLDANDNAPAFAQPEYRASVPENLALGTQLLVVNATDPDEGVNAEVRYSFRYVDDKAAQVFKLDCNSGTISTIGELDHEESGFYQMEVQAMDNAGYSARAKVLITVLDVNDNAPEVVLTSLASSVPENSPRGTLIALLNVNDQDSEENGQVICFIQGNLPFKLEKSYGNYYSLVTDIVLDREQVPSYNITVTATDRGTPPLSTETHISLNVADTNDNPPVFPQASYSAYIPENNPRGVSLVSVTAHDPDCEENAQITYSLAENTIQGASLSSYVSINSDTGVLYALSSFDYEQFRDLQVKVMARDNGHPPLSSNVSLSLFVLDQNDNAPEILYPALPTDGSTGVELAPRSAEPGYLVTKVVAVDRDSGQNAWLSYRLLKASEPGLFSVGLHTGEVRTARALLDRDALKQSLVVAVQDHGQPPLSATVTLTVAVADSIPQVLADLGSLESPANSETSDLTLYLVVAVAAVSCVFLAFVILLLALRLRRWHKSRLLQASGGGLTGAPASHFVGVDGVQAFLQTYSHEVSLTTDSRKSHLIFPQPNYADMLVSQESFEKSEPLLLSGDSVFSKDSHGLIEQAPPNTDWRFSQAQRPGTSGSQNGDDTGTWPNNQFDTEMLQAMILASASEAADGSSTLGGGAGTMGLSARYGPQFTLQHVPDYRQNVYIPGSNATLTNAAGKRDGKAPAGGNGNKKKSGKKEKK

SEQ ID NO: 1006 - protein, 944 aa, Homo sapiens
MGPKTLPQLAGKWQVLCMLSLCCWGWVSGQLRYSVVEESEPGTLVGNVAQDLGLKMTDLLSRRLQLGSEENGRYFSLSLMSGALAVNQKIDRESLCGASTSCLLPVQVVTEHPLELIRVEVEILDLNDNSPSFATPEREMRISESAASGARFPLDSAQDPDVGTNTVSFYTLSPNSHFSLNVKTLKDGKPFPELVLEQQLDREAQARHQLVLTAVDGGTPARSGTTLISVIVLDINDNAPTFQSSVLRVGIPENAPIGTLLLRLNATDPDEGTNGQLDYSFGDHTSEAVRNLFGLDPSSGAIHVLGPIDFEESRFYEIHARARDQGQPAMEGHCVIQVDVGDVNDNAPEVLLASLANPVLESTPVGTVVGLFNVRDRDSGRNGEVSLDISPDLPFQIKPSENHYSLLTSQPLDREATSHYIIELLASDAGSPSLHKHLTIRLNISDVNDNAPRFNQQLYTAYILENRPPGSLLCTVAASDPDTGDNARLTYSIVGNQVQGAPASSFVYVNPEDGRIFAQRTFDYELLQMLQIVVGVRDSGSPPLHANTSLHVFVLDENDNAPAVLHPRPDWEHSAPQRLPRSAPPGSLVTKVTAVDADAGHNAWLSYSLLPQSTAPGLFLVSTHTGEVRTARALLEDDSDTQQVVVLVRDNGDPSLSSTATVLLVLEDEDPEEMPKSSDFLIHPPERSDLTLYLIVALATVSLLSLVTFTFLSAKCLQGNADGDGGGGQCCRRQDSPSPDFYKQSSPNLQVSSDGTLKYMEVTLRPTDSQSHCYRTCFSPASDGSDFTFLRPLSVQQPTALALEPDAIRSRSNTLRERSQQAPPNTDWRFSQAQRPGTSGSQNGDDTGTWPNNQFDTEMLQAMILASASEAADGSSTLGGGAGTMGLSARYGPQFTLQHVPDYRQNVYIPGSNATLTNAAGKRDGKAPAGGNGNKKKSGKKEKK

SEQ ID NO: 1007 - protein, 1066 aa, Homo sapiens
MTDQENNNNISSNPFAALFGSLADAKQFAAIQKEQLKQQSDELPASPDDSDNSVSESLDEFDYSVAEISRSFRSQQEICEQLNINHMIQRIFLITLDNSDPSLKSGNGIPSRCVYLEEMAVELEDQDWLDMSNVEQALFARLLLQDPGNHLINMTSSTTLNLSADRDAGERHIFCYLYSCFQRAKEEITKVPENLLPFAVQCRNLTVSNTRTVLLTPEIYVDQNIHEQLVDLMLEAIQGAHFEDVTEFLEEVIEALILDEEVRTFPEVMIPVFDILLGRIKDLELCQILLYAYLDILLYFTRQKDMAKVFVEYIQPKDPTNGQMYQKTLLGVILSISCLLKTPGVVENHGYFLNPSRSSPQEIKVQEANIHQFMAQFHEKIYQMLKNLLQLSPETKHCILSWLGNCLHANAGRTKIWANQMPEIFFQMYASDAFFLNLGAALLKLCQPFCKPRSSRLLTFNPTYCALKELNDEERKIKNVHMRGLDKETCLIPAVQEPKFPQNYNLVTENLALTEYTLYLGFHRLHDQMVKINQNLHRLQVAWRDAQQSSSPAADNLREQFERLMTIYLSTKTAMTEPQMLQNCLNLQVSMAVLLVQLAIGNEGSQPIELTFPLPDGYSSLAYVPEFFADNLGDFLIFLRRFADDILETSADSLEHVLHFITIFTGSIERMKNPHLRAKLAEVLEAVMPHLDQTPNPLVSSVFHRKRVFCNFQYAPQLAEALIKVFVDIEFTGDPHQFEQKFNYRRPMYPILRYMWGTDTYRESIKDLADYASKNLEAMNPPLFLRFLNLLMNDAIFLLDEAIQYLSKIKIQQIEKDRGEWDSLTPEARREKEAGLQMFGQLARFHNIMSNETIGTLAFLTSEIKSLFVHPFLAERIISMLNYFLQHLVGPKMGALKVKDFSEFDFKPQQLVSDICTIYLNLGDEENFCATVPKDGRSYSPTLFAQTVRVLKKINKPGNMIMAFSNLAERIKSLADLQQQEEETYADACDEFLDPIMSTLMCDPVVLPSSRVTVDRSTIARHLLSDQTDPFNRSPLTMDQIRPNTELKEKIQRWLAERKQQKEQLE

SEQ ID NO: 1008 - protein, 1938 aa, Homo sapiens
MSSDAEMAIFGEAAPYLRKPEKERIEAQNRPFDSKKACFVADNKEMYVKGMIQTRENDKVIVKTLDDRMLTLNNDQVFPMNPPKFDKIEDMAMMTHLHEPAVLYNLKERYAAWMIYTYSGLFCVTVNPYKWLPVYKPEVVAAYRGKKRQEAPPHIFSISDNAYQFMLTDRDNQSILITGESGAGKTVNTKRVIQYFATIAVTGDKKKETQPGKMQGTLEDQIIQANPLLEAFGNAKTVRNDNSSRFGKFIRIHFGATGKLASADIETYLLEKSRVTFQLSSERSYHIFYQIMSNKKPELIDLLLISTNPFDFPFVSQGEVTVASIDDSEELLATDNAIDILGFSSEEKVGIYKLTGAVMHYGNMKFKQKQREEQAEPDGTEVADKAGYLMGLNSAEMLKGLCCPRVKVGNEYVTKGQNVQQVTNSVGALAKAVYEKMFLWMVTRINQQLDTKQPRQYFIGVLDIAGFEIFDFNSLEQLCINFTNEKLQQFFNHHMFVLEQEEYKKEGIEWEFIDFGMDLAACIELIEKPMGIFSILEEECMFPKATDTSFKNKLYDQHLGKSNNFQKPKPAKGKAEAHFSLVHYAGTVDYNIAGWLDKNKDPLNETVVGLYQKSSLKLLSFLFSNYAGAETGDSGGSKKGGKKKGSSFQTVSAVFRENLNKLMTNLRSTHPHFVRCLIPNETKTPGVMDHYLVMHQLRCNGVLEGIRICRKGFPSRILYADFKQRYRILNASAIPEGQFIDSKNASEKLLNSIDVDREQFRFGNTKVFFKAGLLGLLEEMRDEKLVTLMTSTQAVCRGYLMRVEFKKMMERRDSIFCIQYNIRSFMNVKHWPWMNLFFKIKPLLKSAEAEKEMATMKEDFERTKEELARSEARRKELEEKMVSLLQEKNDLQLQVQSETENLMDAEERCEGLIKSKILLEAKVKELTERLEEEEEMNSELVAKKRNLEDKCSSLKRDIDDLELTLTKVEKEKHATENKVKNLSEEMTALEENISKLTKEKKSLQEAHQQTLDDLQVEEDKVNGLIKINAKLEQQTDDLEGSLEQEKKLRADLERAKRKLEGDLKMSQESIMDLENDKQQIEEKLKKKEFELSQLQAKIDDEQVHSLQFQKKIKELQARIEELEEEIEAEHTLRAKIEKQRSDLARELEEISERLEEASGATSAQIEMNKKREAEFQKMRRDLEEATLQHEATAATLRKKQADSVAELGEQIDNLQRVKQKLEKEKSELKMEIDDMASNIEALSKSKSNIERTCRTVEDQFSEIKAKDEQQTQLIHDLNMQKARLQTQNGELSHRVEEKESLISQLTKSKQALTQQLEELKRQMEEETKAKNAMAHALQSSRHDCDLLREQYEEEQEAKAELQRALSKANSEVAQWRTKYETDAIQRTEELEEAKKKLAQRLQEAEENTETANSKCASLEKTKQRLQGEVEDLMRDLERSHTACATLDKKQRNFDKVLAEWKQKLDESQAELEAAQKESRSLSTELFKMRNAYEEVVDQLETLRRENKNLQEEISDLTEQIAETGKNLQEAEKTKKLVEQEKSDLQVALEEVEGSLEHEESKILRVQLELSQVKSELDRKVIEKDEEIEQLKRNSQRAAEALQSVLDAEIRSRNDALRLKKKMEGDLNEMEIQLGHSNRQMAETQKHLRTVQGQLKDSQLHLDDALRSNEDLKEQLAIVERRNGLLLEELEEMKVALEQTERTRRLSEQELLDASDRVQLLHSQNTSLINTKKKLEADIAQCQAEVENSIQESRNAEEKAKKAITDAAMMAEELKKEQDTSAHLERMKKNLEQTVKDLQHRLDEAEQLALKGGKKQIQKLENRVRELENELDVEQKRGAEALKGAHKYERKVKEMTYQAEEDHKNILRLQDLVDKLQAKVKSYKRQAEEAEEQANTQLSRCRRVQHELEEAAERADIAESQVNKLRAKSRDVGSQKMEE

SEQ ID NO: 1009 - protein, 394 aa, Homo sapiens
MNTNSKEVLSLGVQVPEAWEELLTMKVEAKSHLQWQESRLKRSNPLAREIFRRHFRQLCYQETPGPREALTRLQELCYQWLRPHVSTKEQILDLLVLEQFLSILPKELQGWVREHCPESGEEAVILLEDLERELDEPQHEMVAHRHRQEVLCKEMVPLAEQTPLTLQSQPKEPQLTCDSAQKCHSIGETDEVTKTEDRELVLRKDCPKIVEPHGKMFNEQTWEVSQQDPSHGEVGEHKDRIERQWGNLLGEGQHKCDECGKSFTQSSGLIRHQRIHTGERPYECNECGKAFSRSSGLFNHRGIHNIQKRYHCKECGKVFSQSAGLIQHQRIHKGEKPYQCSQCSKSYSRRSFLIEHQRSHTGERPHQCIECGKSFNRHCNLIRHQKIHTVAELV

SEQ ID NO: 1010 - protein, 383 aa, Homo sapiens
MGLGRVLLFLAVAFPFAPPAAAAEPHSLRYNLMVLSQDGSVQSGFLAEGHLDGQPFLRYDRQKRRAKPQGQWAENVLGAKTWDTETEDLTENGQDLRRTLTHIKDQKGGLHSLQEIRVCEIHEDSSTRGSRHFYYDGELFLSQNLETQESTVPQSSRAQTLAMNVTNFWKEDAMKTKTHYRAMQADCLQKLQRYLKSGVAIRRTVPPMVNVTCSEVSEGNITVTCRASSFYPRNITLTWRQDGVSLSHNTQQWGDVLPDGNGTYQTWVATRIRQGEEQRFTCYMEHSGNHGTHPVPSGKALVLQSQRTDFPYVSAAMPCFVIIIILCVPCCKKKTSAAEGPELVSLQVLDQHPVGTGDHRDAAQLGFQPLMSATGSTGSTEGT

SEQ ID NO: 1011 - protein, 590 aa, Homo sapiens
MSRQSSVSFRSGGSRSFSTASAITPSVSRTSFTSVSRSGGGGGGGFGRVSLAGACGVGGYGSRSLYNLGGSKRISISTSGGSFRNRFGAGAGGGYGFGGGAGSGFGFGGGAGGGFGLGGGAGFGGGFGGPGFPVCPPGGIQEVTVNQSLLTPLNLQIDPSIQRVRTEEREQIKTLNNKFASFIDKVRFLEQQNKVLDTKWTLLQEQGTKTVRQNLEPLFEQYINNLRRQLDSIVGERGRLDSELRNMQDLVEDFKNKYEDEINKRTTAENEFVMLKKDVDAAYMNKVELEAKVDALMDEINFMKMFFDAELSQMQTHVSDTSVVLSMDNNRNLDLDSIIAEVKAQYEEIANRSRTEAESWYQTKYEELQQTAGRHGDDLRNTKHEISEMNRMIQRLRAEIDNVKKQCANLQNAIADAEQRGELALKDARNKLAELEEALQKAKQDMARLLREYQELMNTKLALDVEIATYRKLLEGEECRLSGEGVGPVNISVVTSSVSSGYGSGSGYGGGLGGGLGGGLGGGLAGGSSGSYYSSSSGGVGLGGGLSVGGSGFSASSGRGLGVGFGSGGGSSSSVKFVSTTSSSRKSFKS

SEQ ID NO: 1012 - protein, 644 aa, Homo sapiens
MSRQFSSRSGYRSGGGFSSGSAGIINYQRRTTSSSTRRSGGGGGRFSSCGGGGGSFGAGGGFGSRSLVNLGGSKSISISVARGGGRGSGFGGGYGGGGFGGGGFGGGGFGGGGIGGGGFGGFGSGGGGFGGGGFGGGGYGGGYGPVCPPGGIQEVTINQSLLQPLNVEIDPEIQKVKSREREQIKSLNNQFASFIDKVRFLEQQNQVLQTKWELLQQVDTSTRTHNLEPYFESFINNLRRRVDQLKSDQSRLDSELKNMQDMVEDYRNKYEDEINKRTNAENEFVTIKKDVDGAYMTKVDLQAKLDNLQQEIDFLTALYQAELSQMQTQISETNVILSMDNNRSLDLDSIIAEVKAQYEDIAQKSKAEAESLYQSKYEELQITAGRHGDSVRNSKIEISELNRVIQRLRSEIDNVKKQISNLQQSISDAEQRGENALKDAKNKLNDLEDALQQAKEDLARLLRDYQELMNTKLALDLEIATYRTLLEGEESRMSGECAPNVSVSVSTSHTTISGGGSRGGGGGGYGSGGSSYGSGGGSYGSGGGGGGGRGSYGSGGSSYGSGGGSYGSGGGGGGHGSYGSGSSSGGYRGGSGGGGGGSSGGRGSGGGSSGGSIGGRGSSSGGVKSSGGSSSVKFVSTTYSGVTR

SEQ ID NO: 1013 - protein, 551 aa, Homo sapiens
MSRQSSITFQSGSRRGFSTTSAITPAAGRSRFSSVSVARSAAGSGGLGRISSAGASFGSRSLYNLGGAKRVSINGCGSSCRSGFGGRASNRFGVNSGFGYGGGVGGGFSGPSFPVCPPGGIQEVTVNQSLLTPLHLQIDPTIQRVRAEEREQIKTLNNKFASFIDKVRFLEQQNKVLETKWALLQEQGSRTVRQNLEPLFDSYTSELRRQLESITTERGRLEAELRNMQDVVEDFKVRYEDEINKRTAAENEFVALKKDVDAAYMNKVELEAKVKSLPEEINFIHSVFDAELSQLQTQVGDTSVVLSMDNNRNLDLDSIIAEVKAQYEDIANRSRAEAESWYQTKYEELQVTAGRHGDDLRNTKQEISEMNRMIQRLRAEIDSVKKQCSSLQTAIADAEQRGELALKDARAKLVDLEEALQKAKQDMARLLREYQELMNIKLALDVEIATYRKLLEGEECRLSGEGVSPVNISVVTSTLSSGYGSGSSIGGGNLGLGGGSGYSFTTSGGHSLGAGLGGSGFSATSNRGLGGSGSSVKFVSTTSSSQKSYTH

SEQ ID NO: 1014 - protein, 236 aa, Homo sapiens
MSAPSATPIFAPGENCSPAWGAAPAAYDAADTHLRILGKPVMERWETPYMHALAAAASSKGGRVLEVGFGMAIAASKVQEAPIDEHWIIECNDGVFQRLRDWAPRQTHKVIPLKGLWEDVAPTLPDGHFDGILYDTYPLSEETWHTHQFNFIKNHAFRLLKPGGVLTYCNLTSWGELMKSKYSDITIMFEETQVPALLEAGFRRENIRTEVMALVPPADCRYYAFPQMITPLVTKG

SEQ ID NO: 1015 - protein, 637 aa, Homo sapiens
MMFWRKLPKALFIGLTLAIAVNLLLVFSSKGTLQNLFTGGLHRELPLHLNKRYGAVIKRLSHLEVELQDLKESMKLALRQQENVNSTLKRAKDEVRPLLKAMETKVNETKKHKTQMKLFPHSQLFRQWGEDLSEAQQKAAQDLFRKFGYNAYLSNQLPLNRTIPDTRDYRCLRKTYPSQLPSLSVILIFVNEALSIIQRAITSIINRTPSRLLKEIILVDDFSSNGELKVHLDEKIKLYNQKYPGLLKIIRHPERKGLAQARNTGWEAATADVVAILDAHIEVNVGWAEPILARIQEDRTVIVSPVFDNIRFDTFKLDKYELAVDGFNWELWCRYDALPQAWIDLHDVTAPVKSPSIMGILAANRHFLGEIGSLDGGMLIYGGENVELSLRVWQCGGKVEILPCSRIAHLERHHKPYALDLTAALKRNALRVAEIWMDEHKHMVYLAWNIPLQNSGIDFGDVSSRMALREKLKCKTFDWYLKNVYPLLKPLHTIVGYGRMKNLLDENVCLDQGPVPGNTPIMYYCHEFSSQNVYYHLTGELYVGQLIAEASASDRCLTDPGKAEKPTLEPCSKAAKNRLHIYWDFKPGGAVINRDTKRCLEMKKDLLGSHVLVLQTCSTQVWEIQHTVRDWGQTNSQ

SEQ ID NO: 1016 - protein, 613 aa, Homo sapiens
MEIALVPLENGGAMTVRGGDEARAGCGQATGGELQCPPTAGLSDGPKEPAPKGRGAQRDADSGVRPLPPLPDPGVRPLPPLPEELPRPRRPPPEDEEEEGDPGLGTVEDQALGTASLHHQRVHINISGLRFETQLGTLAQFPNTLLGDPAKRLRYFDPLRNEYFFDRNRPSFDGILYYYQSGGRLRRPVNVSLDVFADEIRFYQLGDEAMERFREDEGFIKEEEKPLPRNEFQRQVWLIFEYPESSGSARAIAIVSVLVILISIITFCLETLPEFRDERELLRHPPAPHQPPAPAPGANGSGVMAPPSGPTVAPLLPRTLADPFFIVETTCVIWFTFELLVRFFACPSKAGFSRNIMNIIDVVAIFPYFITLGTELAEQQPGGGGGGQNGQQAMSLAILRVIRLVRVFRIFKLSRHSKGLQILGKTLQASMRELGLLIFFLFIGVILFSSAVYFAEADNQGTHFSSIPDAFWWAVVTMTTVGYGDMRPITVGGKIVGSLCAIAGVLTIALPVPVIVSNFNYFYHRETDHEEPAVLKEEQGTQSQGPGLDRGVQRKVSGSRGSFCKAGGTLENADSARRGSCPLEKCNVKAKSNVDLRRSLYALCLDTSRETDL

SEQ ID NO: 1017 - protein, 1023 aa, Homo sapiens
MTLNNCASMKLEVHFQSKQNEDSEEEEQCTISSHWAFQQESKCWSPMGSSDLLAPPSPGLPATSSCESVLTELSATSLPVITVSLPPEPADLPLPGRAPSSSDRPLLSPTQGQEGPQDKAKKRHRNRSFLKHLESLRRKEKSGSQQAEPKHSPATSEKVSKASSFRSCRGFLSAGFYRAKNWAATSAGGSGANTRKAWEAWPVASFRHPQWTHRGDCLVHVPGDHKPGTFPRSLSIESLCPEDGHRLADWQPGRRWGCEGRRGSCGSTGSHASTYDNLPELYPAEPVMVGAEAEDEDDEESGGSYAHLDDILQHVWGLQQRVELWSRAMYPDLGPGDEEEEEATSSVEIATVEVKCQAEALSQMEVPAHGESPAWAQAEVQPAVLAPAQAPAEAEPVAQEEAEAPAPAPAPAPAQDSEQEAHSGGEPTFASSLSVEEGHSISDTVASSSELDSSGNSMNEAEAAGPLAGLQASMPRERRDSGVGASLTRPCRKLRWHSFQNSHRPSLNSESLEINRQFAGQINLLHKGSLLRLTAFMEKYTVPHKQGWVWSMPKFMRRNKTPDYRGQHVFGVPPLIHVQRTGQPLPQSIQQAMRYLRSQCLDQVGIFRKSGVKSRIQNLRQMNETSPDNVCYEGQSAYDVADLLKQYFRDLPEPIFTSKLTTTFLQIYQLLPKDQWLAAAQAATLLLPDENREVLQTLLYFLSDIASAEENQMTAGNLAVCLAPSIFHLNVSKKDSPSPRIKSKRSLIGRPGPRDLSDNMAATQGLSHMISDCKKLFQVPQDMVLQLCSSYSAAELSPPGPALAELRQAQAAGVSLSLYMEENIQDLLRDAAERFKGWMSVPGPQHTELACRKAPDGHPLRLWKASTEVAAPPAVVLHRVLRERALWDEDLLRAQVLEALMPGVELYHYVTDSMAPHPCRDFVVLRMWRSDLPRGGCLLVSQSLDPEQPVPESGVRALMLTSQYLMEPCGLGRSRLTHICRADLRGRSPDWYNKVFGHLCAMEVAKIRDSFPTLQAAGPETKL

SEQ ID NO: 1018 - protein, 944 aa, Homo sapiens
GRPGVPPRFLSQRRRQVPGPRSRLRDIHESPSVILGPPGEVPGFRCALWRHLRPHLVLGGALAPPAPIKFTEGPPATLKASVPYEVETLPQNLPAPPWSAAEIFSHVGDRCERNEFQCQDGKCISYKWVCDGSAECQDGSDESQETCLSVTCKSGDFSCGGRVNRCIPQFWRCDGQVDCDNGSDEQGCPPKTCSQDEFRCHDGKCISRQFVCDSDRDCLDGSDEASCPVLTCGPASFQCNSSTCIPQLWACDNDPDCEDGSDEWPQRCRGLYVFQGDSSPCSAFEFHCLSGECIHSSWRCDGGPDCKDKSDEENCAVATCRPDEFQCSDGNCIHGSRQCDREYDCKDMSDEVGCVNVTLCEGPNKFKCHSGECITLDKVCNMARDCRDWSDEPIKECGTNECLDNNGGCSHVCNDLKIGYECLCPDGFQLVAQRRCEDIDECQDPDTCSQLCVNLEGGYKCQCEEGFQLDPHTKACKAVGSIAYLFFTNRHEVRKMTLDRSEYTSLIPNLRNVVALDTEVASNRIYWSDLSQRMICSTQLDRAHGVSSYDTVISRDIQAPDGLAVDWIHSNIYWTDSVLGTVSVADTKGVKRKTLFRENGSKPRAIVVDPVHGFMYWTDWGTPAKIKKGGLNGVDIYSLVTENIQWPNGITLDLLSGRLYWVDSKLHSISSIDVNGGNRKTILEDEKRLAHPFSLAVFEDKVFWTDIINEAIFSANRLTGSDVNLLAENLLSPEDMVLFHNLTQPRGVNWCERTTLSNGGCQYLCLPAPQINPHSPKFTCACPDGMLLARDMRSCLTEAEAAVATQETSTVRLKVSSTAVRTQHTTTRPVPDTSRLPGATPGLTTVEIVTMSHQALGDVAGRGNEKKPSSVRALSIVLPIVLLVFLCLGVFLLWKNWRLKNINSINFDNPVYQKTTEDEVHICHNQDGYSYPSRQMVSLEDDVA

SEQ ID NO: 1019 - protein, 198 aa, Homo sapiens
MPVPALCLLWALAMVTRPASAAPMGGPELAQHEELTLLFHGTLQLGQALNGVYRTTEGRLTKARNSLGLYGRTIELLGQEVSRGRDAAQELRASLLETQMEEDILQLQAEATAEVLGEVAQAQKVLRDSVQRLEVQLRSAWLGPAYREFEVLKAHADKQSHILWALTGHVQRQRREMVAQQHRLRQIQERLHTAALPA

SEQ ID NO: 1020 - protein, 619 aa, Homo sapiens
MNLERLRKRVRQYLDQQQYQSALFWADKVASLSREPQDIYWLAQCLYLTAQYHRAAHALRSRKLDKLYEACRYLAARCHYAAKEHQQALDVLDMEEPINKRLFEKYLKDESGFKDPSSDWEMSQSSIKSSICLLRGKIYDALDNRTLATYSYKEALKLDVYCFEAFDLLTSHHMLTAQEEKELLESLPLSKLCNEEQELLRFLFENKLKKYNKPSETVIPESVDGLQENLDVVVSLAERHYYNCDFKMCYKLTSVVMEKDPFHASCLPVHIGTLVELNKANELFYLSHKLVDLYPSNPVSWFAVGCYYLMVGHKNEHARRYLSKATTLEKTYGPAWIAYGHSFAVESEHDQAMAAYFTAAQLMKGCHLPMLYIGLEYGLTNNSKLAERFFSQALSIAPEDPFVMHEVGVVAFQNGEWKTAEKWFLDALEKIKAIGNEVTVDKWEPLLNNLGHVCRKLKKYAEALDYHRQALVLIPQNASTYSAIGYIHSLMGNFENAVDYFHTALGLRRDDTFSVTMLGHCIEMYIGDSEAYIGADIKDKLKCYDFDVHTMKTLKNIISPPWDFREFEVEKQTAEETGLTPLETSRKTPDSRPSLEETFEIEMNESDMMLETSMSDHST

SEQ ID NO: 1021 - protein, 725 aa, Homo sapiens
MGPRASLSRLRELCGHWLRPALHTKKQILELLVLEQFLSVLPPHLLGRLQGQPLRDGEEVVLLLEGIHREPSHAGPLDFSCNAGKSCPRADVTLEEKGCASQVPSHSPKKELPAEEPSVLGPSDEPPRPQPRAAQPAEPGQWRLPPSSKQPLSPGPQKTFQALQESSPQGPSPWPEESSRDQELAAVLECLTFEDVPENKAWPAHPLGFGSRTPDKEEFKQEEPKGAAWPTPILAESQADSPGVPGEPCAQSLGRGAAASGPGEDGSLLGSSEILEVKVAEGVPEPNPELQFICADCGVSFPQLSRLKAHQLRSHPAGRSFLCLCCGKSFGRSSILKLHMRTHTDERPHACHLCGHRFRQSSHLSKHLLTHSSEPAFLCAECGRGFQRRASLVQHLLAHAQDQKPPCAPESKAEAPPLTDVLCSHCGQSFQRRSSLKRHLRIHARDKDRRSSEGSGSRRRDSDRRPFVCSDCGKAFRRSEHLVAHRRVHTGERPFSCQACGRSFTQSSQLVSHQRVHTGEKPYACPQCGKRFVRRASLARHLLTHGGPRPHHCTQCGKSFGQTQDLARHQRSHTGEKPCRCSECGEGFSQSAHLARHQRIHTGEKPHACDTCGHRFRNSSNLARHRRSHTGERPYSCQTCGRSFRRNAHLRRHLATHAEPGQEQAEPPQECVECGKSFSRSCNLLRHLLVHTGARPYSCTQCGRSFSRNSHLLRHLRTHARETLY

SEQ ID NO: 1022 - protein, 538 aa, Homo sapiens
MARAAALLPSRSPPTPLLWPLLLLLLLETGAQDVRVQVLPEVRGQLGGTVELPCHLLPPVPGLYISLVTWQRPDAPANHQNVAAFHPKMGPSFPSPKPGSERLSFVSAKQSTGQDTEAELQDATLALHGLTVEDEGNYTCEFATFPKGSVRGMTWLRVIAKPKNQAEAQKVTFSQDPTTVALCISKEGRPPARISWLSSLDWEAKETQVSGTLAGTVTVTSRFTLVPSGRADGVTVTCKVEHESFEEPALIPVTLSVRYPPEVSISGYDDNWYLGRTDATLSCDVRSNPEPTGYDWSTTSGTFPTSAVAQGSQLVIHAVDSLFNTTFVCTVTNAVGMGRAEQVIFVRETPNTAGAGATGGIIGGIIAAIIATAVAATGILICRQQRKEQTLQGAEEDEDLEGPPSYKPPTPKAKLEAQEMPSQLFTLGASEHSPLKTPYFDAGASCTEQEMPRYHELPTLEERSGPLHPGATSLGSPIPVPPGPPAVEDVSLDLEDEEGEEEEEYLDKINPIYDALSYSSPSDSYQGKGFVMSRAMYV

SEQ ID NO: 1023 - protein, 317 aa, Homo sapiens [sequence omitted]

SEQ ID NO: 1024 - protein, 361 aa, Homo sapiens
MGNVLAASSPPAGPPPPPAPALVGLPPPPPSPPGFTLPPLGGSLGAGTSTSRSSERTPGAATASASGAAEDGACGCLPNPGTFEECHRKCKELFPIQMEGVKLTVNKGLSNHFQVNHTVALSTIGESNYHFGVTYVGTKQLSPTEAFPVLVGDMDNSGSLNAQVIHQLGPGLRSKMAIQTQQSKFVNWQVDGEYRGSDFTAAVTLGNPDVLVGSGILVAHYLQSITPCLALGGELVYHRRPGEEGTVMSLAGKYTLNNWLATVTLGQAGMHATYYHKASDQLQVGVEFEASTRMQDTSVSFGYQLDLPKANLLFKGSVDSNWIVGATLEKKLPPLPLTLALGAFLNHRKNKFQCGFGLTIG

SEQ ID NO: 1025 - protein, 101 aa, Homo sapiens
MGTRLLPALFLVLLVLGFEVQGTQQPQQDEMPSPTFLTQVKESLSSYWESAKTAAQNLYEKTYLPAVDEKLRDLYSKSTAAMSTYTGIFTDQVLSVLKGEE

SEQ ID NO: 1026 - protein, 391 aa, Homo sapiens
MDMASESVGGKILFATDDFFAPAENLIKSDSPCFKEHEYTEFGKWMDGWETRRKRIPGHDWCVLRLGIQGVIRGFDVDVSYFTGDYAPRVSIQAANLEEDKLPEIPERGTRTGAAATPEEFEAIAELKSDDWSYLVPMTELKPGNPASGHNYFLVNSQQRWTHIRLNIFPDGGIARLRVFGTGQKDWTATDPKEPADLVAIAFGGVCVGFSNAKFGHPNNIIGVGGAKSMADGWETARRLDRPPILENDENGILLVPGCEWAVFRLAHPGVITRIEIDTKYFEGNAPDSCKVDGCILTTQEEEAVIRQKWILPAHKWKPLLPVTKLSPNQSHLFDSLTLELQDVITHARLTIVPDGGVSRLRLRGFPSSICLLRPREKPMLKFSVSFKANP

SEQ ID NO: 1027 - protein, 805 aa, Homo sapiens [sequence omitted]

SEQ ID NO: 1028 - protein, 717 aa, Homo sapiens
GMEEVIVAQVDHGLGSAWVPSHRRVNPPTLRMKKLNWQKLPSNVAREHNSMWASLSSPDAEAVEPDFSSIERLFSFPAAKPKEPTMVAPRARKEPKEITFLDAKKSLNLNIFLKQFKCSNEEVAAMIRAGDTTKFDVEVLKQLLKLLPEKHEIENLRAFTEERAKLASADHFYLLLLAIPCYQLRIECMLLCEGAAAVLDMVRPKAQLVLAACESLLTSRQLPIFCQLILRIGNFLNYGSHTGDADGFKISTLLKLTETKSQQNRVTLLHHVLEEAEKSHPDLLQLPRDLEQPSQAAGINLEIIRSEASSNLKKLLETERKVSASVAEVQEQYTERLQASISAFRALDELFEAIEQKQRELADYLCEDAQQLSLEDTFSTMKAFRDLFLRALKENKDRKEQAAKAERRKQQLAEEEARRPRGEDGKPVRKGPGKQEEVCVIDALLADIRKGFQLRKTARGRGDTDGGSKAASMDPPRATEPVATSNPAGDPVGSTRCPASEPGLDATTASESRGWDLVDAVTPGPQPTLEQLEEGGPRPLERRSSWYVDASDVLTTEDPQCPQPLEGAWPVTLGDAQALKPLKFSSNQPPAAGSSRQDAKDPTSLLGVLQAEADSTSEGLEDAVHSRGARPPAAGPGGDEDEDEEDTAPESALDTSLDKSFSEDAVTDSSGSGTLPRARGRASKGTGKRRKKRPSRSQEEVPPDSDDNKTKKLCVIQ

SEQ ID NO: 1029 - protein, 953 aa, Homo sapiens
MAETLPGSGDSGPGTASLGPGVAETGTRRLSELRVIDLRAELKKRNLDTGGNKSVLMERLKKAVKEEGQDPDEIGIELEATSKKSAKRCVKGLKMEEEGTEDNGLEDDSRDGQEDMEASLENLQNMGMMDMSVLDETEVANSSAPDFGEDGTDGLLDSFCDSKEYVAAQLRQLPAQPPEHAVDGEGFKNTLETSSLNFKVTPDIEESLLEPENEKILDILGETCKSEPVKEESSELEQPFAQDTSSVGPDRKLAEEEDLFDSAHPEEGDLDLASESTAHAQSSKADSLLAVVKREPAEQPGDGERTDCEPVGLEPAVEQSSAASELAEASSEELAEAPTEAPSPEARDSKEDGRKFDFDACNEVPPAPKESSTSEGADQKMSSFKEEKDIKPIIKDEKGRVGSGSGRNLWVSGLSSTTRATDLKNLFSKYGKVVGAKVVTNARSPGARCYGFVTMSTSDEATKCISHLHRTELHGRMISVEKAKNEPAGKKLSDRKECEVKKEKLSSVDRHHSVEIKIEKTVIKKEEKIEKKEEKKPEDIKKEEKDQDELKPGPTNRSRVTKSGSRGMERTVVMDKSKGEPVISVKTTSRSKERSSKSQDRKSESKEKRDILSFDKIKEQRERERQRQREREIRETERRREREQREREQRLEAFHERKEKARLQRERLQLECQRQRLERERMERERLERERMRVERERRKEQERIHREREELRRQQEQLRYEQERRPGRRPYDLDRRDDAYWPEGKRVAMEDRYRADFPRPDHRFHDFDHRDRGQYQDHAIDRREGSRPMMGDHRDGQHYGDDRHGHGGPPERHGRDSRDGWGGYGSDKRLSEGRGLPPPPRGGRDWGEHNQRLEEHQARAWQGAMDAGAASREHARWQGGERGLSGPSGPGHMASRGGVAGRGGFAQGGHSQGHVVPGGGLEGGGVASQDRGSRVPHPHPHPPPYPHFTRRY

SEQ ID NO: 1030 - protein, 1321 aa, Homo sapiens
MGAPFVWALGLLMLQMLLFVAGEQGTQDITDASERGLHMQKLGSGSVQAALAELVALPCLFTLQPRPSAARDAPRIKWTKVRTASGQRQDLPILVAKDNVVRVAKSWQGRVSLPSYPRRRANATLLLGPLRASDSGLYRCQVVRGIEDEQDLVPLEVTGVVFHYRSARDRYALTFAEAQEACRLSSAIIAAPRHLQAAFEDGFDNCDAGWLSDRTVRYPITQSRPGCYGDRSSLPGVRSYGRRNPQELYDVYCFARELGGEVFYVGPARRLTLAGARAQCRRQGAALASVGQLHLAWHEGLDQCDPGWLADGSVRYPIQTPRRRCGGPAPGVRTVYRFANRTGFPSPAERFDAYCFRAHHPTSQHGDLETPSSGDEGEILSAEGPPVRELEPTLEEEEVVTPDFQEPLVSSGEEETLILEEKQESQQTLSPTPGDPMLASWPTGEVWLSTVAPSPSDMGAGTAASSHTEVAPTDPMPRRRGRFKGLNGRYFQQQEPEPGLQGGMEASAQPPTSEAAVNQMEPPLAMAVTEMLGSGQSRSPWADLTNEVDMPGAGSAGGKSSPEPWLWPPTMVPPSISGHSRAPVLELEKAEGPSARPATPDLFWSPLEATVSAPSPAPWEAFPVATSPDLPMMAMLRGPKEWMLPHPTPISTEANRVEAHGEATATAPPSPAAETKVYSLPLSLTPTGQGGEAMPTTPESPRADFRETGETSPAQVNKAEHSSSSPWPSVNRNVAVGFVPTETATEPTGLRGIPGSESGVFDTAESPTSGLQATVDEVQDPWPSVYSKGLDASSPSAPLGSPGVFLVPKVTPNLEPWVATDEGPTVNPMDSTVTPAPSDASGIWEPGSQVFEEAESTTLSPQVALDTSIVTPLTTLEQGDKVGVPAMSTLGSSSSQPHPEPEDQVETQGTSGASVPPHQSSPLGKPAVPPGTPTAASVGESASVSSGEPTVPWDPSSTLLPVTLGIEDFELEVLAGSPGVESFWEEVASGEEPALPGTPMNAGAEEVHSDPCENNPCLHGGTCNANGTMYGCSCDQGFAGENCEIDIDDCLCSPCENGGTCIDEVNGFVCLCLPSYGGSFCEKDTEGCDRGWHKFQGHCYRYFAHRRAWEDAEKDCRRRSGHLTSVHSPEEHSFINSFGHENTWIGLNDRIVERDFQWTDNTGLQFENWRENQPDNFFAGGEDCVVMVAHESGRWNDVPCNYNLPYVCKKGTVLCGPPPAVENASLIGARKAKYNVHATVRYQCNEGFAQHHVATIRCRSNGKWDRPQIVCTKPRRSHRMRRHHHHHQHHHQHHHHKSRKERRKHKKHPTEDWEKDEGNFC

SEQ ID NO: 1031 - protein, 442 aa, Homo sapiens
MGLAMEHGGSYARAGGSSRGCWYYLRYFFLFVSLIQFLIILGLVLFMVYGNVHVSTESNLQATERRAEGLYSQLLGLTASQSNLTKELNFTTRAKDAIMQMWLNARRDLDRINASFRQCQGDRVIYTNNQRYMAAIILSEKQCRDQFKDMNKSCDALLFMLNQKVKTLEVEIAKEKTICTKDKESVLLNKRVAEEQLVECVKTRELQHQERQLAKEQLQKVQALCLPLDKDKFEMDLRNLWRDSIIPRSLDNLGYNLYHPLGSELASIRRACDHMPSLMSSKVEELARSLRADIERVARENSDLQRQKLEAQQGLRASQEAKQKVEKEAQAREAKLQAECSRQTQLALEEKAVLRKERDNLAKELEEKKREAEQLRMELAIRNSALDTCIKTKSQPMMPVSRPMGPVPNPQPIDPASLEEFKRKILESQRPPAGIPVAPSSG

SEQ ID NO: 1032 - protein, 646 aa, Homo sapiens
MRAPGAGAASVVSLALLWLLGLPWTWSAAAALGVYVGSGGWRFLRIVCKTARRDLFGLSVLIRVRLELRRHQRAGHTIPRIFQAVVQRQPERLALVDAGTGECWTFAQLDAYSNAVANLFRQLGFAPGDVVAIFLEGRPEFVGLWLGLAKAGMEAALLNVNLRREPLAFCLGTSGAKALIFGGEMVAAVAEVSGHLGKSLIKFCSGDLGPEGILPDTHLLDPLLKEASTAPLAQIPSKGMDDRLFYIYTSGTTGLPKAAIVVHSRYYRMAAFGHHAYRMQAADVLYDCLPLYHSAGNIIGVGQCLIYGLTVVLRKKFSASRFWDDCIKYNCTVVQYIGEICRYLLKQPVREAERRHRVRLAVGNGLRPAIWEEFTERFGVRQIGEFYGATECNCSIANMDGKVGSCGFNSRILPHVYPIRLVKVNEDTMELLRDAQGLCIPCQAGEPGLLVGQINQQDPLRRFDGYVSESATSKKIAHSVFSKGDSAYLSGDVLVMDELGYMYFRDRSGDTFRWRGENVSTTEVEGVLSRLLGQTDVAVYGVAVPGVEGKAGMAAVADPHSLLDPNAIYQELQKVLAPYARPIFLRLLPQVDTTGTFKIQKTRLQREGFDPRQTSDRLFFLDLKQGHYLPLNEAVYTRICSGAFAL

SEQ ID NO: 1033 - protein, 703 aa, Homo sapiens
MSARATRPRSRRGRHAPPGELDPVAESSEEVEAASGSSKPSFAPPPVSSGLEQLGPMEEVSGQGLGSRTDKKMDGGSGRELASAPEVPHKPAVEAHQAPEAALQYKETVPPGNGAPDVFQTLQHTLSSLEAAAAAWRHQPPSHSGPMEFEGTSEGGAGSLGKQEGAGSCQREAARLAERNAWLRLALSSREDELVRTQASLEAIRAEKETLQKEVQELQDSLLRLEPCPHLSHNQAGGSGSGSSSSEADREPWETQDSFSLAHPLLRRLRSHSSTQILGSLPNQPLSPEMHIMEAQMEQLRGSIEKLKCFNRLLSAVLQGYKGRCEGLSMQLGQREAEATALHLALQYSEHCEEAYRVLLALREADSGAGDEAPMSDLQAAEKEAWRLLAQEEAAMDAGAQQNPQPSPEGSSVDKPTPQEVAFQLRSYVQRLQERRSLMKILSEPGPTLAPMPTVPRAEAMVQAILGTQAGPALPRLEKTQIQQDLVAAREALADLMLRLQLVRREKRGLELREAALRALGPAHVLLLEQLRWERAELQAGGANSSGGHSSGGGSSGDEEEWYQGLPAVPGGTSGIDGGQVGRAWDPEKLAQELAASLTRTLDLQEQLQSLRRELEQVAQKGRARRSQSAELNRDLCKAHSALVLAFRGAHRKQEEQRRKLEQQMALMEAQQAEEVAVLEATARALGKPRPPLPPPQLGDTFL

SEQ ID NO: 1034 - protein, 622 aa, Homo sapiens
MAAAPRAGRRRGQPLLALLLLLLAPLPPGAPPGADAYFPEERWSPESPLQAPRVLIALLARNAAHALPTTLGALERLRHPRERTALWVATDHNMDNTSTVLREWLVAVKSLYHSVEWRPAEEPRSYPDEEGPKHWSDSRYEHVMKLRQAALKSARDMWADYILFVDADNLILNPDTLSLLIAENKTVVAPMLDSRAAYSNFWCGMTSQGYYKRTPAYIPIRKRDRRGCFAVPMVHSTFLIDLRKAASRNLAFYPPHPDYTWSFDDIIVFAFSCKQAEVQMYVCNKEEYGFLPVPLRAHSTLQDEAESFMHVQLEVMVKHPPAEPSRFISAPTKTPDKMGFDEVFMINLRRRQDRRERMLRALQAQEIECRLVEAVDGKAMNTSQVEALGIQMLPGYRDPYHGRPLTKGELGCFLSHYNIWKEVVDRGLQKSLVFEDDLRFEIFFKRRLMNLMRDVEREGLDWDLIYVGRKRMQVEHPEKAVPRVRNLVEADYSYWTLAYVISLQGARKLLAAEPLSKMLPVDEFLPVMFDKHPVSEYKAHFSLRNLHAFSVEPLLIYPTHYTGDDGYVSDTETSVVWNNEHVKTDWDRAKSQKMREQQALSREAKNSDVLQSPLDSAARDEL

SEQ ID NO: 1035 - protein, 559 aa, Homo sapiens
MDNQCTVQVRLELGHRAQLRKKPTTEGFTHDWMVFVRGPEQCDIQHFVEKVVFWLHDSFPKPRRVCKEPPYKVEESGYAGFIMPIEVHFKNKEEPRKVCFTYDLFLNLEGNPPVNHLRCEKLTFNNPTTEFRYKLLRAGGVMVMPEGADTVSRPSPDYPMLPTIPLSAFSDPKKTKPSHGSKDANKESSKTSKPHKVTKEHRERPRKDSESKSSSKELEREQAKSSKDTSRKLGEGRLPKEEKAPPPKAAFKEPKMALKETKLESTSPKGGPPPPPPPPPRASSKRPATADSPKPSAKKQKKSSSKGSRSAPGTSPRTSSSSSFSDKKPAKDKSSTRGEKVKAESEPREAKKALEVEESNSEDEASFKSESAQSSPSNSSSSSDSSSDSDFEPSQNHSQGPLRSMVEDLQSEESDEDDSSSGEEAAGKTNPGRDSRLSFSDSESDNSADSSLPSREPPPPQKPPPPNSKVSGRRSPESCSKPEKILKKGTYDKAYTDELVELHRRLMALRERNVLQQIVNLIEETGHFNVTNTTFDFDLFSLDETTVRKLQSCLEAVAT

SEQ ID NO: 1036 - protein, 332 aa, Homo sapiens
MTWTSGQLQREKQARPGSGAVLAFPDDKDLRVYGPAESQSAVFGDVCPLLTSLLDGYNVCVMAYGQTGSGKSYTMLGRHSDDGPVLPLDPQSDLGIIPRVAEELFRLILENTSRSPKVEVSIVEVYNNDIFDLLAKDSIAAVSGVKREVVTAKDGRTEVALLASEAVGSASKLMELVHGGLQLRAKHPTLVHADSSRSHLIITVTLTTASCSDSTADQACSATLPREQTEAGRAGRSRRASQGALAPQLVPGNPAGHAEQVQARLQLVDSAGSECVGGDAKLLVILCISPSQRHLAQTLQGLGFGIRARQVQRGPARKKPPSSQTEGKRRPD

SEQ ID NO: 1037 - protein, 1831 aa, Homo sapiens
MSAGGRDEERRKLADIIHHWNANRLDLFEISQPTEDLEFHGVMRFYFQDKAAGNFATKCIRVSSTATTQDVIETLAEKFRPDMRMLSSPKYSLYEVHVSGERRLDIDEKPLVVQLNWNKDDREGRFVLKNENDAIPPKKAQSNGPEKQEKEGVIQNFKRTLSKKEKKEKKKREKEALRQASDKDDRPFQGEDVENSRLAAEVYKDMPETSFTRTISNPEVVMKRRRQQKLEKRMQEFRSSDGRPDSGGTLRIYADSLKPNIPYKTILLSTTDPADFAVAEALEKYGLEKENPKDYCIARVMLPPGAQHSDEKGAKEIILDDDECPLQIFREWPSDKGILVFQLKRRPPDHIPKKTKKHLEGKTPKGKERADGSGYGSTLPPEKLPYLVELSPGRRNHFAYYNYHTYEDGSDSRDKPKLYRLQLSVTEVGTEKLDDNSIQLFGPGIQPHHCDLTNMDGVVTVTPRSMDAETYVEGQRISETTMLQSGMKVQFGASHVFKFVDPSQDHALAKRSVDGGLMVKGPRHKPGIVQETTFDLGGDIHSGTALPTSKSTTRLDSDRVSSASSTAERGMVKPMIRVEQQPDYRRQESRTQDASGPELILPASIEFRESSEDSFLSAIINYTNSSTVHFKLSPTYVLYMACRYVLSNQYRPDISPTERTHKVIAVVNKMVSMMEGVIQEVDQVDQKQKNIAGALAFWMANASELLNFIKQDRDLSRITLDAQDVLAHLVQMAFKYLVHCLQSELNNYMPAFLDDPEENSLQRPKIDDVLHTLTGAMSLLRRCRVNAALTIQLFSQLFHFINMWLFNRLVTDPDSGLCSHYWGAIIRQQLGHIEAWAEKQGLELAADCHLSRIVQATTLLTMDKYAPDDIPNINSTCFKLNSLQLQALLQNYHCAPDEPFIPTDLIENVVTVAENTADELARSDGREVQLEEDPDLQLPFLLPEDGYSCDVVRNIPNGLQEFLDPLCQRGFCRLIPHTRSPGTWTIYFEGADYESHLLRENTELAQPLRKEPEIITVTLKKQNGMGLSIVAAKGAGQDKLGIYVKSVVKGGAADVDGRLAAGDQLLSVDGRSLVGLSQERAAELMTRTSSVVTLEVAKQGAIYHGLATLLNQPSPMMQRISDRRGSGKPRPKSEGFELYNNSTQNGSPESPQLPWAEYSEPKKLPGDDRLMKNRADHRSSPNVANQPPSPGGKSAYASGTTAKITSVSTGNLCTEEQTPPPRPEAYPIPTQTYTREYFTFPASKSQDRMAPPQNQWPNYEEKPHMHTDSNHSSIAIQRVTRSQEELREDKAYQLERHRIEAAMDRKSDSDMWINQSSSLDSSTSSQEHLNHSSKSVTPASTLTKSGPGRWKTPAAIPATPVAVSQPIRTDLPPPPPPPPVHYAGDFDGMSMDLPLPPPPSANQIGLPSAQVAAAERRKREEHQRWYEKEKARLEEERERKRREQERKLGQMRTQSLNPAPFSPLTAQQMKPEKPSTLQRPQETVIRELQPQQQPRTIERRDLQYITVSKEELSSGDSLSPDPWKRDAKEKLEKQQQMHIVDMLSKEIQELQSKPDRSAEESDRLRKLMLEWQFQKRLQESKQKDEDDEEEEDDDVDTMLIMQRLEAERRARLQDEERRRQQQLEEMRKREAEDRARQEEERRRQEEERTKRDAEEKRRQEEGYYSRLEAERRRQHDEAARRLLEPEAPGLCRPPLPRDYEPPSPSPAPGAPPPPPQRNASYLKTQVLSPDSLFTAKFVAYNEEEEEEDCSLAGPNSYPGSTGAAVGAHDACRDAKEKRSKSQDADSPGSSGAPENLTFKERQRLFSQGQDVSNKVKASRKLTELENELNTK

SEQ ID NO: 1038 - protein, 911 aa, Homo sapiens
MVDYHAANQSYQYGPSSAGNGAGGGGSMGDYMAQEDDWDRDLLLDPAWEKQQRKTFTAWCNSHLRKAGTQIENIDEDFRDGLKLMLLLEVISGERLPKPERGKMRVHKINNVNKALDFIASKGVKLVSIGAEEIVDGNAKMTLGMIWTIILRFAIQDISVEETSAKEGLLLWCQRKTAPYKNVNVQNFHISWKDGLAFNALIHRHRPELIEYDKLRKDDPVTNLNNAFEVAEKYLDIPKMLDAEDIVNTARPDEKAIMTYVSSFYHAFSGAQKAETAANRICKVLAVNQENEHLMEDYEKLASDLLEWIRRTIPWLEDRVPQKTIQEMQQKLEDFRDYRRVHKPPKVQEKCQLEINFNTLQTKLRLSNRPAFMPSEGKMVSDINNGWQHLEQAEKGYEEWLLNEIRRLERLDHLAEKFRQKASIHEAWTDGKEAMLKHRDYETATLSDIKALIRKHEAFESDLAAHQDRVEQIAAIAQELNELDYYDSHNVNTRCQKICDQWDALGSLTHSRREALEKTEKQLEAIDQLHLEYAKRAAPFNNWMESAMEDLQDMFIVHTIEEIEGLISAHDQFKSTLPDADREREAILAIHKEAQRIAESNHIKLSGSNPYTTVTPQIINSKWEKVQQLVPKRDHALLEEQSKQQSNEHLRRQFASQANVVGPWIQTKMEEIGRISIEMNGTLEDQLSHLKQYERSIVDYKPNLDLLEQQHQLIQEALIFDNKHTNYTMEHIRVGWEQLLTTIARTINEVENQILTRDAKGISQEQMQEFRASFNHFDKDHGGALGPEEFKACLISLGYDVENDRQGEAEFNRIMSLVDPNHSGLVTFQAFIDFMSRETTDTDTADQVIASFKVLAGDKNFITAEELRRELPPDQAEYCIARMAPYQGPDAVPGALDYKSFSTALYGESDL

SEQ ID NO: 1039 - protein, 260 aa, Homo sapiens
MMWSNFFLQEENRRRGAAGRRRAHGQGRSGLTPEREGKVKLALLLAAVGATLAVLSVGTEFWVELNTYKANGSAVCEAAHLGLWKACTKRLWQADVPVDRDTCGPAELPGEANCTYFKFFTTGENARIFQRTTKKEVNLAAAVIAVLGLAVMALGCLCIIMVLSKGAEFLLRVGAVCFGLSGLLLLVSLEVFRHSVRALLQRVSPEPPPAPRLTYEYSWSLGCGVGAGLILLLGAGCFLLLTLPSWPWGSLCPKRGHRAT

SEQ ID NO: 1040 - protein, 1215 aa, Homo sapiens
MAERGQQPPPAKRLCCRPGGGGGGGGSSGGGGGAGGGYSSACRPGPRAGGAAAAAACGGGAALGLLPPGKTQSPESLLDIAARRVAEKWPFQRVEERFERIPEPVQRRIVYWSFPRSEREICMYSSFNTGGGAAGGPGDDSGGGGGAGGGGGGGSSSSPAATSAAATSAAAAAAAAAAAAAAAAGAGAPSVGAAGAADGGDETRLPFRRGIALLESGCVDNVLQVGFHLSGTVTEPAIQSEPETVCNVAISFDRCKITSVTCSCGNKDIFYCAHVVALSLYRIRKPDQVKLHLPISETLFQMNRDQLQKFVQYLITVHHTEVLPTAQKLADEILSQNSEINQVHGAPDPTAGASIDDENCWHLDEEQVQEQVKLFLSQGGYHGSGKQLNLLFAKVREMLKMRDSNGARMLTLITEQFMADPRLSLWRQQGTAMTDKYRQLWDELGALWMCIVLNPHCKLEQKASWLKQLKKWNSVDVCPWEDGNHGSELPNLTNALPQGANANQDSSNRPHRTVFTRAIEACDLHWQDSHLQHIISSDLYTNYCYHDDTENSLFDSRGWPLWHEHVPTACARVDALRSHGYPREALRLAIAIVNTLRRQQQKQLEMFRTQKKELPHKNITSITNLEGWVGHPLDPVGTLFSSLMEACRIDDENLSGFSDFTENMGQCKSLEYQHLPAHKFLEEGESYLTLAVEVALIGLGQQRIMPDGLYTQEKVCRNEEQLISKLQEIELDDTLVKIFRKQAVFLLEAGPYSGLGEIIHRESVPMHTFAKYLFTSLLPHDAELAYKIALRAMRLLVLESTAPSGDLTRPHHIASVVPNRYPRWFTLSHIESQQCELASTMLTAAKGDVRRLETVLESIQKNIHSSSHIFKLAQDAFKIATLMDSLPDITLLKVSLELGLQVMRMTLSTLNWRRREMVRWLVTCATEVGVYALDSIMQTWFTLFTPTEATSIVATTVMSNSTIVRLHLDCHQQEKLASSARTLALQCAMKDPQNCALSALTLCEKDHIAFETAYQIVLDAATTGMSYTQLFTIARYMEHRGYPMRAYKLATLAMTHLNLSYNQDTHPAINDVLWACALSHSLGKNELAAIIPLVVKSVKCATVLSDILRRCTLTTPGMVGLHGRRNSGKLMSLDKAPLRQLLDATIGAYINTTHSRLTHISPRHYSEFIEFLSKARETFLMAHDGHIQFTQFIDNLKQIYKGKKKLMMLVRERFG

SEQ ID NO: 1041 - protein, 889 aa, Homo sapiens
MSYFGEHFWGEKNHGFEVLYHSVKQGPISTKELADFIRERATIEETYSKAMAKLSKLASNGTPMGTFAPLWEVFRVSSDKLALCHLELTRKLQDLIKDVLRYGEEQLKTHKKCKEEVVSTLDAVQVLSGVSQLLPKSRENYLNRCMDQERLRRESTSQKEMDKAETKTKKAAESLRRSVEKYNSARADFEQKMLDSALRFQAMEETHLRHMKALLGSYAHSVEDTHVQIGQVHEEFKQNIENVSVEMLLRKFAESKGTGREKPGPLDFEAYSAAALQEAMKRLRGAKAFRLPGLSRREREPEPPAAVDFLEPDSGTCPEVDEEGFTVRPDVTQNSTAEPSRFSSSDSDFDDEEPRKFYVHIKPAPARAPACSPEAAAAQLRATAGSLILPPGPGGTMKRHSSRDAAGKPQRPRSAPRTSSCAERLQSEEQVSKNLFGPPLESAFDHEDFTGSSSLGFTSSPSPFSSSSPENVEDSGLDSPSHAAPGPSPDSWVPRPGTPQSPPSCRAPPPEARGIRAPPLPDSPQPLASSPGPWGLEALAGGDLMPAPADPTAREGLAAPPRRLRSRKVSCPLTRSNGDLSRSLSPSPLGSSAASTALERPSFLSQTGHGVSRGPSPVVLGSQDALPIATAFTEYVHAYFRGHSPSCLARVTGELTMTFPAGIVRVFSGTPPPPVLSFRLVHTTAIEHFQPNADLLFSDPSQSDPETKDFWLNMAALTEALQRQAEQNPTASYYNVVLLRYQFSRPGPQSVPLQLSAHWQCGATLTQVSVEYGYRPGATAVPTPLTNVQILLPVGEPVTNVRLQPAATWNLEEKRLTWRLPDVSEAGGSGRLSASWEPLSGPSTPSPVAAQFTSEGTTLSGVDLELVGSGYRMSLVKRRFATGMYLVSC

SEQ ID NO: 1042 - protein, 1479 aa, Homo sapiens
MAKRSRGPGRRCLLALVLFCAWGTLAVVAQKPGAGCPSRCLCFRTTVRCMHLLLEAVPAVAPQTSILDLRFNRIREIQPGAFRRLRNLNTLLLNNNQIKRIPSGAFEDLENLKYLYLYKNEIQSIDRQAFKGLASLEQLYLHFNQIETLDPDSFQHLPKLERLFLHNNRITHLVPGTFNHLESMKRLRLDSNTLHCDCEILWLADLLKTYAESGNAQAAAICEYPRRIQGRSVATITPEELNCERPRITSEPQDADVTSGNTVYFTCRAEGNPKPEIIWLRNNNELSMKTDSRLNLLDDGTLMIQNTQETDQGIYQCMAKNVAGEVKTQEVTLRYFGSPARPTFVIQPQNTEVLVGESVTLECSATGHPPPRISWTRGDRTPLPVDPRVNITPSGGLYIQNVVQGDSGEYACSATNNIDSVHATAFIIVQALPQFTVTPQDRVVIEGQTVDFQCEAKGNPPPVIAWTKGGSQLSVDRRHLVLSSGTLRISGVALHDQGQYECQAVNIIGSQKVVAHLTVQPRVTPVFASIPSDTTVEVGANVQLPCSSQGEPEPAITWNKDGVQVTESGKFHISPEGFLTINDVGPADAGRYECVARNTIGSASVSMVLSVNVPDVSRNGDPFVATSIVEAIATVDRAINSTRTHLFDSRPRSPNDLLALFRYPRDPYTVEQARAGEIFERTLQLIQEHVQHGLMVDLNGTSYHYNDLVSPQYLNLIANLSGCTAHRRVNNCSDMCFHQKYRTHDGTCNNLQHPMWGASLTAFERLLKSVYENGFNTPRGINPHRLYNGHALPMPRLVSTTLIGTETVTPDEQFTHMLMQWGQFLDHDLDSTVVALSQARFSDGQHCSNVCSNDPPCFSVMIPPNDSRARSGARCMFFVRSSPVCGSGMTSLLMNSVYPREQINQLTSYIDASNVYGSTEHEARSIRDLASHRGLLRQGIVQRSGKPLLPFATGPPTECMRDENESPIPCFLAGDHRANEQLGLTSMHTLWFREHNRIATELLKLNPHWDGDTIYYETRKIVGAEIQHITYQHWLPKILGEVGMRTLGEYHGYDPGINAGIFNAFATAAFRFGHTLVNPLLYRLDENFQPIAQDHLPLHKAFFSPFRIVNEGGIDPLLRGLFGVAGKMRVPSQLLNTELTERLFSMAHTVALDLAAINIQRGRDHGIPPYHDYRVYCNLSAAHTFEDLKNEIKNPEIREKLKRLYGSTLNIDLFPALVVEDLVPGSRLGPTLMCLLSTQFKRLRDGDRLWYENPGVFSPAQLTQIKQTSLARILCDNADNITRVQSDVFRVAEFPHGYGSCDEIPRVDLRVWQDCCEDCRTRGQFNAFSYHFRGRRSLEFSYQEDKPTKKTRPRKIPSVGRQGEHLSNSTSAFSTRSDASGTNDFREFVLEMQKTITDLRTQIKKLESRLSTTECVDAGGESHANNTKWKKDACTICECKDGQVTCFVEACPPATCAVPVNIPGACCPVCLQKRAEEKP

SEQ ID NO: 1043 - protein, 699 aa, Homo sapiens
MGHHRPWLHASVLWAGVASLLLPPAMTQQLRGDGLGFRNRNNSTGVAGLSEEASAELRHHLHSPRDHPDENKDVSTENGHHFWSHPDREKEDEDVSKEYGHLLPGHRSQDHKVGDEGVSGEEVFAEHGGQARGHRGHGSEDTEDSAEHRHHLPSHRSHSHQDEDEDEVVSSEHHHHILRHGHRGHDGEDDEGEEEEEEEEEEEEASTEYGHQAHRHRGHGSEEDEDVSDGHHHHGPSHRHQGHEEDDDDDDDDDDDDDDDDVSIEYRHQAHRHQGHGIEEDEDVSDGHHHRDPSHRHRSHEEDDNDDDDVSTEYGHQAHRHQDHRKEEVEAVSGEHHHHVPDHRHQGHRDEEEDEDVSTERWHQGPQHVHHGLVDEEEEEEEITVQFGHYVASHQPRGHKSDEEDFQDEYKTEVPHHHHHRVPREEDEEVSAELGHQAPSHRQSHQDEETGHGQRGSIKEMSHHPPGHTVVKDRSHLRKDDSEEEKEKEEDPGSHEEDDESSEQGEKGTHHGSRDQEDEEDEEEGHGLSLNQEEEEEEDKEEEEEEEDEERREERAEVGAPLSPDHSEEEEEEEEGLEEDEPRFTIIPNPLDRREEAGGASSEEESGEDTGPQDAQEYGNYQPGSLCGYCSFCNRCTECESCHCDEENMGEHCDQCQHCQFCYLCPLVCETVCAPGSYVDYFSSSLYQALADMLETPEP

SEQ ID NO: 1044 - protein, 1214 aa, Homo sapiens
MVVPEKEQSWIPKIFKKKTCTTFIVDSTDPGGTLCQCGRPRTAHPAVAMEDAFGAAVVTVWDSDAHTTEKPTDAYGELDFTGAGRKHSNFLRLSDRTDPAAVYSLVTRTWGFRAPNLVVSVLGGSGGPVLQTWLQDLLRRGLVRAAQSTGAWIVTGGLHTGIGRHVGVAVRDHQMASTGGTKVVAMGVAPWGVVRNRDTLINPKGSFPARYRWRGDPEDGVQFPLDYNYSAFFLVDDGTHGCLGGENRFRLRLESYISQQKTGVGGTGIDIPVLLLLIDGDEKMLTRIENATQAQLPCLLVAGSGGAADCLAETLEDTLAPGSGGARQGEARDRIRRFFPKGDLEVLQAQVERIMTRKELLTVYSSEDGSEEFETIVLKALVKACGSSEASAYLDELRLAVAWNRVDIAQSELFRGDIQWRSFHLEASLMDALLNDRPEFVRLLISHGLSLGHFLTPMRLAQLYSAAPSNSLIRNLLDQASHSAGTKAPALKGGAAELRPPDVGHVLRMLLGKMCAPRYPSGGAWDPHPGQGFGESMYLLSDKATSPLSLDAGLGQAPWSDLLLWALLLNRAQMAMYFWEMGSNAVSSALGACLLLRVMARLEPDAEEAARRKDLAFKFEGMGVDLFGECYRSSEVRAARLLLRRCPLWGDATCLQLAMQADARAFFAQDGVQSLLTQKWWGDMASTTPIWALVLAFFCPPLIYTRLITFRKSEEEPTREELEFDMDSVINGEGPVGTADPAEKTPLGVPRQSGRPGCCGGRCGGRRCLRRWFHFWGAPVTIFMGNVVSYLLFLLLFSRVLLVDFQPAPPGSLELLLYFWAFTLLCEELRQGLSGGGGSLASGGPGPGHASLSQRLRLYLADSWNQCDLVALTCFLLGVGCRLTPGLYHLGRTVLCIDFMVFTVRLLHIFTVNKQLGPKIVIVSKMMKDVFFFLFFLGVWLVAYGVATEGLLRPRDSDFPSILRRVFYRPYLQIFGQIPQEDMDVALMEHSNCSSEPGFWAHPPGAQAGTCVSQYANWLVVLLLVIFLLVANILLVNLLIAMFSYTFGKVQGNSDLYWKAQRYRLIREFHSRPALAPPFIVISHLRLLLRQLCRRPRSPQPSSPALEHFRVYLSKEAERKLLTWESVHKENFLLARARDKRESDSERLKRTSQKVDLALKQLGHIREYEQRLKVLEREVQQCSRVLGWVAEALSRSALLPPGGPPPPDLPGSKD

SEQ ID NO: 1045 - protein, 430 aa, Homo sapiens
MAAVVLPPTAALSSLFPASQREGHTEGGELVNELLKSWLKGLVTFEDVAVEFTQEEWALLDPAQRTLYRDVMLENCRNLASLGNQVDKPRLISQLEQEDKVMTEERGILSGTCPDVENPFKAKGLTPKLHVFRKEQSRNMKMERNHLGATLNECNQCFKVFSTKSSLTRHRKIHTGERPYGCSECGKSYSSRSYLAVHKRIHNGEKPYECNDCGKTFSSRSYLTVHKRIHNGEKPYECSDCGKTFSNSSYLRPHLRIHTGEKPYKCNQCFREFRTQSIFTRHKRVHTGEGHYVCNQCGKAFGTRSSLSSHYSIHTGEYPYECHDCGRTFRRRSNLTQHIRTHTGEKPYTCNECGKSFTNSFSLTIHRRIHNGEKSYECSDCGKSFNVLSSVKKHMRTHTGKKPYECNYCGKSFTSNSYLSVHTRMHNRQM

SEQ ID NO: 1046 - protein, 467 aa, Homo sapiens
MPGRWRWQRDMHPARKLLSLLFLILMGTELTQVLPTNPEESWQVYSSAQDSEGRCICTVVAPQQTMCSRDARTKQLRQLLEKVQNMSQSIEVLDRRTQRDLQYVEKMENQMKGLESKFKQVEESHKQHLARQFKAIKAKMDELRPLIPVLEEYKADAKLVLQFKEEVQNLTSVLNELQEEIGAYDYDELQSRVSNLEERLRACMQKLACGKLTGISDPVTVKTSGSRFGSWMTDPLAPEGDNRVWYMDGYHNNRFVREYKSMVDFMNTDNFTSHRLPHPWSGTGQVVYNGSIYFNKFQSHIIIRFDLKTETILKTRSLDYAGYNNMYHYAWGGHSDIDLMVDESGLWAVYATNQNAGNIVVSRLDPVSLQTLQTWNTSYPKRSAGEAFIICGTLYVTNGYSGGTKVHYAYQTNASTYEYIDIPFQNKYSHISMLDYNPKDRALYAWNNGHQILYNVTLFHVIRSDEL

SEQ ID NO: 1047 - protein, 182 aa, Homo sapiens
MGDEEKRNRAITARRQHLKSVMLQIAATELEKEESRREAEKQNYLAEHCPPLHIPGSMSEVQELCKQLHAKIDAAEEEKYDMEVRVQKTSKELEDMNQKLFDLRGKFKRPPLRRVRMSADAMLKALLGSKHKVCMDLRANLKQVKKEDTEKERDLRDVGDWRKNIEEKSGMEGRKKMFESES

SEQ ID NO: 1048 - protein, 475 aa, Homo sapiens
MAAPRPPPARLSGVMVPAPIQDLEALRALTALFKEQRNRETAPRTIFQRVLDILKKSSHAVELACRDPSQVENLASSLQLITECFRCLRNACIECSVNQNSIRNLDTIGVAVDLILLFRELRVEQESLLTAFRCGLQFLGNIASRNEDSQSIVWVHAFPELFLSCLNHPDKKIVAYSSMILFTSLNHERMKELEENLNIAIDVIDAYQKHPESEWPFLIITDLFLKSPELVQAMFPKLNNQERVTLLDLMIAKITSDEPLTKDDIPVFLRHAELIASTFVDQCKTVLKLASEEPPDDEEALATIRLLDVLCEMTVNTELLGYLQVFPGLLERVIDLLRVIHVAGKETTNIFSNCGCVRAEGDISNVANGFKSHLIRLIGNLCYKNKDNQDKVNELDGIPLILDNCNISDSNPFLTQWVIYAIRNLTEDNSQNQDLIAKMEEQGLADASLLKKVGFEVEKKGEKLILKSTRDTPKP

SEQ ID NO: 1049 - protein, 902 aa, Homo sapiens
MSEFRIHHDVNELLSLLRVHGGDGAEVYIDLLQKNRTPYVTTTVSAHSAKVKIAEFSRTPEDFLKKYDELKSKNTRNLDPLVYLLSKLTEDKETLQYLQQNAKERAELAAAAVGSSTTSINVPAAASKISMQELEELRKQLGSVATGSTLQQSLELKRKMLRDKQNKKNSGQHLPIFPAWVYERPALIGDFLIGAGISTDTALPIGTLPLASQESAVVEDLLYVLVGVDGRYVSAQPLAGRQSRTFLVDPNLDLSIRELVHRILPVAASYSAVTRFIEEKSSFEYGQVNHALAAAMRTLVKEHLILVSQLEQLHRQGLLSLQKLWFYIQPAMRTMDILASLATSVDKGECLGGSTLSLLHDRSFSYTGDSQAQELCLYLTKAASAPYFEVLEKWIYRGIIHDPYSEFMVEEHELRKERIQEDYNDKYWDQRYTIVQQQIPSFLQKMADKILSTGKYLNVVRECGHDVTCPVAKEIIYTLKERAYVEQIEKAFNYASKVLLDFLMEEKELVAHLRSIKRYFLMDQGDFFVHFMDLAEEELRKPVEDITPPRLEALLELALRMSTANTDPFKDDLKIDLMPHDLITQLLRVLAIETKQEKAMAHADPTELALSGLEAFSFDYIVKWPLSLIINRKALTRYQMLFRHMFYCKHVERQLCSVWISNKTAKQHSLHSAQWFAGAFTLRQRMLNFVQNIQYYMMFEVMEPTWHILEKNLKSASNIDDVLGHHTGFLDTCLKDCMLTNPELLKVFSKLMSVCVMFTNCMQKFTQSMKLDGELGGQTLEHSTVLGLPAGAEERARKELARKHLAEHADTVQLVSGFEATINKFDKNFSAHLLDLLARLSIYSTSDCEHGMASVISRLDFNGFYTERLERLSAERSQKATPQVPVLRGPPAPAPRVAVTAQ

SEQ ID NO: 1050 - protein, 762 aa, Homo sapiens
MAMQEKYPTEGISHVTSPSSDVIQKGSSLGTEWQTPVISEPFRSRFSRCSSVADSGDTAIGTSCSDIAEDFCSSSGSPPFQPIKSHVTIPTAHVMPSTLGTSPAKPNSTPVGPSSSKLPLSGLAESVGMTRNGDLGAMKHSPGLSRDLMYFSGATGENGIEQSWFPAVGHERQEEARKFDIPSMESTLNQSAMMETLYSDPHHRVRFHNPRTSTSKELYRVLPEAKKAPGSGAVFERNGPHSNSSGVLPLGLQPAPGLSKPLPSQVWQPSPDTWHPREQSCELSTCRQQLELIRLQMEQMQLQNGAICHHPAAFGPSLPILEPAQWISILNSNEHLLKEKELLIDKQRKHISQLEQKVRESELQVHSALLGRPAPFGDVCLLRLQELQRENTFLRAQFAQKTEALSREKIDLEKKLSASEVEVQLIRESLKVALQKHSEEVKKQEERVKGRDKHINNLKKKCQKESEQNREKQQRIETLERYLADLPTLEDHQKQSQQLKDSELKSTELQEKVTELESLLEETQAICREKEIQLESLRQREAEFSSAGHSLQDKQSVEETSGEGPEVEMESWQKRYDSLQKIVEKQQQKMDQLRSQVQSLEQEVAQEEGTSQALREEAQRRDSALQQLRTAVKELSVQNQDLIEKNLTLQEHLRQAQPGSPPSPDTAQLALELHQELASCLQDLQAVCSIVTQRAQGHDPNLSLLLGIHSAQHPETQLDLQKPDVIKRKLEEVQQLRRDIEDLRTTMSDRYAQDMGENCVTQ

SEQ ID NO: 1051 - protein, 1085 aa, Homo sapiens
MAAGSDLLDEVFFNSEVDEKVVSDLVGSLESQLAASAAHHHHLAPRTPEVRAAAAGALGNHVVSGSPAGAAGAGPAAPAEGAPGAAPEPPPAGRARPGGGGPQRPGPPSPRRPLVPAGPAPPAAKLRPPPEGSAGSCAPVPAAAAVAAGPEPAPAGPAKPAGPAALAARAGPGPGPGPGPGPGPGPGKPAGPGAAQTLNGSAALLNSHHAAAPAVSLVNNGPAALLPLPKPAAPGTVIQTPPFVGAAAPPAPAAPSPPAAPAPAAPAAAPPPPPPAPATLARPPGHPAGPPTAAPAVPPPAAAQNGGSAGAAPAPAPAAGGPAGVSGQPGPGAAAAAPAPGVKAESPKRVVQAAPPAAQTLAASGPASTAASMVIGPTMQGALPSPAAVPPPAPGTPTGLPKGAAGAVTQSLSRTPTATTSGIRATLTPTVLAPRLPQPPQNPTNIQNFQLPPGMVLVRSENGQLLMIPQQALAQMQAQAHAQPQTTMAPRPATPTSAPPVQISTVQAPGTPIIARQVTPTTIIKQVSQAQTTVQPSATLQRSPGVQPQLVLGGAAQTASLGTATAVQTGTPQRTVPGATTTSSAATETMENVKKCKNFLSTLIKLASSGKQSTETAANVKELVQNLLDGKIEAEDFTSRLYRELNSSPQPYLVPFLKRSLPALRQLTPDSAAFIQQSQQQPPPPTSQATTALTAVVLSSSVQRTAGKTAATVTSALQPPVLSLTQPTQVGVGKQGQPTPLVIQQPPKPGALIRPPQVTLTQTPMVALRQPHNRIMLTTPQQIQLNPLQPVPVVKPAVLPGTKALSAVSAQAAAAQKNKLKEPGGGSFRDDDDINDVASMAGVNLSEESARILATNSELVGTLTRSCKDETFLLQAPLQRRILEIGKKHGITELHPDVVSYVSHATQQRLQNLVEKISETAQQKNFSYKDDDRYEQASDVRAQLKFFEQLDQIEKQRKDEQEREILMRAAKSRSRQEDPEQLRLKQKAKEMQQQELAQMRQRDANLTALAAIGPRKKRKVDCPGPGSGAEGSGPGSVVPGSSGVGTPRQFTRQRITRVNLRDLIFCLENERETSHSLLLYKAFLK

SEQ ID NO: 1052 - protein, 397 aa, Homo sapiens
MYQSLALAASPRQAAYADSGSFLHAPGAGSPMFVPPARVPSMLSYLSGCEPSPQPPELAARPGWAQTATADSSAFGPGSPHPPAAHPPGATAFPFAHSPSGPGSGGSAGGRDGSAYQGALLPREQFAAPLGRPVGTSYSATYPAYVSPDVAQSWTAGPFDGSVLHGLPGRRPTFVSDFLEEFPGEGRECVNCGALSTPLWRRDGTGHYLCNACGLYHKMNGVNRPLVRPQKRLSSSRRAGLCCTNCHTTNTTLWRRNSEGEPVCNACGLYMKLHGVPRPLAMKKESIQTRKRKPKTIAKARGSSGSTRNASASPSAVASTDSSAATSKAKPSLASPVCPGPSMAPQASGQEDDSLAPGHLEFKFEPEDFAFPSTAPSPQAGLRGALRQEAWCALALA

SEQ ID NO: 1053 - protein, 664 aa, Homo sapiens
MESFMESLNRLKEIHEKEVLGLQNKLLELNSERCRDAQRIEELFSKNHQLREQQKTLKENLRVLENRLRAGLCDRCMVTQELARKRQQEFESSHLQNLQRIFILTNEMNGLKEENETLKEEVKRLRGLGDRPKPRAKEGTSDPPSPLLLPSPGGWKAITEKPPGGHEEAEEDHQGVGLRGEEKPAGHRTSPVAKISPGATLPESRAPDMSPQRISNQLHGTIAVVRPGSQACPADRGPANGTPPPLPARSSPPSPAYERGLSLDSFLRASRPSAMTHEAPKLSPKVDRLCLLNRPLSLHLQSPHSSPLAPAAAPSDPRLQDLKAREAEAWEEPTELLGLPSALAGMQDLRLEGALHLLLAQQQLRARARAGSVRPRGQPTPGEMLPSLPVGSDSEGPENEGTRAALAAAGLSGGRHTQPAGPGRAQRTEAAATQDCALDKPLDLSEWGRARGQDTPKPAGQHGSLSPAAAHTASPEPPTQSGPLTRSPQALSNGTKGTRVPEQEEASTPMDPSRPLPGSQLSLSSPGSTEDEDTGRPLPPPHPQPPPHPQPPDLDGHPEPSKAEVLRPESDELDETDTPGSEVGLSSQAEATTSTTGEGPECICTQEHGQGPPRKRKRASEPGDKASKKPSRGRRKLTATEGPGSPRDAEDHSPSPNSSPWEET

SEQ ID NO: 1054 - protein, 3695 aa, Homo sapiens
MAKRLCAGSALCVRGPRGPAPLLLVGLALLGAARAREEAGGGFSLHPPYFNLAEGARIAASATCGEEAPARGSPRPTEDLYCKLVGGPVAGGDPNQTIRGQYCDICTAANSNKAHPASNAIDGTERWWQSPPLSRGLEYNEVNVTLDLGQVFHVAYVLIKFANSPRPDLWVLERSMDFGRTYQPWQFFASSKRDCLERFGPQTLERITRDDAAICTTEYSRIVPLENGEIVVSLVNGRPGAMNFSYSPLLREFTKATNVRLRFLRTNTLLGHLMGKALRDPTVTRRYYYSIKDISIGGRCVCHGHADACDAKDPTDPFRLQCTCQHNTCGGTCDRCCPGFNQQPWKPATANSANECQSCNCYGHATDCYYDPEVDRRRASQSLDGTYQGGGVCIDCQHHTTGVNCERCLPGFYRSPNHPLDSPHVCRRCNCESDFTDGTCEDLTGRCYCRPNFSGERCDVCAEGFTGFPSCYPTPSSSNDTREQVLPAGQIVNCDCSAAGTQGNACRKDPRVGRCLCKPNFQGTHCELCAPGFYGPGCQPCQCSSPGVADDRCDPDTGQCRCRVGFEGATCDRCAPGYFHFPLCQLCGCSPAGTLPEGCDEAGRCLCQPEFAGPHCDRCRPGYHGFPNCQACTCDPRGALDQLCGAGGLCRCRPGYTGTACQECSPGFHGFPSCVPCHCSAEGSLHAACDPRSGQCSCRPRVTGLRCDTCVPGAYNFPYCEAGSCHPAGLAPVDPALPEAQVPCMCRAHVEGPSCDRCKPGFWGLSPSNPEGCTRCSCDLRGTLGGVAECQPGTGQCFCKPHVCGQACASCKDGFFGLDQADYFGCRSCRCDIGGALGQSCEPRTGVCRCRPNTQGPTCSEPARDHYLPDLHHLRLELEEAATPEGHAVRFGFNPLEFENFSWRGYAQMAPVQPRIVARLNLTSPDLFWLVFRYVNRGAMSVSGRVSVREEGRSATCANCTAQSQPVAFPPSTEPAFITVPQRGFGEPFVLNPGTWALRVEAEGVLLDYVVLLPSAYYEAALLQLRVTEACTYRPSAQQSGDNCLLYTHLPLDGFPSAAGLEALCRQDNSLPRPCPTEQLSPSHPPLITCTGSDVDVQLQVAVPQPGRYALVVEYANEDARQEVGVAVHTPQRAPQQGLLSLHPCLYSTLCRGTARDTQDHLAVFHLDSEASVRLTAEQARFFLHGVTLVPIEEFSPEFVEPRVSCISSHGAFGPNSAACLPSRFPKPPQPIILRDCQVIPLPPGLPLTHAQDLTPAMSPAGPRPRPPTAVDPDAEPTLLREPQATVVFTTHVPTLGRYAFLLHGYQPAHPTFPVEVLINAGRVWQGHANASFCPHGYGCRTLVVCEGQALLDVTHSELTVTVRVPKGRWLWLDYVLVVPENVYSFGYLREEPLDKSYDFISHCAAQGYHISPSSSSLFCRNAAASLSLFYNNGARPCGCHEVGATGPTCEPFGGQCPCHAHVIGRDCSRCATGYWGFPNCRPCDCGARLCDELTGQCICPPRTIPPDCLLCQPQTFGCHPLVGCEECNCSGPGIQELTDPTCDTDSGQCKCRPNVTGRRCDTCSPGFHGYPRCRPCDCHEAGTAPGVCDPLTGQCYCKENVQGPKCDQCSLGTFSLDAANPKGCTRCFCFGATERCRSSSYTRQEFVDMEGWVLLSTDRQVVPHERQPGTEMLRADLRHVPEAVPEAFPELYWQAPPSYLGDRVSSYGGTLRYELHSETQRGDVFVPMESRPDVVLQGNQMSITFLEPAYPTPGHVHRGQLQLVEGNFRHTETRNTVSREELMMVLASLEQLQIRALFSQISSAVFLRRVALEVASPAGQGALASNVELCLCPASYRGDSCQECAPGFYRDVKGLFLGRCVPCQCHGHSDRCLPGSGVCVDCQHNTEGAHCERCQAGFVSSRDDPSAPCVSCPCPLSVPSNNFAEGCVLRGGRTQCLCKPGYAGASCERCAPGFFGNPLVLGSSCQPCDCSGNGDPNLLFSDCDPLTGACRGCLRHTTGPRCEICAPGFYGNALLPGNCTRCDCTPCGTEACDPHSGHCLCKAGVTGRRCDRCQEGHFGFDGCGGCRPCACGPAAEGSECHPQSGQCHCRPGTMGPQCRECAPGYWGLPEQGCRRCQCPGGRCDPHTGRCNCPPGLSGERCDTCSQQHQVPVPGGPVGHSIHCEVCDHCVVLLLDDLERAGALLPAIHEQLRGINASSMAWARLHRLNASIADLQSQLRSPLGPRHETAQQLEVLEQQSTSLGQDARRLGGQAVGTRDQASQLLAGTEATLGHAKTLLAAIRAVDRTLSELMSQTGHLGLANASAPSGEQLLRTLAEVERLLWEMRARDLGAPQAAAEAELAAAQRLLARVQEQLSSLWEENQALATQTRDRLAQHEAGLMDLREALNRAVDATREAQELNSRNQERLEEALQRKQELSRDNATLQATLHAARDTLASVFRLLHSLDQAKEELERLAASLDGARTPLLQRMQTFSPAGSKLRLVEAAEAHAQQLGQLALNLSSIILDVNQDRLTQRAIEASNAYSRILQAVQAAEDAAGQALQQADHTWATVVRQGLVDRAQQLLANSTALEEAMLQEQQRLGLVWAALQGARTQLRDVRAKKDQLEAHIQAAQAMLAMDTDETSKKIAHAKAVAAEAQDTATRVQSQLQAMQENVERWQGQYEGLRGQDLGQAVLDAGHSVSTLEKTLPQLLAKLSILENRGVHNASLALSASIGRVRELIAQARGAASKVKVPMKFNGRSGVQLRTPRDLADLAAYTALKFYLQGPEPEPGQGTEDRFVMYMGSRQATGDYMGVSLRDKKVHWVYQLGEAGPAVLSIDEDIGEQFAAVSLDRTLQFGHMSVTVERQMIQETKGDTVAPGAEGLLNLRPDDFVFYVGGYPSTFTPPPLLRFPGYRGCIEMDTLNEEVVSLYNFERTFQLDTAVDRPCARSKSTGDPWLTDGSYLDGTGFARISFDSQISTTKRFEQELRLVSYSGVLFFLKQQSQFLCLAVQEGSLVLLYDFGAGLKKAVPLQPPPPLTSASKAIQVFLLGGSRKRVLVRVERATVYSVEQDNDLELADAYYLGGVPPDQLPPSLRRLFPTGGSVRGCVKGIKALGKYVDLKRLNTTGVSAGCTADLLVGRAMTFHGHGFLRLALSNVAPLTGNVYSGFGFHSAQDSALLYYRASPDGLCQVSLQQGRVSLQLLRTEVKTQAGFADGAPHYVAFYSNATGVWLYVDDQLQQMKPHRGPPPELQPQPEGPPRLLLGGLPESGTIYNFSGCISNVFVQRLLGPQRVFDLQQNLGSVNVSTGCAPALQAQTPGLGPRGLQATARKASRRSRQPARHPACMLPPHLRTTRDSYQFGGSLSSHLEFVGILARHRNWPSLSMHVLPRSSRGLLLFTARLRPGSPSLALFLSNGHFVAQMEGLGTRLRAQSRQRSRPGRWHKVSVRWEKNRILLVTDGARAWSQEGPHRQHQGAEHPQPHTLFVGGLPASSHSSKLPVTVGFSGCVKRLRLHGRPLGAPTRMAGVTPCILGPLEAGLFFPGSGGVITLDLPGATLPDVGLELEVRPLAVTGLIFHLGQARTPPYLQLQVTEKQVLLRADDGAGEFSTSVTRPSVLCDGQWHRLAVMKSGNVLRLEVDAQSNHTVGPLLAAAAGAPAPLYLGGLPEPMAVQPWPPAYCGCMRRLAVNRSPVAMTRSVEVHGAVGASGCPAA

SEQ ID NO: 1055 - protein, 835 aa, Homo sapiens
MAASAAAASAAAASAASGSPGPGEGSAGGEKRSTAPSAAASASASAAASSPAGGGAEALELLEHCGVCRERLRPEREPRLLPCLHSACSACLGPAAPAAANSSGDGGAAGDGTVVDCPVCKQQCFSKDIVENYFMRDSGSKAATDAQDANQCCTSCEDNAPATSYCVECSEPLCETCVEAHQRVKYTKDHTVRSTGPAKSRDGERTVYCNVHKHEPLVLFCESCDTLTCRDCQLNAHKDHQYQFLEDAVRNQRKLLASLVKRLGDKHATLQKSTKEVRSSIRQVSDVQKRVQVDVKMAILQIMKELNKRGRVLVNDAQKVTEGQQERLERQHWTMTKIQKHQEHILRFASWALESDNNTALLLSKKLIYFQLHRALKMIVDPVEPHGEMKFQWDLNAWTKSAEAFGKIVAERPGTNSTGPAPMAPPRAPGPLSKQGSGSSQPMEVQEGYGFGSGDDPYSSAEPHVSGVKRSRSGEGEVSGLMRKVPRVSLERLDLDLTADSQPPVFKVFPGSTTEDYNLIVIERGAAAAATGQPGTAPAGTPGAPPLAGMAIVKEEETEAAIGAPPTATEGPETKPVLMALAEGPGAEGPRLASPSGSTSSGLEVVAPEGTSAPGGGPGTLDDSATICRVCQKPGDLVMCNQCEFCFHLDCHLPALQDVPGEEWSCSLCHVLPDLKEEDGSLSLDGADSTGVVAKLSPANQRKCERVLLALFCHEPCRPLHQLATDSTFSLDQPGGTLDLTLIRARLQEKLSPPYSSPQEFAQDVGRMFKQFNKLTEDKADVQSIIGLQRFFETRMNEAFGDTKFSAVLVEPPPMSLPGAGLSSQELSGGPGDGP

SEQ ID NO: 1056 - protein, 188 aa, Homo sapiens
MGGGWWWARAARLARLRFRRSLLPPQRPRSGGARGSFAPGHGPRAGASPPPVSELDRADAWLLRKAHETAFLSWFRNGLLASGIGVISFMQSDMGREAAYGFFLLGGLCVVWGSASYAVGLAALRGPMQLTLGGAAVGAGAVLAASLLWACAVGLYMGQLELDVELVPEDDGTASAEGPDEAGRPPPE

SEQ ID NO: 1057 - protein, 1303 aa, Homo sapiens
MEAAPGTPPPPPSESPPPPSPPPPSTPSPPPCSPDARPATPHLLHHRLPLPDDREDGELEEGELEDDGAEETQDTSGGPERSRKEKGEKHHSDSDEEKSHRRLKRKRKKEREKEKRRSKKRRKSKHKRHASSSDDFSDFSDDSDFSPSEKGHRKYREYSPPYAPSHQQYPPSHATPLPKKAYSKMDSKSYGMYEDYENEQYGEYEGDEEEDMGKEDYDDFTKELNQYRRAKEGSSRGRGSRGRGRGYRGRGSRGGSRGRGMGRGSRGRGRGSMGGDHPEDEEDFYEEEMDYGESEEPMGDDDYDEYSKELNQYRRSKDSRGRGLSRGRGRGSRGRGKGMGRGRGRGGSRGGMNKGGMNDDEDFYDEDMGDGGGGSYRSRDHDKPHQQSDKKGKVICKYFVEGRCTWGDHCNFSHDIELPKKRELCKFYITGFCARAENCPYMHGDFPCKLYHTTGNCINGDDCMFSHDPLTEETRELLDKMLADDAEAGAEDEKEVEELKKQGINPLPKPPPGVGLLPTPPRPPGPQAPTSPNGRPMQGGPPPPPPPPPPPPGPPQMPMPVHEPLSPQQLQQQDMYNKKIPSLFEIVVRPTGQLAEKLGVRFPGPGGPPGPMGPGPNMGPPGPMGGPMHPDMHPDMHPDMHPDMHADMHADMPMGPGMNPGPPMGPGGPPMMPYGPGDSPHSGMMPPIPPAQNFYENFYQQQEGMEMEPGLLGDAEDYGHYEELPGEPGEHLFPEHPLEPDSFSEGGPPGRPKPGAGVPDFLPSAQRALYLRIQQKQQEEEERARRLAESSKQDRENEEGDTGNWYSSDEDEGGSSVTSILKTLRQQTSSRPPASVGELSSSGLGDPRLQKGHPTGSRLADPRLSRDPRLTRHVEASGGSGPGDSGPSDPRLARALPTSKPEGSLHSSPVGPSSSKGSGPPPTEEEEGERALREKAVNIPLDPLPGHPLRDPRSQLQQFSHIKKDVTLSKPSFARTVLWNPEDLIPLPIPKQDAVPPVPAALQSMPTLDPRLHRAATAGPPNARQRPGASTDSSTQGANLPDFELLSRILKTVNATGSSAAPGSSDKPSDPRVRKAPTDPRLQKPTDSTASSRAAKPGPAEAPSPTASPSGDASPPATAPYDPRVLAAGGLGQGGGGGQSSVLSGISLYDPRTPNAGGKATEPAADTGAQPKGAEGNGKSSASKAKEPPFVRKSALEQPETGKAGADGGTPTDRYNSYNRPRPKAAAAPAATTATPPPEGAPPQPGVHNLPVPTLFGTVKQTPKTGSGSPFAGNSPAREGEQDAASLKDVFKGFDPTASPFCQ

SEQ ID NO: 1058 - protein, 954 aa, Homo sapiens
MEEEEGAVAKEWGTTPAGPVWTAVFDYEAAGDEELTLRRGDRVQVLSQDCAVSGDEGWWTGQLPSGRVGVFPSNYVAPGAPAAPAGLQLPQEIPFHELQLEEIIGVGGFGKVYRALWRGEEVAVKAARLDPEKDPAVTAEQVCQEARLFGALQHPNIIALRGACLNPPHLCLVMEYARGGALSRVLAGRRVPPHVLVNWAVQVARGMNYLHNDAPVPIIHRDLKSINILILEAIENHNLADTVLKITDFGLAREWHKTTKMSAAGTYAWMAPEVIRLSLFSKSSDVWSFGVLLWELLTGEVPYREIDALAVAYGVAMNKLTLPIPSTCPEPFARLLEECWDPDPHGRPDFGSILKRLEVIEQSALFQMPLESFHSLQEDWKLEIQHMFDDLRTKEKELRSREEELLRAAQEQRFQEEQLRRREQELAEREMDIVERELHLLMCQLSQEKPRVRKRKGNFKRSRLLKLREGGSHISLPSGFEHKITVQASPTLDKRKGSDGASPPASPSIIPRLRAIRLTPVDCGGSSSGSSSGGSGTWSRGGPPKKEELVGGKKKGRTWGPSSTLQKERVGGEERLKGLGEGSKQWSSSAPNLGKSPKHTPIAPGFASLNEMEEFAEAEDGGSSVPPSPYSTPSYLSVPLPAEPSPGARAPWEPTPSAPPARWGHGARRRCDLALLGCATLLGAVGLGADVAEARAADGEEQRRWLDGLFFPRAGRFPRGLSPPARPHGRREDVGPGLGLAPSATLVSLSSVSDCNSTRSLLRSDSDEAAPAAPSPPPSPPAPTPTPSPSTNPLVDLELESFKKDPRQSLTPTHVTAACAVSRGHRRTPSDGALGQRGPPEPAGHGPGPRDLLDFPRLPDPQALFPARRRPPEFPGRPTTLTFAPRPRPAASRPRLDPWKLVSFGRTLTISPPSRPDTPESPGPPSVQPTLLDMDMEGQNQDSTVPLCGAHGSH

SEQ ID NO: 1059 - protein, 1068 aa, Homo sapiens
MNSIKNVPARVLSRRPGHSLEAEREQFDKTQAISISKAINTQEAPVKEKHARRIILGTHHEKGAFTFWSYAIGLPLPSSSILSWKFCHVLHKVLRDGHPNVLHDCQRYRSNIREIGDLWGHLHDRYGQLVNVYTKLLLTKISFHLKHPQFPAGLEVTDEVLEKAAGTDVNNIFQLTVEMFDYMDCELKLSESVFRQLNTAIAVSQMSSGQCRLAPLIQVIQDCSHLYHYTVKLLFKLHSCLPADTLQGHRDRFHEQFHSLRNFFRRASDMLYFKRLIQIPRLPEGPPNFLRASALAEHIKPVVVIPEEAPEDEEPENLIEISTGPPAGEPVVVADLFDQTFGPPNGSVKDDRDLQIESLKREVEMLRSELEKIKLEAQRYIAQLKSQVNALEGELEEQRKQKQKALVDNEQLRHELAQLRAAQLEGERSQGLREEAERKASATEARYNKLKEKHSELVHVHAELLRKNADTAKQLTVTQQSQEEVARVKEQLAFQVEQVKRESELKLEEKSDQLEKLKRELEAKAGELARAQEALSHTEQSKSELSSRLDTLSAEKDALSGAVRQREADLLAAQSLVRETEAALSREQQRSSQEQGELQGRLAERESQEQGLRQRLLDEQFAVLRGAAAEAAGILQDAVSKLDDPLHLRCTSSPDYLVSRAQEALDAVSTLEEGHAQYLTSLADASALVAALTRFSHLAADTIINGGATSHLAPTDPADRLIDTCRECGARALELMGQLQDQQALRHMQASLVRTPLQGILQLGQELKPKSLDVRQEELGAVVDKEMAATSAAIEDAVRRIEDMMNQARHASSGVKLEVNERILNSCTDLMKAIRLLVTTSTSLQKEIVESGRGAATQQEFYAKNSRWTEGLISASKAVGWGATQLVEAADKVVLHTGKYEELIVCSHEIAASTAQLVAASKVKANKHSPHLSRLQECSRTVNERAANVVASTKSGQEQIEDRDTMDFSGLSLIKLKKQEMETQVRVLELEKTLEAERMRLGELRKQHYVLAGASGSPGEEVAIRPSTAPRSVTTKKPPLAQKPSVAPRQDHQLDKKDGIYPAQLVNY

SEQ ID NO: 1060 - protein, 554 aa, Homo sapiens
MAAADLSHGHYLSGDPVCLHEEKTPAGRIVADCLTDCYQDSVTFDDVAVDFTQEEWTLLDSTQRSLYSDVMLENYKNLATVGGQIIKPSLISWLEQEESRTVQGGVLQGWEMRLETQWSILQQDFLRGQTSIGIQLEGKHNGRELCDCEQCGEVFSEHSCLKTHVRTQSTGNTHDCNQYGKDFLTLCEKTSTGEKLSEFNQSEKIFSLTPNIVYQRTSTQEKSFECSHCGKSFINESYLQAHMRTHNGEKLYEWRNYGPGFIDSTSLSVLIETLNAKKPYKCKECGKGYRYPAYLSIHMRTHTGEKPYECKECGKAFNYSNSFQIHGRTHTGEKPYVCKECGKAFTQYSGLSMHVRSHSGDKPYECKECGKSFLTSSRLIQHIRTHTGEKPFVCVECGKAFAVSSNLSGHLRTHTEEKACECKICGKVFGYPSCLNNHMRTHSAQKPYTCKECGKAFNYSTHLKIHMRIHTGEKPYECKQCGKAFSHSSSFQIHERTHTGEKPYECKECGKAFTCSSSFRIHEKTHTEEKPYKCQQCGKAYSHPRSLRRHEQIH

SEQ ID NO: 1061 - protein, 463 aa, Homo sapiens
MAQGLVTFADVAIDFSQEEWACLNSAQRDLYWDVMLENYSNLVSLDLESAYENKSLPTEKNIHEIRASKRNSDRRSKSLGRNWICEGTLERPQRSRGRYVNQMIINYVKRPATREGTPPRTHQRHHKENSFECKDCGKAFSRGYQLSQHQKIHTGEKPYECKECKKAFRWGNQLTQHQKIHTGEKPYECKDCGKAFRWGSSLVIHKRIHTGEKPYECKDCGKAFRRGDELTQHQRFHTGEKDYECKDCGKTFSRVYKLIQHKRIHSGEKPYECKDCGKAFICGSSLIQHKRIHTGEKPYECQECGKAFTRVNYLTQHQKIHTGEKPHECKECGKAFRWGSSLVKHERIHTGEKPYKCTECGKAFNCGYHLTQHERIHTGETPYKCKECGKAFIYGSSLVKHERIHTGVKPYGCTECGKSFSHGHQLTQHQKTHSGAKSYECKECGKACNHLNHLREHQRIHNS

SEQ ID NO: 1062 - protein, 1845 aa, Homo sapiens
MGLCGLLERCWLHHDPDGVLTLNAENTNYAYQVPNFHKCEICLLSFPKESQFQRHMRDHERNDKPHRCDQCPQTFNVEFNLTLHKCTHSGEDPTCPVCNKKFSRVASLKAHIMLHEKEENLICSECGDEFTLQSQLAVHMEEHRQELAGTRQHACKACKKEFETSSELKEHMKTHYKIRVSSTRSYNRNIDRSGFTYSCPHCGKTFQKPSQLTRHIRIHTGERPFKCSECGKAFNQKGALQTHMIKHTGEKPHACAFCPAAFSQKGNLQSHVQRVHSEVKNGPTYNCTECSCVFKSLGSLNTHISKMHMGGPQNSTSSTETAHVLTATLFQTLPLQQTEAQATSASSQPSSQAVSDVIQQLLELSEPAPVESGQSPQPGQQLSITVGINQDILQQALENSGLSSIPAAAHPNDSCHAKTSAPHAQNPDVSSVSNEQTDPTDAEQEKEQESPEKLDKKEKKMIKKKSPFLPGSIREENGVRWHVCPYCAKEFRKPSDLVRHIRIHTHEKPFKCPQCFRAFAVKSTLTAHIKTHTGIKAFKCQYCMKSFSTSGSLKVHIRLHTGVRPFACPHCDKKFRTSGHRKTHIASHFKHTELRKMRHQRKPAKVRVGKTNIPVPDIPLQEPILITDLGLIQPIPKNQFFQSYFNNNFVNEADRPYKCFYCHRAYKKSCHLKQHIRSHTGEKPFKCSQCGRGFVSAGVLKAHIRTHTGLKSFKCLICNGAFTTGGSLRRHMGIHNDLRPYMCPYCQKTFKTSLNCKKHMKTHRYELAQQLQQHQQAASIDDSTVDQQSMQASTQMQVEIESDELPQTAEVVAANPEAMLDLEPQHVVGTEEAGLGQQLADQPLEADEDGFVAPQDPLRGHVDQFEEQSPAQQSFEPAGLPQGFTVTDTYHQQPQFPPVQQLQDSSTLESQALSTSFHQQSLLQAPSSDGMNVTTRLIQESSQEELDLQAQGSQFLEDNEDQSRRSYRCDYCNKGFKKSSHLKQHVRSHTGEKPYKCKLCGRGFVSSGVLKSHEKTHTGVKAFSCSVCNASFTTNGSLTRHMATHMSMKPYKCPFCEEGFRTTVHCKKHMKRHQTVPSAVSATGETEGGDICMEEEEEHSDRNASRKSRPEVITFTEEETAQLAKIRPQESATVSEKVLVQSAAEKDRISELRDKQAELQDEPKHANCCTYCPKSFKKPSDLVRHVRIHTGEKPYKCDECGKSFTVKSTLDCHVKTHTGQKLFSCHVCSNAFSTKGSLKVHMRLHTGAKPFKCPHCELRFRTSGRRKTHMQFHYKPDPKKARKPMTRSSSEGLQPVNLLNSSSTDPNVFIMNNSVLTGQFDQNLLQPGLVGQAILPASVSAGGDLTVSLTDGSLATLEGIQLQLAANLVGPNVQISGIDAASINNITLQIDPSILQQTLQQGNLLAQQLTGEPGLAPQNSSLQTSDSTVPASVVIQPISGLSLQPTVTSANLTIGPLSEQDSVLTTNSSGTQDLTQVMTSQGLVSPSGGPHEITLTINNSSLSQVLAQAAGPTATSSSGSPQEITLTISELNTTSGSLPSTTPMSPSAISTQNLVMSSSGVGGDASVTLTLADTQGMLSGGLDTVTLNITSQGQQFPALLTDPSLSGQGGAGSPQVILVSHTPQSASAACEEIAYQVAGVSGNLAPGNQPEKEGRAHQCLECDRAFSSAAVLMHHSKEVHGRERIHGCPVCRKAFKRATHLKEHMQTHQAGPSLSSQKPRVFKCDTCEKAFAKPSQLERHSRIHTGERPFHCTLCEKAFNQKSALQVHMKKHTGERPYKCAYCVMGFTQKSNMKLHMKRAHSYAGALQESAGHPEQDGEELSRTLHLEEVVQEAAGEWQALTHVF

SEQ ID NO: 1063 - protein, 770 aa, Homo sapiens
MEKRAAAGLEGAPGARAQLAVVCLVNIFLTGRLSSAVPALAACSGKLEQHTERRGVIYSPAWPLNYPPGTNCSWYIQGDRGDMITISFRNFDVEESHQCSLDWLLLGPAAPPRQEAFRLCGSAIPPAFISARDHVWIFFHSDASSSGQAQGFRLSYIRGKLGQASCQADEFRCDNGKCLPGPWQCNTVDECGDGSDEGNCSAPASEPPGSLCPGGTFPCSGARSTRCLPVERRCDGLQDCGDGSDEAGCPDLACGRRLGSFYGSFASPDLFGAARGPSDLHCTWLVDTQDSRRVLLQLELRLGYDDYVQVYEGLGERGDRLLQTLSYRSNHRPVSLEAAQGRLTVAYHARARSAGHGFNATYQVKGYCLPWEQPCGSSSDSDGGSLGDQGCFSEPQRCDGWWHCASGRDEQGCPACPPDQYPCEGGSGLCYTPADRCNNQKSCPDGADEKNCFSCQPGTFHCGTNLCIFETWRCDGQEDCQDGSDEHGCLAAVPRKVITAALIGSLVCGLLLVIALGCAFKLYSLRTQEYRAFETQMTRLEAEFVRREAPPSYGQLIAQGLIPPVEDFPVYSASQASVLQNLRTAMRRQMRRHASRRGPSRRRLGRLWNRLFHRPRAPRGQIPLLTAARPSQTVLGDGFLQPAPGAAPDPPAPLMDTGSTRAAGDRPPSAPGRAPEVGPSGPPLPSGLRDPECRPVDKDRKVCREPLVDGPAPADAPREPCSAQDPHPQVSTASSTLGPHSPEPLGVCRNPPPPCSPMLEASDDEALLVC

SEQ ID NO: 1064 - protein, 1173 aa, Homo sapiens
MEELSADEIRRRRLARLAGGQTSQPTTPLTSPQRENPPGPPIAASAPGPSQSLGLNVHNMTPATSPIGASGVAHRSQSSEGVSSLSSSPSNSLETQSQSLSRSQSMDIDGVSCEKSMSQVDVDSGIENMEVDENDRREKRSLSDKEPSSGPEVSEEQALQLVCKIFRVSWKDRDRDVIFLSSLSAQFKQNPKEVFSDFKDLIGQILMEVLMMSTQTRDENPFASLTATSQPIAAAARSPDRNLLLNTGSNPGTSPMFCSVASFGASSLSSLGASGGASNWDSYSDHFTIETCKETDMLNYLIECFDRVGIEEKKAPKMCSQPAVSQLLSNIRSQCISHTALVLQGSLTQPRSLQQPSFLVPYMLCRNLPYGFIQELVRTTHQDEEVFKQIFIPILQGLALAAKECSLDSDYFKYPLMALGELCETKFGKTHPVCNLVASLRLWLPKSLSPGCGRELQRLSYLGAFFSFSVFAEDDVKVVEKYFSGPAITLENTRVVSQSLQHYLELGRQELFKILHSILLNGETREAALSYMAAVVNANMKKAQMQTDDRLVSTDGFMLNFLWVLQQLSTKIKLETVDPTYIFHPRCRITLPNDETRVNATMEDVNDWLTELYGDQPPFSEPKFPTECFFLTLHAHHLSILPSCRRYIRRLRAIRELNRTVEDLKNNESQWKDSPLATRHREMLKRCKTQLKKLVRCKACADAGLLDESFLRRCLNFYGLLIQLLLRILDPAYPDITLPLNSDVPKVFAALPEFYVEDVAEFLFFIVQYSPQALYEPCTQDIVMFLVVMLCNQNYIRNPYLVAKLVEVMFMTNPAVQPRTQKFFEMIENHPLSTKLLVPSLMKFYTDVEHTGATSEFYDKFTIRYHISTIFKSLWQNIAHHGTFMEEFNSGKQFVRYINMLINDTTFLLDESLESLKRIHEVQEEMKNKEQWDQLPRDQQQARQSQLAQDERVSRSYLALATETVDMFHILTKQVQKPFLRPELGPRLAAMLNFNLQQLCGPKCRDLKVENPEKYGFEPKKLLDQLTDIYLQLDCARFAKAIADDQRSYSKELFEEVISKMRKAGIKSTIAIEKFKLLAEKVEEIVAKNARAEIDYSDAPDEFRDPLMDTLMTDPVRLPSGTIMDRSIILRHLLNSPTDPFNRQTLTESMLEPVPELKEQIQAWMREKQNSDH

SEQ ID NO: 1065 - protein, 2253 aa, Homo sapiens
MRPGPALLLLGVGLSLSVGRLPLPPVPRGAQAAVSGAPGGLLRGAPGLGVRGGRALLSLRPSAVRAGGAVLSGRGSLCFPHGGTGRRWYCLDLRVLLSAQRLPWPAAPALALVDLQLSARGGRLSLTWSVRLPRSPGRLAWAFRLRLLGPGAARPASPAARVSPRSAAPGPRPQQGFVARTECPTDGPARVMLQAVNSSSHRAVESSVSCQINACVIQRVRINTDQKGAPVRLSMQAEATINASVQLDCPAARAIAQYWQVFSVPAVGQAPDWTQPLDLPQLEIRNSPLFIHIPNNSLQWGVYVFNFTVSITTGNPKMPEVKDSDAVYVWIVRSSLQAVMLGDANITANFTEQLILDGSTSSDPDADSPLQGLQFFWYCTTDPRNYGGDRIILGSKEVCHPEQANLKWPWASGPVLTLLPETLKGDHVYFFRMVIRKDSRTAFSDKRVHVLQGPKAIAHITCIENCERNFIVSDRFSLFLNCTNCASRDFYKWSILSSSGGEMLFDWMGETVTGRNGAYLSIKAFAFRHFLEAEFSISLYLACWSGVTSVFRHSFIINHGPQIGECKINPAKGIALITKFVVQCSNFRDKHVPLTYKIIVSDLHSVGEISSVKENTLGTILYLGPQSTVPPSFLPVGMLASQYGLKIYAQVYDSLGAFSQVTLHATAQAPTDKNSSKTVLNQLLSFTVGPSSLLSTLIQKKDFLPAGYLLYIVASVLNNMKTELPLRDDRVNLRKHLIDQSFLLPVSTLVEIGQVVMTITKLTQKPSEFTWDAQKRATMRVWQANQALQEYQQKDKRFRSEQIEIVSTGILMSLSNILKMTSPHQVVKDPFYVIESLSDTILANKVPGNKTTSMRTPNFNMYVKKVEKWGINQLFRNEKHCRNCFYPTLNVSSVPGLSANGPISTMFCDFTNDLFPWLNDQENTSVEVSGFRMTGVADNGSVLEITPDVAEVYLVRKNLTFAAFNLTVGPNSEVDGSLKKTTGGFSFQVDSTVLREVLVHIVTEVMVLFTVLVYTGSQITPTALVATFLVPHDIPPFASQSALFDPACTVKKARVVCLPVSLLQLIAQHSHSPHCTVSIVLQAPRFVMKLNDKLVRISIFSVQCLDMYGIQSEWREGYCILGEKTSWYEVHCICKNVVRARRQLGTIGLTGIHLHTHYVMAKVIVIPNPVDLRLNIIKSLHQNPVTLFTVLFIILLYVGLAFWALYRDEMDQHLRGHVIVLPDNDPYDNLCYLVTIFTGSRWGSGTRANVFVQLRGTVSTSDVHCLSHPHFTTLYRGSINTFLLTTKSDLGDIHSIRVWHNNEGRSPSWYLSRIKVENLFSRHIWLFICQKWLSVDTTLDRTFHVTHPDERLTRKDFFFIDVSSNLRKNHMWFSIFASVVAKTFNRLQRLSCCLAMLLSSLLCNIMFFNLNRQEQTESRERKYMRSMMIGIESVLITIPVQLLITFLFTCSQRKPQADLKEVSPQKHPLMSEASEHWEEYLRKWHAYETAKVHPREVAKPASKGKPRLPKASPKATSKPKHRHRKAQIKTPETLGPNTNSNNNIEDDQDVHSEQHPSQKDLQQLKKKPRIVLPWWCVYVAWFLVFATSSISSFFIVFYGLTYGYDKSIEWLFASFCSFCQSVLLVQPSKIILLSGFRTNKPKYCKNLSWSTKYKYTEIRLDGMRMHPEEMQRIHDQIVRIRGTRMYQPLTEDEIRIFKRKKRIKRRALLFLSYILTHFIFLALLLILIVLLRHTDCFYYNQFIRDRFSMDLATVTKLEDIYRWLNSVLLPLLHNDLNPTFLPESSSKILGLPLMRQVRAKSSEKMCLPAEKFVQNSIRREIHCHPKYGIDPEDTKNYSGFWNEVDKQAIDESTNGFTYKPQGTQWLYYSYGLLHTYGSGGYALYFFPEQQRFNSTLRLKELQESNWLDEKTWAVVLELTTFNPDINLFCSISVIFEVSQLGVVNTSISLHSFSLADFDRKASAEIYLYVAILIFFLAYVVDEGCIIMQERASYVRSVYNLLNFALKCIFTVLIVLFLRKHFLATGIIRFYLSNPEDFIPFHAVSQVDHIMRIILGFLLFLTILKTLRYSRFFYDVRLAQRAIQAALPGICHMAFVVSVYFFVYMAFGYLVFGQHEWNYSNLIHSTQTVFSYCVSAFQNTEFSNNRILGVLFLSSFMLVMICVLINLFQAVILSAYEEMKQPVYEEPSDEVEAMTYLCRKLRTMFSFLTSQSKAKDEPEFFIDMLYGQPEKNSHRYLGLKTRNINGKKMVYLVV

SEQ ID NO: 1066 - protein, 337 aa, Homo sapiens
MTAGGQAEAEGAGGEPGAARLPSRVARLLSALFYGTCSFLIVLVNKALLTTYGFPSPIFLGIGQMAATIMILYVSKLNKIIHFPDFDKKIPVKLFPLPLLYVGNHISGLSSTSKLSLPMFTVLRKFTIPLTLLLETIILGKQYSLNIILSVFAIILGAFIAAGSDLAFNLEGYIFVFLNDIFTAANGVYTKQKMDPKELGKYGVLFYNACFMIIPTLIISVSTGDLQQATEFNQWKNVVFILQFLLSCFLGFLLMYSTVLCSYYNSALTTAVVGAIKNVSVAYIGILIGGDYIFSLLNFVGLNICMAGGLRYSFLTLSSQLKPKPVGEENICLDLKS

SEQ ID NO: 1067 - protein, 1782 aa, Homo sapiens
MGAGSSTEQRSPEQPPEGSSTPAEPEPSGGGPSAEAAPDTTADPAIAASDPATKLLQKNGQLSTINGVAEQDELSLQEGDLNGQKGALNGQGALNSQEEEEVIVTEVGQRDSEDVSKRDSDKEMATKSAVVHDITDDGQEETPEIIEQIPSSESNLEELTQPTESQANDIGFKKVFKFVGFKFTVKKDKTEKPDTVQLLTVKKDEGEGAAGAGDHKDPSLGAGEAASKESEPKQSTEKPEETLKREQSHAEISPPAESGQAVEECKEEGEEKQEKEPSKSAESPTSPVTSETGSTFKKFFTQGWAGWRKKTSFRKPKEDEVEASEKKKEQEPEKVDTEEDGKAEVASEKLTASEQAHPQEPAESAHEPRLSAEYEKVELPSEEQVSGSQGPSEEKPAPLATEVFDEKIEVHQEEVVAEVHVSTVEERTEEQKTEVEETAGSVPAEELVEMDAEPQEAEPAKELVKLKETCVSGEDPTQGADLSPDEKVLSKPPEGVVSEVEMLSSQERMKVQGSPLKKLFTSTGLKKLSGKKQKGKRGGGDEESGEHTQVPADSPDSQEEQKGESSASSPEEPEEITCLEKGLAEVQQDGEAEEGATSDGEKKREGVTPWASFKKMVTPKKRVRRPSESDKEDELDKVKSATLSSTESTASEMQEEMKGSVEEPKPEEPKRKVDTSVSWEALICVGSSKKRARRGSSSDEEGGPKAMGGDHQKADEAGKDKETGTDGILAGSQEHDPGQGSSSPEQAGSPTEGEGVSTWESFKRLVTPRKKSKSKLEEKSEDSIAGSGVEHSTPDTEPGKEESWVSIKKFIPGRRKKRPDGKQEQAPVEDAGPTGANEDDSDVPAVVPLSEYDAVEREKMEAQQAQKSAEQPEQKAATEVSKELSESQVHMMAAAVADGTRAATIIEERSPSWISASVTEPLEQVEAEAALLTEEVLEREVIAEEEPPTVTEPLPENREARGDTVVSEAELTPEAVTAAETAGPLGAEEGTEASAAEETTEMVSAVSQLTDSPDTTEEATPVQEVEGGVPDIEEQERRTQEVLQAVAEKVKEESQLPGTGGPEDVLQPVQRAEAERPEEQAEASGLKKETDVVLKVDAQEAKTEPFTQGKVVGQTTPESFEKAPQVTESIESSELVTTCQAETLAGVKSQEMVMEQAIPPDSVETPTDSETDGSTPVADFDAPGTTQKDEIVEIHEENEVASGTQSGGTEAEAVPAQKERPPAPSSFVFQEETKEQSKMEDTLEHTDKEVSVETVSILSKTEGTQEADQYADEKTKDVPFFEGLEGSIDTGITVSREKVTEVALKGEGTEEAECKKDDALELQSHAKSPPSPVEREMVVQVEREKTEAEPTHVNEEKLEHETAVTVSEEVSKQLLQTVNVPIIDGAKEVSSLEGSPPPCLGQEEAVCTKIQVQSSEASFTLTAAAEEEKVLGETANILETGETLEPAGAHLVLEEKSSEKNEDFAAHPGEDAVPTGPDCQAKSTPVIVSATTKKGLSSDLEGEKTTSLKWKSDEVDEQVACQEVKVSVAIEDLEPENGILELETKSSKLVQNIIQTAVDQFVRTEETATEMLTSELQTQAHVIKADSQDAGQETEKEGEEPQASAQDETPITSAKEESESTAVGQAHSDISKDMSEASEKTMTVEVEGSTVNDQQLEEVVLPSEEEGGGAGTKSVPEDDGHALLAERIEKSLVEPKEDEKGDDVDDPENQNSALADTDASGGLTKESPDTNGPKQKEKEDAQEVELQEGKVHSESDKAITPQAQEELQKQERESAKSELTES

SEQ ID NO: 1068 - protein, 1130 aa, Homo sapiens
MKRSEKPEGYRQMRPKTFPASNYTVSSRQMLQEIRESLRNLSKPSDAAKAEHNMSKMSTEDPRQVRNPPKFGTHHKALQEIRNSLLPFANETNSSRSTSEVNPQMLQDLQAAGFDEDMVIQALQKTNNRSIEAAIEFISKMSYQDPRREQMAAAAARPINASMKPGNVQQSVNRKQSWKGSKESLVPQRHGPPLGESVAYHSESPNSQTDVGRPLSGSGISAFVQAHPSNGQRVNPPPPPQVRSVTPPPPPRGQTPPPRGTTPPPPSWEPNSQTKRYSGNMEYVISRISPVPPGAWQEGYPPPPLNTSPMNPPNQGQRGISSVPVGRQPIIMQSSSKFNFPSGRPGMQNGTGQTDFMIHQNVVPAGTVNRQPPPPYPLTAANGQSPSALQTGGSAAPSSYTNGSIPQSMMVPNRNSHNMELYNISVPGLQTNWPQSSSAPAQSSPSSGHEIPTWQPNIPVRSNSFNNPLGNRASHSANSQPSATTVTAITPAPIQQPVKSMRVLKPELQTALAPTHPSWIPQPIQTVQPSPFPEGTASNVTVMPPVAEAPNYQGPPPPYPKHLLHQNPSVPPYESISKPSKEDQPSLPKEDESEKSYENVDSGDKEKKQITTSPITVRKNKKDEERRESRIQSYSPQAFKFFMEQHVENVLKSHQQRLHRKKQLENEMMRVGLSQDAQDQMRKMLCQKESNYIRLKRAKMDKSMFVKIKTLGIGAFGEVCLARKVDTKALYATKTLRKKDVLLRNQVAHVKAERDILAEADNEWVVRLYYSFQDKDNLYFVMDYIPGGDMMSLLIRMGIFPESLARFYIAELTCAVESVHKMGFIHRDIKPDNILIDRDGHIKLTDFGLCTGFRWTHDSKYYQSGDHPRQDSMDFSNEWGDPSSCRCGDRLKPLERRAARQHQRCLAHSLVGTPNYIAPEVLLRTGYTQLCDWWSVGVILFEMLVGQPPFLAQTPLETQMKVINWQTSLHIPPQAKLSPEASDLIIKLCRGPEDRLGKNGADEIKAHPFFKTIDFSSDLRQQSASYIPKITHPTDTSNFDPVDPDKLWSDDNEEENVNDTLNGWYKNGKHPEHAFYEFTFRRFFDDNGYPYNYPKPIEYEYINSQGSEQQSDEDDQNTGSEIKNRDLVYV

SEQ ID NO: 1069 - protein, 484 aa, Homo sapiens
MAGPWTFTLLCGLLAATLIQATLSPTAVLILGPKVIKEKLTQELKDHNATSILQQLPLLSAMREKPAGGIPVLGSLVNTVLKHIIWLKVITANILQLQVKPSANDQELLVKIPLDMVAGFNTPLVKTIVEFHMTTEAQATIRMDTSASGPTRLVLSDCATSHGSLRIQLLHKLSFLVNALAKQVMNLLVPSLPNLVKNQLCPVIEASFNGMYADLLQLVKVPISLSIDRLEFDLLYPAIKGDTIQLYLGAKLLDSQGKVTKWFNNSAASLTMPTLDNIPFSLIVSQDVVKAAVAAVLSPEEFMVLLDSVLPESAHRLKSSIGLINEKAADKLGSTQIVKILTQDTPEFFIDQGHAKVAQLIVLEVFPSSEALRPLFTLGIEASSEAQFYTKGDQLILNLNNISSDRIQLMNSGIGWFQPDVLKNIITEIIHSILLPNQNGKLRSGVPVSLVKALGFEAAESSLTKDALVLTPASLWKPSSPVSQ

SEQ ID NO: 1070 - protein, 714 aa, Homo sapiens
MGLPEERVRSGSGSRGQEEAGAGGRARSWSPPPEVSRSAHVPSLQRYRELHRRSVEEPREFWGDIAKEFYWKTPCPGPFLRYNFDVTKGKIFIEWMKGATTNICYNVLDRNVHEKKLGDKVAFYWEGNEPGETTQITYHQLLVQVCQFSNVLRKQGIQKGDRVAIYMPMIPELVVAMLACARIGALHSIVFAGFSSESLCERILDSSCSLLITTDAFYRGEKLVNLKELADEALQKCQEKGFPVRCCIVVKHLGRAELGMGDSTSQSPPIKRSCPDVQGKLKEKSKRVQPQISWNQGIDLWWHELMQEAGDECEPEWCDAEDPLFILYTSGSTGKPKGVVHTVGGYMLYVATTFKYVFDFHAEDVFWCTADIGWITGHSYVTYGPLANGATSVLFEGIPTYPDVNRLWSIVDKYKVTKFYTAPTAIRLLMKFGDEPVTKHSRASLQVLGTVGEPINPEAWLWYHRVVGAQRCPIVDTFWQTETGGHMLTPLPGATPMKPGSATFPFFGVAPAILNESGEELEGEAEGYLVFKQPWPGIMRTVYGNHERFETTYFKKFPGYYVTGDGCQRDQDGYYWITGRIDDMLNVSGHLLSTAEVESALVEHEAVAEAAVVGHPHPVKGECLYCFVTLCDGHTFSPKLTEELKKQIREKIGPIATPDYIQNAPGLPKTRSGKIMRRVLRKIAQNDHDLGDMSTVADPSVISHLFSHRCLTIQ

SEQ ID NO: 1071 - protein, 516 aa, Homo sapiens
MTLLITGDSIVSAEAVWDHVTMANRELAFKAGDVIKVLDASNKDWWWGQIDDEEGWFPASFVRLWVNQEDEVEEGPSDVQNGHLDPNSDCLCLGRPLQNRDQMRANVINEIMSTERHYIKHLKDICEGYLKQCRKRRDMFSDEQLKVIFGNIEDIYRFQMGFVRDLEKQYNNDDPHLSEIGPCFLEHQDGFWIYSEYCNNHLDACMELSKLMKDSRYQHFFEACRLLQQMIDIAIDGFLLTPVQKICKYPLQLAELLKYTAQDHSDYRYVAAALAVMRNVTQQINERKRRLENIDKIAQWQASVLDWEGEDILDRSSELIYTGEMAWIYQPYGRNQQRVFFLFDHQMVLCKKDLIRRDILYYKGRIDMDKYEVVDIEDGRDDDFNVSMKNAFKLHNKETEEIHLFFAKKLEEKIRWLRAFREERKMVQEDEKIGFEISENQKRQAAMTVRKVPKQKGVNSARSVPPSYPPPQDPLNHGQYLVPDGIAQSQVFEFTEPKRSQSPFWQNFSRLTPFKK

SEQ ID NO: 1072 - protein, 472 aa, Homo sapiens
MERRRITSAARRSYVSSGEMMVGGLAPGRRLGPGTRLSLARMPPPLPTRVDFSLAGALNAGFKETRASERAEMMELNDRFASYIEKVRFLEQQNKALAAELNQLRAKEPTKLADVYQAELRELRLRLDQLTANSARLEVERDNLAQDLATVRQKLQDETNLRLEAENNLAAYRQEADEATLARLDLERKIESLEEEIRFLRKIHEEEVRELQEQLARQQVHVELDVAKPDLTAALKEIRTQYEAMASSNMHEAEEWYRSKFADLTDAAARNAELLRQAKHEANDYRRQLQSLTCDLESLRGTNESLERQMREQEERHVREAASYQEALARLEEEGQSLKDEMARHLQEYQDLLNVKLALDIEIATYRKLLEGEENRITIPVQTFSNLQIRGGKSTKDGENHKVTRYLKSLTIRVIPIQAHQIVNGTPPARETSLDTKSVSEGHLKRNIVVKTVEMRDGEVIKESKQEHKDVM

SEQ ID NO: 1073 - protein, 1217 aa, Homo sapiens
MKGMSHEPKSPSLGMLSTATRTTATVNPLTPSPLNGALVPSGSPATSSALSAQAAPSSSFAAALRKLAKQAEEPRGSSLSSESSPVSSPATNHSSPASTPKRVPMGPIIVPPGGHSVPSTPPVVTIAPTKTVNGVWRSESRQDAGSRSSSGGRERLIVEPPLPQEKAGGPAIPSHLLSTPYPFGLSPSSVVQDSRFPPLNLQRPVHHVVPPSTVTEDYLRSFRPYHTTDDLRMSSLPPLGLDPATAAAYYHPSYLAPHPFPHPAFRMDDSYCLSALRSPFYPIPTPGSLPPLHPSAMHLHLSGVRYPPELSHSSLAALHSERMSGLSAERLQMDEELRREREREREREREREADREREKEREREREKEREQEKEREREKERERELERQREQRAREKELLAAKALEPSFLPVAELHGLRGHATEERGKPSEQLTPTRAEKLKDAGLQAPKPVQHPLHPVPTPHHTVPSLISNHGIFSLPSSSAATALLIQRTNEEEKWLARQRRLRQEKEDRQSQVSEFRQQVLEQHLDMGRPPVPAEAEHRPESTTRPGPNRHEPGGRDPPQHFGGPPPLISPKPQLHAAPTALWNPVSLMDNTLETRRAESHSLHSHPAAFEPSRQAAVPLVKVERVFCPEKAEEGPRKREPAPLDKYQPPPPPPREGGSLEHQPFLPGPGPFLAELEKSTQTILGQQRASLPQAATFGELSGPLKPGSPYRPPVPRAPDPAYIYDEFLQQRRRLVSKLDLEERRRREAQEKGYYYDLDDSYDESDEEEVRAHLRCVAEQPPLKLDTSSEKLEFLQLFGLTTQQQKEELVAQKRRKRRRMLRERSPSPPTIQSKRQTPSPRLALSTRYSPDEMNNSPNFEEKKKFLTIFNLTHISAEKRKDKERLVEMLRAMKQKALSAAVADSLTNSPRDSPAVSLSEPATQQASLDVEKPVGVAASLSDIPKAAEPGKLEQVRPQELSRVQELAPASGEKARLSEAPGGKKSLSMLHYIRGAAPKDIPVPLSHSTNGKSKPWEPFVAEEFAHQFHESVLQSTQKALQKHKGSVAVLSAEQNHKVDTSVHYNIPELQSSSRAPPPQHNGQQEPPTARKGPPTQELDRDSEEEEEEDDEDGEDEEEVPKRKWQGIEAVFEAYQEHIEEQNLERQVLQTQCRRLEARHYSLSLTAEQLSHSVAELRSQKQKMVSERERLQAELDHLRKCLALPAMHWPRGYLKGYPR

SEQ ID NO: 1074 - protein, 825 aa, Homo sapiens
MPSTSFPVPSKFPLGPAAAVFGRGETLGPAPRAGGTMKSAEEEHYGYASSNVSPALPLPTAHSTLPAPCHNLQTSTPGIIPPADHPSGYGAALDGGPAGYFLSSGHTRPDGAPALESPRIEITSCLGLYHNNNQFFHDVEVEDVLPSSKRSPSTATLSLPSLEAYRDPSCLSPASSLSSRSCNSEASSYESNYSYPYASPQTSPWQSPCVSPKTTDPEEGFPRGLGACTLLGSPRHSPSTSPRASVTEESWLGARSSRPASPCNKRKYSLNGRQPPYSPHHSPTPSPHGSPRVSVTDDSWLGNTTQYTSSAIVAAINALTTDSSLDLGDGVPVKSRKTTLEQPPSVALKVEPVGEDLGSPPPPADFAPEDYSSFQHIRKGGFCDQYLAVPQHPYQWAKPKPLSPTSYMSPTLPALDWQLPSHSGPYELRIEVQPKSHHRAHYETEGSRGAVKASAGGHPIVQLHGYLENEPLMLQLFIGTADDRLLRPHAFYQVHRITGKTVSTTSHEAILSNTKVLEIPLLPENSMRAVIDCAGILKLRNSDIELRKGETDIGRKNTRVRLVFRVHVPQPSGRTLSLQVASNPIECSQRSAQELPLVEKQSTDSYPVVGGKKMVLSGHNFLQDSKVIFVEKAPDGHHVWEMEAKTDRDLCKPNSLVVEIPPFRNQRITSPVHVSFYVCNGKRKRSQYQRFTYLPANVPIIKTEPTDDYEPAPTCGPVSQGLSPLPRPYYSQQLAMPPDPSSCLVAGFPPCPQRSTLMPAAPGVSPKLHDLSPAAYTKGVASPGHCHLGLPQPAGEAPAVQDVPRPVATHPGSPGQPPPALLPQQ

SEQ ID NO: 1075 - protein, 753 aa, Homo sapiens
MALLAMHSWRWAAAAAAFEKRRHSAILIRPLVSVSGSGPQWRPHQLGALGTARAYQQIPESLKSITWQRLGKGNSGQFLDAAKALQVWPLIEKRTCWHGHAGGGLHTDPKEGLKDVDTRKIIKAMLSYVWPKDRPDLRARVAISLGFLGGAKAMNIVVPFMFKYAVDSLNQMSGNMLNLSDAPNTVATMATAVLIGYGVSRAGAAFFNEVRNAVFGKVAQNSIRRIAKNVFLHLHNLDLGFHLSRQTGALSKAIDRGTRGISFVLSALVFNLLPIMFEVMLVSGVLYYKCGAQFALVTLGTLGTYTAFTVAVTRWRTRFRIEMNKADNDAGNAAIDSLLNYETVKYFNNERYEAQRYDGFLKTYETASLKSTSTLAMLNFGQSAIFSVGLTAIMVLASQGIVAGTLTVGDLVMVNGLLFQLSLPLNFLGTVYRETRQALIDMNTLFTLLKVDTQIKDKVMASPLQITPQTATVAFDNVHFEYIEGQKVLSGISFEVPAGKKVAIVGGSGSGKSTIVRLLFRFYEPQKGSIYLAGQNIQDVSLESLRRAVGVVPQDAVLFHNTIYYNLLYGNISASPEEVYAVAKLAGLHDAILRMPHGYDTQVGERGLKLSGGEKQRVAIARAILKDPPVILYDEATSSLDSITEETILGAMKDVVKHRTSIFIAHRLSTVVDADEIIVLDQGKVAERGTHHGLLANPHSIYSEMWHTQSSRVQNHDNPKWEAKKENISKEEERKKLQEEIVNSVKGCGNCSC

SEQ ID NO: 1076 - protein, 795 aa, Homo sapiens
MYHSLSETRHPLQPEEQEVGIDPLSSYSNKSGGDSNKNGRRTSSTLDSEGTFNSYRKEWEELFVNNNYLATIRQKGINGQLRSSRFRSICWKLFLCVLPQDKSQWISRIEELRAWYSNIKEIHITNPRKVVGQQDLMINNPLSQDEGSLWNKFFQDKELRSMIEQDVKRTFPEMQFFQQENVRKILTDVLFCYARENEQLLYKQGMHELLAPIVFVLHCDHQAFLHASESAQPSEEMKTVLNPEYLEHDAYAVFSQLMETAEPWFSTFEHDGQKGKETLMTPIPFARPQDLGPTIAIVTKVNQIQDHLLKKHDIELYMHLNRLEIAPQIYGLRWVRLLFGREFPLQDLLVVWDALFADGLSLGLVDYIFVAMLLYIRDALISSNYQTCLGLLMHYPFIGDVHSLILKALFLRDPKRNPRPVTYQFHPNLDYYKARGADLMNKSRTNAKGAPLNINKVSNSLINFGRKLISPAMAPGSAGGPVPGGNSSSSSSVVIPTRTSAEAPSHHLQQQQQQQRLMKSESMPVQLNKGLSSKNISSSPSVESLPGGREFTGSPPSSATKKDSFFSNISRSRSHSKTMGRKESEEELEAQISFLQGQLNDLDAMCKYCAKVMDTHLVNIQDVILQENLEKEDQILVSLAGLKQIKDILKGSLRFNQSQLEAEENEQITIADNHYCSSGQGQGRGQGQSVQMSGAIKQASSETPGCTDRGNSDDFILISKDDDGSSARGSFSGQAQPLRTLRSTSGKSQAPVCSPLVFSDPLMGPASASSSNPSSSPDDDSSKDSGFTIVSPLDI

SEQ ID NO: 1077 - protein, 813 aa, Homo sapiens
MDATALERDAVQFARLAVQRDHEGRYSEAVFYYKEAAQALIYAEMAGSSLENIQEKITEYLERVQALHSAVQSKSADPLKSKHQLDLERAHFLVTQAFDEDEKENVEDAIELYTEAVDLCLKTSYETADKVLQNKLKQLARQALDRAEALSEPLTKPVGKISSTSVKPKPPPVRAHFPLGANPFLERPQSFISPQSCDAQGQRYTAEEIEVLRTTSKINGIEYVPFMNVDLRERFAYPMPFCDRWGKLPLSPKQKTTFSKWVRPEDLTNNPTMIYTVSSFSIKQTIVSDCSFVASLAISAAYERRFNKKLITGIIYPQNKDGEPEYNPCGKYMVKLHLNGVPRKVIIDDQLPVDHKGELLCSYSNNKSELWVSLIEKAYMKVMGGYDFPGSNSNIDLHALTGWIPERIAMHSDSQTFSKDNSFRMLYQRFHKGDVLITASTGMMTEAEGEKWGLVPTHAYAVLDIREFKGLRFIQLKNPWSHLRWKGRYSENDVKNWTPELQKYLNFDPRTAQKIDNGIFWISWDDLCQYYDVIYLSWNPGLFKESTCIHSTWDAKQGPVKDAYSLANNPQYKLEVQCPQGGAAVWVLLSRHITDKDDFANNREFITMVVYKTDGKKVYYPADPPPYIDGIRINSPHYLTKIKLTTPGTHTFTLVVSQYEKQNTIHYTVRVYSACSFTFSKIPSPYTLSKRINGKWSGQSAGGCGNFQETHKNNPIYQFHIEKTGPLLIELRGPRQYSVGFEVVTVSTLGDPGPHGFLRKSSGDYRCGFCYLELENIPSGIFNIIPSTFLPKQEGPFFLDFNSIIPIKITQLQ

SEQ ID NO: 1078 - protein, 904 aa, Homo sapiens
MSYIKSNLELYQQYTAMAPKLLARISKLLMICQNAGISVPKGIRNIFEFTWEELISDPSVPTPSDILGLEVSFGAPLVVLMEPTFVQVPTLKKPLPPPPPAPPRPVLLATTGAAKRSTLSPTMARQVRTHQETLNRFQQQSIHLLTELLRLKMKAMVESMSVGANPLDITRRFVEASQLLHLNAKEMAFNCLISTAGRSGYSSGQLWKESLANMSAIGVNSPYQLIYHSSTACLSFSLSAGKEAKKKIGKSRTTEDVSMPPLHRGVGTPANSLEFSDPCPEAREKLQELCRHIEAERATWKGRNISYPMILRNYKAKMPSHLMLARKGDSQTPGLHYPPTAGAQTLSPTSHPSSANHHFSQHCQEGKAPKKAFKFHYTFYDGSSFVYYPSGNVAVCQIPTCCRGRTITCLFNDIPGFSLLALFNTEGQGCVHYNLKTSCPYVLILDEEGGTTNDQQGYVVHKWSWTSRTETLLSLEYKVNEEMKLKVLGQDSITVTFTSLNETVTLTVSANNCPHGMAYDKRLNRRISNMDDKVYKMSRALAEIKKRFQKTVTQFINSILLAAGLFTIEYPTKKEEEEFVRFKMRSRTHPERLPKLSLYSGESLLRSQSGHLESSIAETLKDEPESAPVSPVRKTTKIHTKAKVTSRGKAREGRSPTRWAALPSDCPLVLRKLMLKEDTRAGCKCLVKAPLVSDVELERFLLAPRDPSQVLVFGIISSQNYTSTGQLQWLLNTLYNHQQRGRGSPCIQCRYDSYRLLQYDLDSPLQEDPPLMVKKNSVVQGMILMFAGGKLIFGGRVLNGYGLSKQNLLKQIFRSQQDYKMGYFLPDDYKFSVPNSVLSLEDSESVKKAESEDIQGSSSSLALEDYVEKELSLEAEKTREPEVELHPLSRDSKITSWKKQASKK

SEQ ID NO: 1079 - protein, 784 aa, Homo sapiens
MASLDDPGEVREGFLCPLCLKDLQSFYQLHSHYEEEHSGEDRDVKGQIKSLVQKAKKAKDRLLKREGDDRAESGTQGYESFSYGGVDPYMWEPQELGAVRSHLSDFKKHRAARIDHYVVEVNKLIIRLEKLTAFDRTNTESAKIRAIEKSVVPWVNDQDVPFCPDCGNKFSIRNRRHHCRLCGSIMCKKCMELISLPLANKLTSASKESLSTHTSPSQSPNSVHGSRRGSISSMSSVSSVLDEKDDDRIRCCTHCKDTLLKREQQIDEKEHTPDIVKLYEKLRLCMEKVDQKAPEYIRMAASLNAGETTYSLEHASDLRVEVQKVYELIDALSKKILTLGLNQDPPPHPSNLRLQRMIRYSATLFVQEKLLGLMSLPTKEQFEELKKKRKEEMERKRAVERQAALESQRRLEERQSGLASRAANGEVASLRRGPAPLRKAEGWLPLSGGQGQSEDSDPLLQQIHNITSFIRQAKAAGRMDEVRTLQENLRQLQDEYDQQQTEKAIELSRRQAEEEDLQREQLQMLRERELEREREQFRVASLHTRTRSLDFREIGPFQLEPSREPRTHLAYALDLGSSPVPSSTAPKTPSLSSTQPTRVWSGPPAVGQERLPQSSMPQQHEGPSLNPFDEEDLSSPMEEATTGPPAAGVSLDPSARILKEYNPFEEEDEEEEAVAGNPFIQPDSPAPNPFSEEDEHPQQRLSSPLVPGNPFEEPTCINPFEMDSDSGPEAEEPIEEELLLQQIDNIKAYIFDAKQCGRLDEVEVLTENLRELKHTLAKQKGGTD

SEQ ID NO: 1080 - protein, 420 aa, Homo sapiens
MSPPPLLQPLLLLLPLLNVEPSGATLIRIPLHRVQPGRRILNLLRGWREPAELPKLGAPSPGDKPIFVPLSNYRDVQYFGEIGLGTPPQNFTVAFDTGSSNLWVPSRRCHFFSVPCWLHHRFDPKASSSFQANGTKFAIQYGTGRVDGILSEDKLTIGGIKGASVIFGEALWEPSLVFAFAHFDGILGLGFPILSVEGVRPPMDVLVEQGLLDKPVFSFYLNRDPEEPDGGELVLGGSDPAHYIPPLTFVPVTVPAYWQIHMERVKVGPGLTLCAKGCAAILDTGTSLITGPTEEIRALHAAIGGIPLLAGEYIILCSEIPKLPAVSFLLGGVWFNLTAHDYVIQTTRNGVRLCLSGFQALDVPPPAGPFWILGDVFLGTYVAVFDRGDMKSSARVGLARARTRGADLGWGETAQAQFPG

SEQ ID NO: 1081 - protein, 460 aa, Homo sapiens
MSSPTTSSLDTPLPGNGPPQPGAPSSSPTVKEEGPEPWPGGPDPDVPGTDEASSACSTDWVIPDPEEEPERKRKKGPAPKMLGHELCRVCGDKASGFHYNVLSCEGCKGFFRRSVVRGGARRYACRGGGTCQMDAFMRRKCQQCRLRKCKEAGMREQCVLSEEQIRKKKIRKQQQESQSQSQSPVGPQGSSSSASGPGASPGGSEAGSQGSGEGEGVQLTAAQELMIQQLVAAQLQCNKRSFSDQPKVTPWPLGADPQSRDARQQRFAHFTELAIISVQEIVDFAKQVPGFLQLGREDQIALLKASTIEIMLLETARRYNHETECITFLKDFTYSKDDFHRAGLQVEFINPIFEFSRAMRRLGLDDAEYALLIAINIFSADRPNVQEPGRVEALQQPYVEALLSYTRIKRPQDQLRFPRMLMKLVSLRTLSSVHSEQVFALRLQDKKLPPLLSEIWDVHE

SEQ ID NO: 1082 - protein, 682 aa, Homo sapiens
MCGIFAYMNYRVPRTRKEIFETLIKGLQRLEYRGYDSAGVAIDGNNHEVKERHIQLVKKRGKVKALDEELYKQDSMDLKVEFETHFGIAHTRWATHGVPSAVNSHPQRSDKGNEFVVIHNGIITNYKDLRKFLESKGYEFESETDTETIAKLIKYVFDNRETEDITFSTLVERVIQQLEGAFALVFKSVHYPGEAVATRRGSPLLIGVRSKYKLSTEQIPILYRTCTLENVKNICKTRMKRLDSSACLHAVGDKAVEFFFASDASAIIEHTNRVIFLEDDDIAAVADGKLSIHRVKRSASDDPSRAIQTLQMELQQIMKGNFSAFMQKEIFEQPESVFNTMRGRVNFETNTVLLGGLKDHLKEIRRCRRLIVIGCGTSYHAAVATRQVLEELTELPVMVELASDFLDRNTPVFRDDVCFFISQSGETADTLLALRYCKDRGALTVGVTNTVGSSISRETDCGVHINAGPEIGVASTKAYTSQFISLVMFGLMMSEDRISLQNRRQEIIRGLRSLPELIKEVLSLEEKIHDLALELYTQRSLLVMGRGYNYATCLEGALKIKEITYMHSEGILAGELKHGPLALIDKQMPVIMVIMKDPCFAKCQNALQQVTARQGRPIILCSKDDTESSKFAYKTIELPHTVDCLQGILSVIPLQLLSFHLAVLRGYDVDFPRNLAKSVTVE

SEQ ID NO: 1083 - protein, 205 aa, Homo sapiens
MSKGRAEAAAGAAGILLRYLQEQNRPYSSQDVFGNLQREHGLGKAVVVKTLEQLAQQGKIKEKMYGKQKIYFADQDQFDMVSDADLQVLDGKIVALTAKVQSLQQSCRYMEAEMQKEIQELKKECAGYRERLKNIKAATNHVTPEEKEQVYRERQKYCKEWRKRKRMATELSDAILEGYPKSKKQFFEEVGIETDEDYNVTLPDP

SEQ ID NO: 1084 - protein, 1101 aa, Homo sapiens
MSAKAISEQTGKELLYKFICTTSAIQNRFKYARVTPDTDWARLLQDHPWLLSQNLVVKPDQLIKRRGKLGLVGVNLTLDGVKSWLKPRLGQEATVGKATGFLKNFLIEPFVPHSQAEEFYVCIYATREGDYVLFHHEGGVDVGDVDAKAQKLLVGVDEKLNPEDIKKHLLVHAPEDKKEILASFISGLFNFYEDLYFTYLEINPLVVTKDGVYVLDLAAKVDATADYICKVKWGDIEFPPPFGREAYPEEAYIADLDAKSGASLKLTLLNPKGRIWTMVAGGGASVVYSDTICDLGGVNELANYGEYSGAPSEQQTYDYAKTILSLMTREKHPDGKILIIGGSIANFTNVAATFKGIVRAIRDYQGPLKEHEVTIFVRRGGPNYQEGLRVMGEVGKTTGIPIHVFGTETHMTAIVGMALGHRPIPNQPPTAAHTANFLLNASGSTSTPAPSRTASFSESRADEVAPAKKAKPAMPQDSVPSPRSLQGKSTTLFSRHTKAIVWGMQTRAVQGMLDFDYVCSRDEPSVAAMVYPFTGDHKQKFYWGHKEILIPVFKNMADAMRKHPEVDVLINFASLRSAYDSTMETMNYAQIRTIAIIAEGIPEALTRKLIKKADQKGVTIIGPATVGGIKPGCFKIGNTGGMLDNILASKLYRPGSVAYVSRSGGMSNELNNIISRTTDGVYEGVAIGGDRYPGSTFMDHVLRYQDTPGVKMIVVLGEIGGTEEYKICRGIKEGRLTKPIVCWCIGTCATMFSSEVQFGHAGACANQASETAVAKNQALKEAGVFVPRSFDELGEIIQSVYEDLVANGVIVPAQEVPPPTVPMDYSWARELGLIRKPASFMTSICDERGQELIYAGMPITEVFKEEMGIGGVLGLLWFQKRLPKYSCQFIEMCLMVTADHGPAVSGAHNTIICARAGKDLVSSLTSGLLTIGDRFGGALDAAAKMFSKAFDSGIIPMEFVNKMKKEGKLIMGIGHRVKSINNPDMRVQILKDYVRQHFPATPLLDYALEVEKITTSKKPNLILNVDGLIGVAFVDMLRNCGSFTREEADEYIDIGALNGIFVLGRSMGFIGHYLDQKRLKQGLYRHPWDDISYVLPEHMSM

SEQ ID NO: 1085 - protein, 756 aa, Homo sapiens
MHLKIVLAFLALSLITIFALAYVLLTSPGGSSQPPHCPSVSHRAQPWPHPGQSQLFADLSREELTAVMRFLTQRLGPGLVDAAQAQPSDNCIFSVELQLPPKAAALAHLDRGSPPPAREALAIVLFGGQPQPNVSELVVGPLPHPSYMRDVTVERHGGPLPYHRRPVLRAEFTQMWRHLKEVELPKAPIFLSSTFNYNGSTLAAVHATPRGLRSGDRATWMALYHNISGVGLFLHPVGLELLLDHRALDPAHWTVQQVFYLGHYYADLGQLEREFKSGRLEVVRVPLPPPNGASSLRSRNSPGPLPPLQFSPQGSQYSVQGNLVVSSLWSFTFGHGVFSGLRIFDVRFQGERIAYEVSVQECVSIYGADSPKTMLTRYLDSSFGLGRNSRGLVRGVDCPYQATMVDIHILVGKGAVQLLPGAVCVFEEAQGLPLRRHHNYLQNHFYGGLASSALVVRSVSSVGNYDYIWDFVLYPNGALEGRVHATGYINTAFLKGGEEGLLFGNRVGERVLGTVHTHAFHFKLDLDVAGLKNWVVAEDVVFKPVAAPWNPEHWLQRPQLTRQVLGKEDLTAFSLGSPLPRYLYLASNQTNAWGHQRGYRIQIHSPLGIHIPLESDMERALSWGRYQLVVTQRKEEESQSSSIYHQNDIWTPTVTFADFINNETLLGEDLVAWVTASFLHIPHAEDIPNTVTLGNRVGFLLRPYNFFDEDPSIFSPGSVYFEKGQDAGLCSINPVACLPDLAACVPDLPPFSYHGF

SEQ ID NO: 1086 - protein, 357 aa, Homo sapiens
MEEGMNVLHDFGIQSTHYLQVNYQDSQDWFILVSVIADLRNAFYVLFPIWFHLQEAVGIKLLWVAVIGDWLNLVFKWILFGQRPYWWVLDTDYYSNTSVPLIKQFPVTCETGPGSPSGHAMGTAGVYYVMVTSTLSIFQGKIKPTYRFRCLNVILWLGFWAVQLNVCLSRIYLAAHFPHQVVAGVLSGIAVAETFSHIHSIYNASLKKYFLITFFLFSFAIGFYLLLKGLGVDLLWTLEKAQRWCEQPEWVHIDTTPFASLLKNLGTLFGLGLALNSSMYRESCKGKLSKWLPFRLSSIVASLVLLHVFDSLKPPSQVELVFYVLSFCKSAVVPLASVSVIPYCLAQVLGQPHKKSL

SEQ ID NO: 1087 - protein, 963 aa, Homo sapiens
MVGCGVAVLCLWVSCGAAAGQLEYSVPEETERGVAVGNLSADLRLPAAAMSSRNFRFLSSHRELYFGVDLPSGNLVVREPADREQLCRAKAACVLTYDLVLEDPLELHKIRIHVLDTNDNSPLFPAGDVQLHIPEFLTPGARFTLPNAQDDDEGSNGILSYSLSPSQHFRLDMGSRVDGSEYPELVLEKALDREQRATHLLVLTARDGGLPARSGDAQVTIIVVDTNDNAPVFERSVYRTKVPETAPNGTVLFRVQALDPDEGSNGEVQYSLSNSTQAELRHRFHVHPKSGEVQVAASLGPPETLLEAYIEARDEGVFGLASTAKLLVEVTDVNDHAPELDFLTLSNPVPEDAAPGTVIALFSVKDEDLDSNGRVICGMSSAGPFQLTASFDNYYSLLIDGPLDREQISEYQVLITASDSGSPPLSTRRTITVSVADVNDNTPNFPQPQQELFVAENNGPGASLGRVFAQDPDLGKNGLVSYELLDVISEGPSASSLLAVESSSGAITAKTSFDFEQLRGFHFQVEGRDGGIPPRSATVTINLFVVDRNDNYPVILFPLPRNGSVPVEIVPRSARTGHLVTKVVAEDADSGSNAWLSYHISRASDSSLFRISANIGELRTARLVLPTDAVKQRVVVVVRDHGDPPLSSSVTLGVLLSNSVPQLLPDFEDVWEPGGQLSAQNLYLVIALACISFLFLGCLLFFVCTKLHQSPGCCAQSCCRSTEDLRYGSKMVSNPCMTSATIDVTTVERLSQTYLYRASLGLGSDNNSLLLRGEYNAADLRNLATGVGLNLPISCIQIRNRKGDHANVNAMPRQPNPDWRYSASLRAGMHSSVHLEEAGILRAGPGGPDQQWPTVSSATPEPEAGEVSPPVGAGVNSNSWTFKYGPGNPKQSGPGELPDKFIIPGSPAIISIRQEPTNSQIDKSDFITFGKKEETKKKKKKKKGNKTQEKKEKGNSTTDNSDQ

SEQ ID NO: 1088 - protein, 1228 aa, Homo sapiens [sequence omitted]

SEQ ID NO: 1089 - protein, 932 aa, Homo sapiens
MTNCLSFRNGRGLALLCALLGTLCETGSGQIRYSVSEELDKGSFVGNIANDLGLEPRELAERGVRIVSRGRTQLFSLNPQSGSLVTAERIDREELCAQIPLCLVKINILVEDKLKIFEVEIEIKDINDNAPNFPTEELEIKIGELTVPGTRFPIKTAFDPDVGINSLQNYKLSPNDYFSLAVNSVSEGAKYPELVLERALDREKKEIHQLVLVASDGGDPVHSGNLHIQVIVLDANDNPPMFTQPEYRVSVWENVPVGTRLLTVNATDPDEGFNAQVSYILDKMPGKIAEIFHLNSVSGEVSILKSLDYEDAMFYEIKIEAQDGPGLLSRAKILVTVLDVNDNAPEITITSLTSSVPEEGTVGREIALIDVHDRDSGQNGQVEVFVLGNLPFKLEKSIDQYYRLVTATSLDREQISEYNISLRASDGGSPPLSTETHITLHVIDINDNPPTFPHLSYSAYIPENNPRGASIFSVTAQDPDSNNNARITYALTEDTLQGAPLSSFVSINSNTGVLYALRSFDYEQFRDLKLLVTASDSGNPPLSSNVSLNLFVLDQNDNAPEILYPALPTDGSTGVELAPRSAEPGYLVTKVVAVDRDSGQNAWLSYRLLKASEPGLFSVGLHTGEVRTARALLDRDALKQSLVVAVQDHGQPPLSATVTLTVAVADRIPDILADLGSLEPSAKPNDSDLTLYLVVAVAAVSCVFLAFVIVLLALRLRRWHKSRLLQASGGGLASTPGSHFVGADGVRAFLQTYSHEVSLTADSRKSHLIFPQPNYADTLISQESCEKSEPLLITQDLLEMKGDSNLLQQAPPNTDWRFSQAQRPGTSGSQNGDDTGTWPNNQFDTEMLQAMILASASEAADGSSTLGGGAGTMGLSARYGPQFTLQHVPDYRQNVYIPGSNATLTNAAGKRDGKAPAGGNGNKKKSGKKEKK

SEQ ID NO: 1090 - protein, 840 aa, Homo sapiens
MVSVFRSEEMCLSQLFLQVEAAYCCVAELGELGLVQFKDLNMNVNSFQRKFVNEVRRCESLERILRFLEDEMQNEIVVQLLEKSPLTPLPREMITLETVLEKLEGELQEANQNQQALKQSFLELTELKYLLKKTQDFFETETNLADDFFTEDTSGLLELKAVPAYMTGKLGFIAGVINRERMASFERLLWRICRGNVYLKFSEMDAPLEDPVTKEEIQKNIFIIFYQGEQLRQKIKKICDGFRATVYPCPEPAVERREMLESVNVRLEDLITVITQTESHRQRLLQEAAANWHSWLIKVQKMKAVYHILNMCNIDVTQQCVIAEIWFPVADATRIKRALEQGMELSGSSMAPIMTTVQSKTAPPTFNRTNKFTAGFQNIVDAYGVGSYREINPAPYTIITFPFLFAVMFGDCGHGTVMLLAALWMILNERRLLSQKTDNEIWNTFFHGRYLILLMGIFSIYTGLIYNDCFSKSLNIFGSSWSVQPMFRNGTWNTHVMEESLYLQLDPAIPGVYFGNPYPFGIDPIWNLASNKLTFLNSYKMKMSVILGIVQMVFGVILSLFNHIYFRRTLNIILQFIPEMIFILCLFGYLVFMIIFKWCCFDVHVSQHAPSILIHFINMFLFNYSDSSNAPLYKHQQEVQSFFVVMALISVPWMLLIKPFILRASHRKSQLQASRIQEDATENIEGDSSSPSSRSGQRTSADTHGALDDHGEEFNFGDVFVHQAIHTIEYCLGCISNTASYLRLWALSLAHAQLSEVLWTMVMNSGLQTRGWGGIVGVFIIFAVFAVLTVAILLIMEGLSAFLHALRLHWVEFQNKFYVGDGYKFSPFSFKHILDGTAEE

SEQ ID NO: 1091 - protein, 974 aa, Homo sapiens [sequence omitted]

SEQ ID NO: 1092 - protein, 1202 aa, Homo sapiens
MMCEVMPTISEAEGPPGGGGGHGSGSPSQPDADSHFEQLMVSMLEERDRLLDTLRETQETLALTQGKLHEVGHERDSLQRQLNTALPQEFAALTKELNVCREQLLEREEEIAELKAERNNTRLLLEHLECLVSRHERSLRMTVVKRQAQSPAGVSSEVEVLKALKSLFEHHKALDEKVRERLRVALERCSLLEEELGATHKELMILKEQNNQKKTLTDGVLDINHEQENTPSTSGKRSSDGSLSHEEDLAKVIELQEIISKQSREQSQMKERLASLSSHVTELEEDLDTARKDLIKSEEMNTKLQRDVREAMAQKEDMEERITTLEKRYLAAQREATSVHDLNDKLENEIANKDSMHRQTEDKNRQLQERLELAEQKLQQTLRKAETLPEVEAELAQRVAALSKAEERHGNIEERLRQMEAQLEEKNQELQRARQREKMNEEHNKRLSDTVDKLLSESNERLQLHLKERMAALEDKNSLLREVESAKKQLEETQHDKDQLVLNIEALRAELDHMRLRGASLHHGRPHLGSVPDFRFPMADGHTDSYSTSAVLRRPQKGRLAALRDEPSKVQTLNEQDWERAQQASVLANVAQAFESDADVSDGEDDRDTLLSSVDLLSPSGQADAHTLAMMLQEQLDAINKEIRLIQEEKENTEQRAEEIESRVGSGSLDNLGRFRSMSSIPPYPASSLASSSPPGSGRSTPRRIPHSPAREVDRLGVMTLLPPSREEVRDDKTTIKCETSPPSSPRALRLDRLHKGALHTVSHEDIRDIRNSTGSQDGPVSNPSSSNSSQDSLHKAPKKKGIKSSIGRLFGKKEKGRPGQTGKEALGQAGVSETDNSSQDALGLSKLGGQAEKNRKLQKKHELLEEARRQGLPFAQWDGPTVVVWLELWVGMPAWYVAACRANVKSGAIMSALSDTEIQREIGISNPLHRLKLRLAIQEIMSLTSPSAPPTSRTTLAYGDMNHEWIGNEWLPSLGLPQYRSYFMECLVDARMLDHLTKKDLRGQLKMVDSFHRNSFQCGIMCLRRLNYDRKELERKREESQSEIKDVLVWSNDRVIRWILSIGLKEYANNLIESGVHGALLALDETFDFSALALLLQIPTQNTQARAVLEREFNNLLVMGTDRRFDEDDDKSFRRAPSWRKKFRPKDIRGLAAGSAETLPANFRVTSSMSSPSMQPKKMQMDGNVSGTQRLDSATVRTYSC

SEQ ID NO: 1093 - protein, 716 aa, Homo sapiens
MPLPEPSEQEGESVKAGQEPSPKPGTDVIPAAPRKPREFSKLVLLTASDQDEDGVGSKPQEVHCVLSLEMAGPATLASTLQILPVEEQGGVVQPALEMPEQKCSKLDAAAPQSLEFLRTPFGGRLLVLESFLYKQEKAVGDKVYWKCRQHAELGCRGRAITRGLRATVMRGHCHAPDEQGLEARRQREKLPSLALPEGLGEPQGPEGPGGRVEEPLEGVGPWQCPEEPEPTPGLVLSKPALEEEEAPRALSLLSLPPKKRSILGLGQARPLEFLRTCYGGSFLVHESFLYKREKAVGDKVYWTCRDHALHGCRSRAITQGQRVTVMRGHCHQPDMEGLEARRQQEKAVETLQAGQDGPGSQVDTLLRGVDSLLYRRGPGPLTLTRPRPRKRAKVEDQELPTQPEAPDEHQDMDADPGGPEFLKTPLGGSFLVYESFLYRREKAAGEKVYWTCRDQARMGCRSRAITQGRRVTVMRGHCHPPDLGGLEALRQREKRPNTAQRGSPGGPEFLKTPLGGSFLVYESFLYRREKAAGEKVYWTCRDQARMGCRSRAITQGRRVMVMRRHCHPPDLGGLEALRQREHFPNLAQWDSPDPLRPLEFLRTSLGGRFLVHESFLYRKEKAAGEKVYWMCRDQARLGCRSRAITQGHRIMVMRSHCHQPDLAGLEALRQRERLPTTAQQEDPEKIQVQLCFKTCSPESQQIYGDIKDVRLDGESQ

SEQ ID NO: 1094 - protein, 913 aa, Homo sapiens
MASESDTEEFYDAPEDVHLGGGYPVGSPGKVGLSTFKETENTAYKVGNESPVQELKQDVSKKIIESIIEESQKVLQLEDDSLDSKGKELSDQATASPIVARTDLSNIPGLLAIDQVLPEESQKAESQNTFEETELELKKCFPSDETCEKPVDETTKLTQTSSTEQLNVLETETEVLNKEAVEVKGGGDVLEPVSSDSLSTKDFAAVEEVAPAKPPRHLTPEPDIVASTKKPVPARPPPPTNFPPPRPPPPSRPAPPPRKRKSELEFETLKTPDIDVPKENITSDSLLTASMASESTVKDSQPSLDLASATSGDKIVTAQENGKAPDGQTVAGEVMGPQRPRSNSGRELTDEEILASVMIKNLDTGEEIPLSLAEEKLPTGINPLTLHIMRRTKEYVSNDAAQSDDEEKLQSQPTDTDGGRLKQKTTQLKKFLGKSVKRAKHLAEEYGERAINKVKSVRDEVFHTDQDDPSSSDDEGMPYTRPVKFKAAHGFKGPYDFDQIKVVQDLSGEHMGAVWTMKFSHCGRLLASAGQDNVVRIWALKNAFDYFNNMRMKYNTEGRVSPSPSQESLSSSKSDTDTGVCSGTDEDPDDKNAPFRQRPFCKYKGHTADLLDLSWSKNYFLLSSSMDKTVRLWHISRRECLCCFQHIDFVTAIAFHPRDDRYFLSGSLDGKLRLWNIPDKKVALWNEVDGQTKLITAANFCQNGKYAVIGTYDGRCIFYDTEHLKYHTQIHVRSTRGRNKVGRKITGIEPLPGENKILVTSNDSRIRLYDLRDLSLSMKYKGYVNSSSQIKASFSHDFTYLVSGSEDKYVYIWSTYHDLSKFTSVRRDRNDFWEGIKAHNAVVTSAIFAPNPSLMLSLDVQSEKSEGNEKSEDAEVLDATPSGIMKTDNTEVLLSADFTGAIKVFVNKRKNVS

SEQ ID NO: 1095 - protein, 419 aa, Homo sapiens
MASIFSKLLTGRNASLLFATMGTSVLTTGYLLNRQKVCAEVREQPRLFPPSADYPDLRKHNNCMAECLTPAIYAKLRNKVTPNGYTLDQCIQTGVDNPGHPFIKTVGMVAGDEESYEVFADLFDPVIKLRHNGYDPRVMKHTTDLDASKITQGQFDEHYVLSSRVRTGRSIRGLSLPPACTRAERREVENVAITALEGLKGDLAGRYYKLSEMTEQDQQRLIDDHFLFDKPVSPLLTCAGMARDWPDARGIWHNYDKTFLIWINEEDHTRVISMEKGGNMKRVFERFCRGLKEVERLIQERGWEFMWNERLGYILTCPSNLGTGLRAGVHVRIPKLSKDPRFSKILENLRLQKRGTGGVDTAAVADVYDISNIDRIGRSEVELVQIVIDGVNYLVDCEKKLERGQDIKVPPPLPQFGKK

SEQ ID NO: 1096 - protein, 456 aa, Homo sapiens
MTTTFLQTSSSTFGGGSTRGGSLLAGGGGFGGGSLSGGGGSRSISASSARFVSSGSGGGYGGGMRVCGFGGGAGSVFGGGFGGGVGGGFGGGFGGGDGGLLSGNEKITMQNLNDRLASYLDKVRALEEANADLEVKIHDWYQKQTPTSPECDYSQYFKTIEELRDKIMATTIDNSRVILEIDNARLAADDFRLKYENELALRQGVEADINGLRRVLDELTLARTDLEMQIEGLNEELAYLKKNHEEEMKEFSSQLAGQVNVEMDAAPGVDLTRVLAEMREQYEAMAEKNRRDVEAWFFSKTEELNKEVASNTEMIQTSKTEITDLRRTMQELEIELQSQLSMKAGLENSLAETECRYATQLQQIQGLIGGLEAQLSELRCEMEAQNQEYKMLLDIKTRLEQEIATYRSLLEGQDAKMAGIAIREASSGGGGSSSNFHINVEESVDGQVVSSHKREI

SEQ ID NO: 1097 - protein, 715 aa, Homo sapiens
MSQVMSSPLLAGGHAVSLAPCDEPRRTLHPAPSPSLPPQCSYYTTEGWGAQALMAPVPCMGPPGRLQQAPQVEAKATCFLPSPGEKALGTPEDLDSYIDFSLESLNQMILELDPTFQLLPPGTGGSQAELAQSTMSMRKKEESEALDIKYIEVTSARSRCHDGPQHCSSPSVTPPFGSLRSGGLLLSRDVPRETRSSSESLIFSGNQGRGHQRPLPPSEGLSPRPPNSPSISIPCMGSKASSPHGLGSPLVASPRLEKRLGGLAPQRGSRISVLSASPVSDVSYMFGSSQSLLHSSNSSHQSSSRSLESPANSSSSLHSLGSVSLCTRPSDFQAPRNPTLTMGQPRTPHSPPLAKEHASSCPPSITNSMVDIPIVLINGCPEPGSSPPQRTPGHQNSVQPGAASPSNPCPATRSNSQTLSDAPFTTCPEGPARDMQPTMKFVMDTSKYWFKPNITREQAIELLRKEEPGAFVIRDSSSYRGSFGLALKVQEVPASAQSRPGEDSNDLIRHFLIESSAKGVHLKGADEEPYFGSLSAFVCQHSIMALALPCKLTIPQRELGGADGASDSTDSPASCQKKSAGCHTLYLSSVSVETLTGALAVQKAISTTFERDILPTPTVVHFKVTEQGITLTDVQRKVFFRRHYPLTTLRFCGMDPEQRKWQKYCKPSWIFGFVAKSQTEPQENVCHLFAEYDMVQPASQVIGLVTALLQDAERM

SEQ ID NO: 1098 - protein, 462 aa, Homo sapiens
MASNSSSCPTPGGGHLNGYPVPPYAFFFPPMLGGLSPPGALTTLQHQLPVSGYSTPSPATIETQSSSSEEIVPSPPSPPPLPRIYKPCFVCQDKSSGYHYGVSACEGCKGFFRRSIQKNMVYTCHRDKNCIINKVTRNRCQYCRLQKCFEVGMSKESVRNDRNKKKKEVPKPECSESYTLTPEVGELIEKVRKAHQETFPALCQLGKYTTNNSSEQRVSLDIDLWDKFSELSTKCIIKTVEFAKQLPGFTTLTIADQITLLKAACLDILILRICTRYTPEQDTMTFSDGLTLNRTQMHNAGFGPLTDLVFAFANQLLPLEMDDAETGLLSAICLICGDRQDLEQPDRVDMLQEPLLEALKVYVRKRRPSRPHMFPKMLMKITDLRSISAKGAERVITLKMEIPGSMPPLIQEMLENSEGLDTLSGQPGGGGRDGGGLAPPPGSCSPSLSPSSNRSSPATHSP

SEQ ID NO: 1099 - protein, 533 aa, Homo sapiens
MTKKRIAVIGGGVSGLSSIKCCVEEGLEPVCFERTDDIGGLWRFQENPEEGRASIYKSVIINTSKEMMCFSDYPIPDHYPNFMHNAQVLEYFRMYAKEFDLLKYIRFKTTVCSVKKQPDFATSGQWEVVTESEGKKEMNVFDGVMVCTGHHTNAHLPLESFPGIEKFKGQYFHSRDYKNPEGFTGKRVIIIGIGNSGGDLAVEISQTAKQVFLSTRRGAWILNRVGDYGYPADVLFSSRLTHFIWKICGQSLANKYLEKKINQRFDHEMFGLKPKHRALSQHPTLNDDLPNRIISGLVKVKGNVKEFTETAAIFEDGSREDDIDAVIFATGYSFDFPFLEDSVKVVKNKISLYKKVFPPNLERPTLAIIGLIQPLGAIMPISELQGRWATQVFKGLKTLPSQSEMMAEISKAQEEIDKRYVESQRHTIQGDYIDTMEELADLVGVRPNLLSLAFTDPKLALHLLLGPCTPIHYRVQGPGKWDGARKAILTTDDRIRKPLMTRVVERSSSMTSTMTIGKFMLALAFFAIIIAYF

SEQ ID NO: 1100 - protein, 272 aa, Homo sapiens
MGNTTSDRVSGERHGAKAARSEGAGGHAPGKEHKIMVGSTDDPSVFSLPDSKLPGDKEFVSWQQDLEDSVKPTQQARPTVIRWSEGGKEVFISGSFNNWSTKIPLIKSHNDFVAILDLPEGEHQYKFFVDGQWVHDPSEPVVTSQLGTINNLIHVKKSDFEVFDALKLDSMESSETSCRDLSSSPPGPYGQEMYAFRSEERFKSPPILPPHLLQVILNKDTNISCDPALLPEPNHVMLNHLYALSIKDSVMVLSATHRYKKKYVTTLLYKPI

SEQ ID NO: 1101 - protein, 706 aa, Homo sapiens
MALPSPQVLMGLPALLMGPAQHTSWPCGSAVPTLKSMVTFEDVAVYFSQEEWELLDAAQRHLYHSVMLENLELVTSLGSWHGVEGEGAHPKQNVSVEVLQVRIPNADPSTKKANSCDMCGPFLKDILHLAEHQGTQSEEKPYTCGACGRDFWLNANLHQHQKEHSGGKPFRWYKDRDALMKSSKVHLSENPFTCREGGKVILGSCDLLQLQAVDSGQKPYSNLGQLPEVCTTQKLFECSNCGKAFLKSSTLPNHLRTHSEEIPFTCPTGGNFLEEKSILGNKKFHTGEIPHVCKECGKAFSHSSKLRKHQKFHTEVKYYECIACGKTFNHKLTFVHHQRIHSGERPYECDECGKAFSNRSHLIRHEKVHTGERPFECLKCGRAFSQSSNFLRHQKVHTQVRPYECSQCGKSFSRSSALIQHWRVHTGERPYECSECGRAFNNNSNLAQHQKVHTGERPFECSECGRDFSQSSHLLRHQKVHTGERPFECCDCGKAFSNSSTLIQHQKVHTGQRPYECSECRKSFSRSSSLIQHWRIHTGEKPYECSECGKAFAHSSTLIEHWRVHTKERPYECNECGKFFSQNSILIKHQKVHTGEKPYKCSECGKFFSRKSSLICHWRVHTGERPYECSECGRAFSSNSHLVRHQRVHTQERPYECIQCGKAFSERSTLVRHQKVHTRERTYECSQCGKLFSHLCNLAQHKKIHT

SEQ ID NO: 1102 - protein, 922 aa, Homo sapiens
MISLKVCGFIQIWSQKTGMTKLKEALIETVQRQKEIKLVVTFKSGKFIRIFQLSNNIRSVVLRHCKKRQSHLRLTLKNNVFLFIDKLSYRDAKQLNMFLDIIHQNKSQQPMKSDDDWSVFESRNMLKEIDKTSFYSICNKPSYQKMPLFMSKSPTHVKKGILENQGGKGQNTLSSDVQTNEDILKEDNPVPNKKYKTDSLKYIQSNRKNPSSLEDLEKDRDLKLGPSFNTNCNGNPNLDETVLATQTLNAKNGLTSPLEPEHSQGDPRCNKAQVPLDSHSQQLQQGFPNLGNTCYMNAVLQSLFAIPSFADDLLTQGVPWEYIPFEALIMTLTQLLALKDFCSTKIKRELLGNVKKVISAVAEIFSGNMQNDAHEFLGQCLDQLKEDMEKLNATLNTGKECGDENSSPQMHVGSAATKVFVCPVVANFEFELQLSLICKACGHAVLKVEPNNYLSINLHQETKPLPLSIQNSLDLFFKEEELEYNCQMCKQKSCVARHTFSRLSRVLIIHLKRYSFNNAWLLVKNNEQVYIPKSLSLSSYCNESTKPPLPLSSSAPVGKCEVLEVSQEMISEINSPLTPSMKLTSESSDSLVLPVEPDKNADLQRFQRDCGDASQEQHQRDLENGSALESELVHFRDRAIGEKELPVADSLMDQGDISLPVMYEDGGKLISSPDTRLVEVHLQEVPQHPELQKYEKTNTFVEFNFDSVTESTNGFYDCKENRIPEGSQGMAEQLQQCIEESIIDEFLQQAPPPGVRKLDAQEHTEETLNQSTELRLQKADLNHLGALGSDNPGNKNILDAENTRGEAKELTRNVKMGDPLQAYRLISVVSHIGSSPNSGHYISDVYDFQKQAWFTYNDLCVSEISETKMQEARLHSGYIFFYMHNGIFEELLRKAENSRLPSTQAGVIPQGEYEGDSLYRPA

SEQ ID NO: 1103 - protein, 802 aa, Homo sapiens
MAARGRRAWLSVLLGLVLGFVLASRLVLPRASELKRAGPRRRASPEGCRSGQAAASQAGGARGDARGAQLWPPGSDPDGGPRDRNFLFVGVMTAQKYLQTRAVAAYRTWSKTIPGKVQFFSSEGSDTSVPIPVVPLRGVDDSYPPQKKSFMMLKYMHDHYLDKYEWFMRADDDVYIKGDRLENFLRSLNSSEPLFLGQTGLGTTEEMGKLALEPGENFCMGGPGVIMSREVLRRMVPHIGKCLREMYTTHEDVEVGRCVRRFAGVQCVWSYEMQQLFYENYEQNKKGYIRDLHNSKIHQAITLHPNKNPPYQYRLHSYMLSRKISELRHRTIQLHREIVLMSKYSNTEIHKEDLQLGIPPSFMRFQPRQREEILEWEFLTGKYLYSAVDGQPPRRGMDSAQREALDDIVMQVMEMINANAKTRGRIIDFKEIQYGYRRVNPMYGAEYILDLLLLYKKHKGKKMTVPVRRHAYLQQTFSKIQFVEHEELDAQELAKRINQESGSLSFLSNSLKKLVPFQLPGSKSEHKEPKDKKINILIPLSGRFDMFVRFMGNFEKTCLIPNQNVKLVVLLFNSDSNPDKAKQVELMRDYRIKYPKADMQILPVSGEFSRALALEVGSSQFNNESLLFFCDVDLVFTTEFLQRCRANTVLGQQIYFPIIFSQYDPKIVYSGKVPSDNHFAFTQKTGFWRNYGFGITCIYKGDLVRVGGFDVSIQGWGLEDVDLFNKVVQAGLKTFRSQEVGVVHVHHPVFCDPNLDPKQYKMCLGSKASTYGSTQQLAEMWLEKNDPSYSKSSNNNGSVRTA

SEQ ID NO: 1104 - protein, 1080 aa, Homo sapiens
MPAKGRYFLNEGEEGPDQDALYEKYQLTSQHGPLLLTLLLVAATACVALIIIAFSQGDPSRHQAILGMAFLVLAVFAALSVLMYVECLLRRWLRALALLTWACLVALGYVLVFDAWTKAACAWEQVPFFLFIVFVVYTLLPFSMRGAVAVGAVSTASHLLVLGSLMGGFTTPSVRVGLQLLANAVIFLCGNLTGAFHKHQMQDASRDLFTYTVKCIQIRRKLRIEKRQQENLLLSVLPAHISMGMKLAIIERLKEHGDRRCMPDNNFHSLYVKRHQNVSILYADIVGFTQLASDCSPKELVVVLNELFGKFDQIAKANECMRIKILGDCYYCVSGLPVSLPTHARNCVKMGLDMCQAIKQVREATGVDINMRVGIHSGNVLCGVIGLRKWQYDVWSHDVSLANRMEAAGVPGRVHITEATLKHLDKAYEVEDGHGQQRDPYLKEMNIRTYLVIDPRSQQPPPPSQHLPRPKGDAALKMRASVRMTRYLESWGAARPFAHLNHRESVSSGETHVPNGRRPKSVPQRHRRTPDRSMSPKGRSEDDSYDDEMLSAIEGLSSTRPCCSKSDDFYTFGSIFLEKGFEREYRLAPIPRARHDFACASLIFVCILLVHVLLMPRTAALGVSFGLVACVLGLVLGLCFATKFSRCCPARGTLCTISERVETQPLLRLTLAVLTIGSLLTVAIINLPLMPFQVPELPVGNETGLLAASSKTRALCEPLPYYTCSCVLGFIACSVFLRMSLEPKVVLLTVALVAYLVLFNLSPCWQWDCCGQGLGNLTKPNGTTSGTPSCSWKDLKTMTNFYLVLFYITLLTLSRQIDYYCRLDCLWKKKFKKEHEEFETMENVNRLLLENVLPAHVAAHFIGDKLNEDWYHQSYDCVCVMFASVPDFKVFYTECDVNKEGLECLRLLNEIIADFDELLLKPKFSGVEKIKTIGSTYMAAAGLSVASGHENQELERQHAHIGVMVEFSIALMSKLDGINRHSFNSFRLRVGINHGPVIAGVIGARKPQYDIWGNTVNVASRMESTGELGKIQVTEETCTILQGLGYSCECRGLINVKGKGELRTYFVCTDTAKFQGLGLN

SEQ ID NO: 1105 - protein, 686 aa, Homo sapiens
MTDALLPAAPQPLEKENDGYFRKGCNPLAQTGRSKLQNQRAALNQQILKAVRMRTGAENLLKVATNSKVREQVRLELSFVNSDLQMLKEELEGLNISVGVYQNTEEAFTIPLIPLGLKETKDVDFAVVLKDFILEHYSEDGYLYEDEIADLMDLRQACRTPSRDEAGVELLMTYFIQLGFVESRFFPPTRQMGLLFTWYDSLTGVPVSQQNLLLEKASVLFNTGALYTQIGTRCDRQTQAGLESAIDAFQRAAGVLNYLKDTFTHTPSYDMSPAMLSVLVKMMLAQAQESVFEKISLPGIRNEFFMLVKVAQEAAKVGEVYQQLHAAMSQAPVKENIPYSWASLACVKAHHYAALAHYFTAILLIDHQVKPGTDLDHQEKCLSQLYDHMPEGLTPLATLKNDQQRRQLGKSHLRRAMAHHEESVREASLCKKLRSIEVLQKVLCAAQERSRLTYAQHQEEDDLLNLIDAPSVVAKTEQEVDIILPQFSKLTVTDFFQKLGPLSVFSANKRWTPPRSIRFTAEEGDLGFTLRGNAPVQVHFLDPYCSASVAGAREGDYIVSIQLVDCKWLTLSEVMKLLKSFGEDEIEMKVVSLLDSTSSMHNKSATYSVGMQKTYSMICLAIDDDDKTDKTKKISKKLSFLSWGTNKNRQKSASTLCLPSVGAARPQVKKKLPSPFSLLNSDSSWY

SEQ ID NO: 1106 - protein, 417 aa, Homo sapiens
MPLYEGLGSGGEKTAVVIDLGEAFTKCGFAGETGPRCIIPSVIKRAGMPKPVRVVQYNINTEELYSYLKEFIHILYFRHLLVNPRDRRVVIIESVLCPSHFRETLTRVLFKYFEVPSVLLAPSHLMALLTLGINSAMVLDCGYRESLVLPIYEGIPVLNCWGALPLGGKALHKELETQLLEQCTVDTSVAKEQSLPSVMGSVPEGVLEDIKARTCFVSDLKRGLKIQAAKFNIDGNNERPSPPPNVDYPLDGEKILHILGSIRDSVVEILFEQDNEEQSVATLILDSLIQCPIDTRKQLAENLVVIGGTSMLPGFLHRLLAEIRYLVEKPKYKKALGTKTFRIHTPPAKANCVAWLGGAIFGALQDILGSRSVSKEYYNQTGRIPDWCSLNNPPLEMMFDVGKTQPPLMKRAFSTEK

SEQ ID NO: 1107 - protein, 430 aa, Homo sapiens
MAWTFECSRTTSPEPLSTSPCRTTSSRNSPTMSCPASVACEPSTSTTTSSPPKLSVAPQFLPRSLRVADLAANQVMEIFPLTFGEKPALRSVYLHNNQLSNAGLPPDAFRGSEAIATLSLSNNQLSYLPPSLPPSLERLHLQNNLISKVPRGALSRQTQLRELYLQHNQLTDSGLDATTFSKLHSLEYLDLSHNQLTTVPAGLPRTLAILHLGRNRIRQVEAARLHGARGLRYLLLQHNQLGSSGLPAGALRPLRGLHTLHLYGNGLDRVPPALPRRLRALVLPHNHVAALGARDLVATPGLTELNLAYNRLASARVHHRAFRRLRALRSLDLAGNQLTRLPMGLPTGLRTLQLQRNQLRMLEPEPLAGLDQLRELSLAHNRLRVGDIGPGTWHELQALQVRHRLVSHTVPRAPPSPCLPCHVPNILVSW

SEQ ID NO: 1108 - protein, 742 aa, Homo sapiens
MPCCSHRSCREDPGTSESREMDPVAFEDVAVNFTQEEWTLLDISQKNLFREVMLETFRNLTSIGKKWSDQNIEYEYQNPRRSFRSLIEEKVNEIKEDSHCGETFTQVPDDRLNFQEKKASPEVKSCDSFVCAEVGIGNSSFNMSIRGDTGHKAYEYQEYGPKPYKCQQPKNKKAFRYRPSIRTQERDHTGEKPYACKVCGKTFIFHSSIRRHMVMHSGDGTYKCKFCGKAFHSFSLYLIHERTHTGEKPYECKQCGKSFTYSATLQIHERTHTGEKPYECSKCDKAFHSSSSYHRHERSHMGEKPYQCKECGKAFAYTSSLRRHERTHSGKKPYECKQYGEGLSYLISFQTHIRMNSGERPYKCKICGKGFYSAKSFQTHEKTHTGEKRYKCKQCGKAFNLSSSFRYHERIHTGEKPYECKQCGKAFRSASQLRVHGGTHTGEKPYECKECGKAFRSTSHLRVHGRTHTGEKPYECKECGKAFRYVKHLQIHERTEKHIRMPSGERPYKCSICEKGFYSAKSFQTHEKTHTGEKPYECNQCGKAFRCCNSLRYHERTHTGEKPYECKQCGKAFRSASHLRMHERTHTGEKPYECKQCGKAFSCASNLRKHGRTHTGEKPYECKQCGKAFRSASNLQMHERTHTGEKPYECKECEKAFCKFSSFQIHERKHRGEKPYECKHCGNGFTSAKILQIHARTHIGEKHYECKECGKAFNYFSSLHIHARTHMGEKPYECKDCGKAFS

SEQ ID NO: 1109 - protein, 989 aa, Homo sapiens
MEPPAAKRSRGCPAGPEERDAGAGAARGRGRPEALLDLSAKRVAESWAFEQVEERFSRVPEPVQKRIVFWSFPRSEREICMYSSLGYPPPEGEHDARVPFTRGLHLLQSGAVDRVLQVGFHLSGNIREPGSPGEPERLYHVSISFDRCKITSVSCGCDNRDLFYCAHVVALSLYRIRHAHQVELRLPISETLSQMNRDQLQKFVQYLISAHHTEVLPTAQRLADEILLLGSEINLVNGAPDPTAGAGIEDANCWHLDEEQIQEQVKQLLSNGGYYGASQQLRSMFSKVREMLRMRDSNGARMLILMTEQFLQDTRLALWRQQGAGMTDKCRQLWDELGALWVCVVLSPHCKPEERAGWLQLLSRWDKLDVCPLEEGNYSFDGPSLQPTMAPAPELLQKGSTCITNTEGWVGHPLDPIGCLCRALLEACRLEEETLTLYPDSGPEKRKVAYQHVPVPGSPGESYLVLALEVALLGLGQQRALPEGLYAQDKVVRNEEQLLALLEEVELDERLVQVLRKQAGLLLEGGPFSGFGEVLFRESVPMHTCARYLFTALLPHDPDLAYRLALRAMRLPILETAFPAGEPHPSPLDSIMSNRFPRWFILGHLETRQCELASTMLTAAKGDPKWLHTVLGSIQQNIHSPALLFKLAQDACKTATPVSAPPDTTLLGIALELGLQVMRMTLNVMTWRRREMVRWLVSCATEIGPQALMNIMQNWYSLFTPVEAATIVAVTGTTHATLLRLQLDTSRREELWACARTLALQCAMKDPQNCALPALTLCEKNHSAFEAAYQIVLDAAAGGLGHAHLFTVARYMEHRGLPLRAYKLATLALAQLSIAFNQDSHPAVNDVLWACSLSHSLGRHELSAIVPLIIRSIHCAPMLSDILRRWTLSAPGLGPLGARRAAKPLGADRAPLCQLLDAAVTAYITTSHSRLTHISPRHYGDFIEFLGKARETFLLAPDGHLQFSQFLENLKQTYKGKKKLMLLVRERFG

SEQ ID NO: 1110 - protein, 637 aa, Homo sapiens
MTKRKKLRTSGEGLCPPKPLKNPRLGDFYGDPQSSMLGCLHHPEEPEGKLGPVPSTQQHGEEPGKAVSSSPDEETGSPCRLLRQPEKEPAPLPPSQNSFGRFVPQFAKSRKTVTRKEEMKDEDRGSGAFSLETIAESSAQSPGCQLLVETLGVPLQEATELGDPTQADSARPEQSSQSPVQAVPGSGDSQPDDPPDRGTGLSASQRASQDHLSEQGADDSKPETDRVPGDGGQKEHLPSIDSEGEKPDRGAPQEGGAQRTAGAGLPGGPQEEGDGVPCTPASAPTSGPAPGLGPASWCLEPGSVAQGSPDPQQTPSRMGREGEGTHSSLGCSSLGMVVIADLSTDPTELEERALEVAGPDGQASAISPASPRRKAADGGHRRALPGCTSLTGETTGESGEAGQDGKPPGDVLVGPTASLALAPGSGESMMGAGDSGHASPDTGPCVNQKQEPGPAQEEAELGGQNLERDLEGFRVSPQASVVLEHREIADDPLQEPGAQQGIPDTTSELAGQRDHLPHSADQGTWADSLAVELDFLLDSQIQDALDASDFEAPPEQLFPSGNKPGPCWPGPSSHANGDPVAVAKAQPSRLIMGTHRDLEAFKRLNYRKTKLGGKAPLPYPSKGPGNIPRGDPPWREL

SEQ ID NO: 1111 - protein, 1490 aa, Homo sapiens
MAGNSLVLPIVLWGRKAPTHCISAVLLTDDGATIVTGCHDGQICLWDLSVELQINPRALLFGHTASITCLSKACASSDKQYIVSASESGEMCLWDVSDGRCIEFTKLACTHTGIQFYQFSVGNQREGRLLCHGHYPEILVVDATSLEVLYSLVSKISPDWISSMSIIRSHRTQEDTVVALSVTGILKVWIVTSEISDMQDTEPIFEEESKPIYCQNCQSISFCAFTQRSLLVVCSKYWRVFDAGDYSLLCSGPSENGQTWTGGDFVSSDKVIIWTENGQSYIYKLPASCLPASDSFRSDVGKAVENLIPPVQHILLDRKDKELLICPPVTRFFYGCREYFHKLLIQGDSSGRLNIWNISDTADKQGSEEGLAMTTSISLQEAFDKLNPCPAGIIDQLSVIPNSNEPLKVTASVYIPAHGRLVCGREDGSIVIVPATQTAIVQLLQGEHMLRRGWPPHRTLRGHRNKVTCLLYPHQVSARYDQRYLISGGVDFSVIIWDIFSGEMKHIFCVHGGEITQLLVPPENCSARVQHCICSVASDHSVGLLSLREKKCIMLASRHLFPIQVIKWRPSDDYLVVGCSDGSVYVWQMDTGALDRCVMGITAVEILNACDEAVPAAVDSLSHPAVNLKQAMTRRSLAALKNMAHHKLQTLATNLLASEASDKGNLPKYSHNSLMVQAIKTNLTDPDIHVLFFDVEALIIQLLTEEASRPNTALISPENLQKASGSSDKGGSFLTGKRAAVLFQQVKETIKENIKEHLLDDEEEDEEIMRQRREESDPEYRSSKSKPLTLLEYNLTMDTAKLFMSCLHAWGLNEVLDEVCLDRLGMLKPHCTVSFGLLSRGGHMSLMLPGYNQPACKLSHGKTEVGRKLPASEGVGKGTYGVSRAVTTQHLLSIISLANTLMSMTNATFIGDHMKKGPTRPPRPSTPDLSKARGSPPTSSNIVQGQIKQVAAPVVSARSDADHSGSDPPSAPALHTCFLVNEGWSQLAAMHCVMLPDLLGLDKFRPPLLEMLARRWQDRCLEVREAAQALLLAELRRIEQAGRKEAIDAWAPYLPQYIDHVISPGVTSEAAQTITTAPDASGPEAKVQEEEHDLVDDDITTGCLSSVPQMKKISTSYEERRKQATAIVLLGVIGAEFGAEIEPPKLLTRPRSSSQIPEGFGLTSGGSNYSLARHTCKALTFLLLQPPSPKLPPHSTIRRTAIDLIGRGFTVWEPYMDVSAVLMGLLELCADAEKQLANITMGLPLSPAADSARSARHALSLIATARPPAFITTIAKEVHRHTALAANTQSQQNMHTTTLARAKGEILRVIEILIEKMPTDVVDLLVEVMDIIMYCLEGSLVKKKGLQECFPAICRFYMVSYYERNHRIAVGARHGSVALYDIRTGKCQTIHGHKGPITAVAFAPDGRYLATYSNTDSHISFWQMNTSLLGSIGMLNSAPQLRCIKTYQVPPVQPASPGSHNALKLARLIWTSNRNVILMAHDGKEHRFMV

SEQ ID NO: 1112 - protein, 1105 aa, Homo sapiens
MAAAAGGGGPGTAVGATGSGIAAAAAGLAVYRRKDGGPATKFWESPETVSQLDSVRVWLGKHYKKYVHADAPTNKTLAGLVVQLLQFQEDAFGKHVTNPAFTKLPAKCFMDFKAGGALCHILGAAYKYKNEQGWRRFDLQNPSRMDRNVEMFMNIEKTLVQNNCLTRPNIYLIPDIDLKLANKLKDIIKRHQGTFTDEKSKASHHIYPYSSSQDDEEWLRPVMRKEKQVLVHWGFYPDSYDTWVHSNDVDAEIEDPPIPEKPWKVHVKWILDTDIFNEWMNEEDYEVDENRKPVSFRQRISTKNEEPVRSPERRDRKASANARKRKHSPSPPPPTPTESRKKSGKKGQASLYGKRRSQKEEDEQEDLTKDMEDPTPVPNIEEVVLPKNVNLKKDSENTPVKGGTVADLDEQDEETVTAGGKEDEDPAKGDQSRSVDLGEDNVTEQTNHIIIPSYASWFDYNCIHVIERRALPEFFNGKNKSKTPEIYLAYRNFMIDTYRLNPQEYLTSTACRRNLTGDVCAVMRVHAFLEQWGLVNYQVDPESRPMAMGPPPTPHFNVLADTPSGLVPLHLRSPQVPAAQQMLNFPEKNKEKPVDLQNFGLRTDIYSKKTLAKSKGASAGREWTEQETLLLLEALEMYKDDWNKVSEHVGSRTQDECILHFLRLPIEDPYLENSDASLGPLAYQPVPFSQSGNPVMSTVAFLASVVDPRVASAAAKAALEEFSRVREEVPLELVEAHVKKVQEAARASGKVDPTYGLESSCIAGTGPDEPEKLEGAEEEKMEADPDGQQPEKAENKVENETDEGDKAQDGENEKNSEKEQDSEVSEDTKSEEKETEENKELTDTCKERESDTGKKKVEHEISEGNVATAAAAALASAATKAKHLAAVEERKIKSLVALLVETQMKKLEIKLRHFEELETIMDREKEALEQQRQQLLTERQNFHMEQLKYAELRARQQMEQQQHGQNPQQAHQHSGGPGLAPLGAAGHPGMMPHQQPPPYPLMHHQMPPPHPPQPGQIPGPGSMMPGQHMPGRMIPTVAANIHPSGSGPTPPGMPPMPGNILGPRVPLTAPNGMYPPPPQQQPPPPPPADGVPPPPAPGPPASAAP

SEQ ID NO: 1113 - protein, 632 aa, Homo sapiens
MTAEKALPLGNGKAAEEARESEAPGGGCSSGGAAPARHPRVKRDKAVHERGHWNNKVEFVLSVAGEIIGLGNVWRFPYLCYKNGGGAFLIPYVVFFICCGIPVFFLETALGQFTSEGGITCWRKVCPLFEGIGYATQVIEAHLNVYYIIILAWAIFYLSNCFTTELPWATCGHEWNTENCVEFQKLNVSNYSHVSLQNATSPVMEFWEHRVLAISDGIEHIGNLRWELALCLLAAWTICYFCIWKGTKSTGKVVYVTATFPYIMLLILLIRGVTLPGASEGIKFYLYPDLSRLSDPQVWVDAGTQIFFSYAICLGCLTALGSYNNYNNNCYRDCIMLCCLNSGTSFVAGFAIFSVLGFMAYEQGVPIAEVAESGPGLAFIAYPKAVTMMPLSPLWATLFFMMLIFLGLDSQFVCVESLVTAVVDMYPKVFRRGYRRELLILALSVISYFLGLVMLTEGGMYIFQLFDSYAASGMCLLFVAIFECICIGWVYGSNRFYDNIEDMIGYRPPSLIKWCWMIMTPGICAGIFIFFLIKYKPLKYNNIYTYPAWGYGIGWLMALSSMLCIPLWICITVWKTEGTLPEKLQKLTTPSTDLKMRGKLGVSPRMVTVNDCDAKLKSDGTIAAITEKETHF

SEQ ID NO: 1114 - protein, 1887 aa, Homo sapiens
MAARGRGLLLLTLSVLLAAGPSAAAAKLNIPKVLLPFTRATRVNFTLEASEGCYRWLSTRPEVASIEPLGLDEQQCSQKAVVQARLTQPARLTSIIFAEDITTGQVLRCDAIVDLIHDIQIVSTTRELYLEDSPLELKIQALDSEGNTFSTLAGLVFEWTIVKDSEADRFSDSHNALRILTFLESTYIPPSYISEMEKAAKQGDTILVSGMKTGSSKLKARIQEAVYKNVRPAEVRLLILENILLNPAYDVYLMVGTSIHYKVQKIRQGKITELSMPSDQYELQLQNSIPGPEGDPARPVAVLAQDTSMVTALQLGQSSLVLGHRSIRMQGASRLPNSTIYVVEPGYLGFTVHPGDRWVLETGRLYEITIEVFDKFSNKVYVSDNIRIETVLPAEFFEVLSSSQNGSYHRIRALKRGQTAIDAALTSVVDQDGGVHILQVPVWNQQEVEIHIPITLYPSILTFPWQPKTGAYQYTIRAHGGSGNFSWSSSSHLVATVTVKGVMTTGSDIGFSVIQAHDVQNPLHFGEMKVYVIEPHSMEFAPCQVEARVGQALELPLRISGLMPGGASEVVTLSDCSHFDLAVEVENQGVFQPLPGRLPPGSEHCSGIRVKAEAQGSTTLLVSYRHGHVHLSAKITIAAYLPLKAVDPSSVALVTLGSSKEMLFEGGPRPWILEPSKFFQNVTAEDTDSIGLALFAPHSSRNYQQHWILVTCQALGEQVIALSVGNKPSLTNPFPAVEPAVVKFVCAPPSRLTLAPVYTSPQLDMSCPLLQQNKQVVPVSSHRNPRLDLAAYDQEGRRFDNFSSLSIQWESTRPVLASIEPELPMQLVSQDDESGQKKLHGLQAILVHEASGTTAITATATGYQESHLSSARTKQPHDPLVPLSASIELILVEDVRVSPEEVTIYNHPGIQAELRIREGSGYFFLNTSTADVVKVAYQEARGVAMVHPLLPGSSTIMIHDLCLVFPAPAKAVVYVSDIQELYIRVVDKVEIGKTVKAYVRVLDLHKKPFLAKYFPFMDLKLRAASPIITLVALDEALDNYTITFLIRGVAIGQTSLTASVTNKAGQRINSAPQQIEVFPPFRLMPRKVTLLIGATMQVTSEGGPQPQSNILFSISNESVALVSAAGLVQGLAIGNGTVSGLVQAVDAETGKVVIISQDLVQVEVLLLRAVRIRAPIMRMRTGTQMPIYVTGITNHQNPFSFGNAVPGLTFHWSVTKRDVLDLRGRHHEASIRLPSQYNFAMNVLGRVKGRTGLRVVVKAVDPTSGQLYGLARELSDEIQVQVFEKLQLLNPEIEAEQILMSPNSYIKLQTNRDGAASLSYRVLDGPEKVPVVHVDEKGFLASGSMIGTSTIEVIAQEPFGANQTIIVAVKVSPVSYLRVSMSPVLHTQNKEALVAVPLGMTVTFTVHFHDNSGDVFHAHSSVLNFATNRDDFVQIGKGPTNNTCVVRTVSVGLTLLRVWDAEHPGLSDFMPLPVLQAISPELSGAMVVGDVLCLATVLTSLEGLSGTWSSSANSILHIDPKTGVAVARAVGSVTVYYEVAGHLRTYKEVVVSVPQRIMARHLHPIQTSFQEATASKVIVAVGDRSSNLRGECTPTQREVIQALHPETLISCQSQFKPAVFDFPSQDVFTVEPQFDTALGQYFCSITMHRLTDKQRKHLSMKKTALVVSASLSSSHFSTEQVGAEVPFSPGLFADQAEILLSNHYTSSEIRVFGAPEVLENLEVKSGSPAVLAFAKEKSFGWPSFITYTVGVLDPAAGSQGPLSTTLTFSSPVTNQAIAIPVTVAFVVDRRGPGPYGASLFQHFLDSYQVMFFTLFALLAGTAVMIIAYHTVCTPRDLAVPAALTPRASPGHSPHYFAASSPTSPNALPPARKASPPSGLWSPAYASH

SEQ ID NO: 1115 - protein, 1053 aa, Homo sapiens
MWQPRRPWPRVPWRWALALLALVGAGLCHAGPQPGYPARPSARNKNWCAYIVNKNVSCSVLEGSESFIQAQYNCAWNQMPCPSALVYRVNFRPRYVTRYKTVTQLEWRCCPGFRGGDCQEGPKDPVKTLRPTPARPRNSLKKATDNEPSQFSEPRKTLSPTGTAQPSWGVDPKEGPQELQEKKIQVLEEKVLRLTRTVLDLQSSLAGVSENLKHATQDDASRTRAPGLSSQHPKPDTTVSGDTETGQSPGVFNTKESGMKDIKSELAEVKDTLKNKSDKLEELDGKVKGYEGQLRQLQEAAQGPTVTMTTNELYQAYVDSKIDALREELMEGMDRKLADLKNSCEYKLTGLQQQCDDYGSSYLGVIELIGEKETSLRKEINNLRARLQEPSAQANCCDSEKNGDIGQQIKTLDQKIERVAEATRMLNGRLDNEFDRLIVPEPDVDFDAKWNELDARINVTEKNAEEHCFYIEETLRGAINGEVGDLKQLVDQKIQSLEDRLGSVLLQMTNNTGAELSPPGAAALPGVSGSGDERVMMELNHLKDKVQVVEDICLLNIQGKPHGMEGALPNREDRAVRDSLHLLKSLNDTMHRKFQETEQTIQKLQQDFSFLYSQLNHTENDVTHLQKEMSNCRAGENAGMGRFTKVGEQERTVDTLPSPQHPVAHCCSQLEERWQRLQSQVISELDACKECTQGVQREVSMVEGRVSHMEKTCSKLDSISGNLQRIKEGLNKHVSSLWNCVRQMNGTLRSHSRDISGLKNSVQQFYSHVFQISTDLQDLVKFQPSAKAPSPPPPAEAPKEPLQPEPAPPRPSGPATAEDPGRRPVLPQRPPEERPPQPPGSTGVIAETGQAGPPAGAGVSGRGLPRGVDGQTGSGTVPGAEGFAGAPGYPKSPPVASPGAPVPSLVSFSAGLTQKPFPSDGGVVLFNKVLVNDGDVYNPSTGVFTAPYDGRYLITATLTPERDAYVEAVLSVSNASVAQLHTAGYRREFLEYHRPPGALHTCGGPGAFHLIVHLKAGDAVNVVVTGGKLAHTDFDEMYSTFSGVFLYPFLSHL

SEQ ID NO: 1116 - protein, 4753 aa, Homo sapiens
MVPEERRVGLSSDETSSDSLKSWHSICVLDSKEQPLACQQKQRQFVKPVTESEQPTVLELLLAELRTLFSAVLQDSSPAAWRYLHAVLGLLPPYRELLVGHLDLLPFLEQLYCWAPWVQTHLHLDLLGAIVQAFPPDSSLLDSASHADCCPQKRRLHHRPPCPACPFVQAQWSRQQVKEELATWLRPLTLPELQRCLGIVGAQVALEEAVWLDGLSLLPLALAADIPVRYESSDTDNAEVEPVGRKETRSQLDYEVPREKAFQKSSTGFSPETSFLDSQVMTALKMERYLKKIHFLYLNVAPSRYFRPYSLMVVPPDKVNPEHYIFSPFGILHVHPVEGSETMTLGTWHHHCVLWQQLQFIPFFKYCLLRKSFTCWKKNVRLQGLHRLQKFLENHLLLAVPHFGAGLLHISRLLQELHSVSWLPQELDRCYELLDLQTALAEEKHKALRLLHRCLNLCTSILRLVHEDTYHMQQCLQERVQNCDRIRTGQGSIYLQRVQHKQLEQKLKQAEAWWLQLGKFARLVDYMICQSLISVLEEQITSFVANILQAPRQKPFLSSQLVFDDHGQLSHVPCVENMIQTLTGGLQSVKTSALQVVQSADLKTSSDSLYSEEEDEEEDSKDEFLMPKFQGQPSDAVSIFCGPNVGLVWPWKSHPIAGILEVRGCRLRGQYFPHNYKQLEEDLDNNPKIQQALNIQQVLLEGVLCKVQEFCREHHWITGIYEFLQSWGPQKLEDMRGGPIKNYVTLVSRLNVWQARVSSMPIELLTKGGLLLLSCHDVQAEMESKLNSIRKDILAHVQNECWNLSQQLMTELTDFMHIFRTINSDIHAIAQCTQKLNEANEQYVELEERMEYVRALHELIRNHFSLFSAENEALDISVRRQFGESPIPPCPPPPQPHLLHCPLLAPQLLDMWEAFQFEKSQASEFLLSKRHAIMPKLQQLMAAALAELEGLLAKALSGPFMDPTQDQRSTEHQLVSLERQFQNTVSDLSELHHAYAIFTEDETPVPLPICGTRPIVQQQRIWHLYRVISENISEWKCMAFAKFSPAMAQEKTEGWLTEAARMSTTLELHSPVLQHCMRILGEFRSYLPLLTKLGSLHPQSLNCQCLLRALGLGSLQTIELLTLGQLLTYPLLEFADRINQVWQNENERIHAQETIRRLQRYWEARQLRLLNFILHVPYEPPASERSKRQVLRSPQWEVVDKDSGTFILSDYSNLQDSIQESLQVLSKILAIEKSGDLNKIALEWVAIMHGLGALLEVWLTFQQKWIFLNKVLHEMKIQFPNADLNSRFKVMDDQYRTLMRISVADPMVLSLVVPSAERSPYFQGQQLQQLLQAGSVELEGIIMSLESVLYGVCAHFPRLFFLSDSELVALLAARLESCEAQLWVRRCFPHVHAVSFRSCPTGEKNTDDWESSPNTQTQVEALAVLGAGGEEVKLQGPLPLHPDLPKWLASLEKCLRLALVHMLQGCVAARLARGPSLGEALKQLPKQNKLYLQLYVQHWIDLVQAFPWQCVLVAEEVVWRAEMEEALLEWGTLAMVSMHMRKLEVLVNFMRAQRASQGGQSLPSVRQTSLLSALLVMAVTHRDIAQLLEQHQVSDLTDFHWVRQLKYHLGSPHIIPKSPLQSLKTIASSEPSLSPAACWIDVLGRSFLYNYEYLGPRLGPLPSLLPERPALVLLLALEEVACGTVLGPNGVGKRAIVNSLAQALGRQLVMLPCSPQIEAQCLSNYLNGALQGGAWLLLEKVHQLPPGLLSALGQRLGELHHLYAPLYQEASRNTSTIDPTQPQLLGSSFFEKHHVSVRLGYGCLLVLRALSSAVPANLHLLLRPVALALPDLRQVAELTLLGAGMRDAFQMATRLSKFFSLERELVSGPLPCRLPLLKQILEDTIRTLNVTKEEPKCQKPRSLAAIEEAALLRSPLFSILNGLHLHNLRGLLCALFPSASQVLAEPMTYKLMKPLVVEELQQVGLDPSPDILGSLEQLSQALSRASGILLLGPAGSGKTTCWHSLFKIQNRLAAMEDTSTQGCQPVEITHLYPSGLSPQEFLGWLEGSCWHHGIFPKVLRAAGQCNNMGQKRQTEESIGIQHWIICDGASNGAWLDSITCLLSELPQLSLPSGQQIARPPGTFLLMEVADTTGISPTVVGCCALVWCGGEQTWQCILSALMASLPYEYRLQHRTVAELNHMAEVLVPATLRFLTCQGVSSLLQVHGQQAVCAGVAEVTSMARILHSLLDLHLRLKEEKAPGPEDLSYSDPVAQSFRSSKSSFLNRSQVDSDDVPDKCREHLLAVSSFLFALIWGFGAHLPSRFWPIFDTFIRDSISRLSNYPEPPPSALVFDLHVSPEDGTLVPFTGQYLSSHIKGTLGTFHPSIQTERLLYVVDLLLSGGQPVLLAGEAATGKSAFVEVLVEPHHPYIYSPIHPAFSSSHLRLLLSRGIQGQTQASPQPGHHQDSKPSLLFLLEDLHLATSDPEKSCQPVLETLRQAMDGTVYAHSTLELQTLQPTVNFLATVTVPGYCERPLCPRLFRLFTVLALESMTQATLLERHVPIIQAWLERFPSVERERALARGLVRASVEAWEAVCNCFMPSPLHPHYHFSLHSVSHLLSSLQLLPNRTGSRGFVDYPNHQEHLRRVSGLRGTCLTVMMATRNVVRLWLHEAQRTFCDRLDSPRERSYCAKLLLVVAQSVFCCGPGPQHLGKDHQESEEEEEEERVPEVESEGELAQWEDFSNSNSETEEEEEPYGLQVARVSNSRDPSLTPSIGPVSRGMKESISHKIRQEKGTRASNYRLQVRRSFKTWWQKKPQMDLISPLLLPVLLLHPQEKPSDLVFSQELILGPNSETPNLYLERQWEKLEEQLATSAAQLKLSPHLARCHSMAQHVARLVRVLARPRQHGLLLSGALGTGRHTAITLASSICQAHFFHLPSGSEEAILQCLRDASWHAGMLSQPVALLVPSGVDLTTLHRLLALATSGSFPGQYTEADLDRIGEHLPRENLGVKQNIKKEMVLQRFHQQVCSHLHLFFLIGDKQAHKQLPSTLFLRLLQLATASIDRYEPWDQAALAKVAQHHLEGAQSVPLDDGSWKYPDLQASIPSVAKAMALIHLSATHYHEHLCPALPLVTPKTFLDFLDTFLMLQQQTILKIKNKAQRVQNALENLRMLIKEHGTHANLIFDLEQQLKDSGKSLSMFQQQLEQSKLLYKQQLEECRHQENLIENLARQRDALQAQREAFLEQMSKAFLEPLSQLQVADFEEIRSYRAPPESVVRVTDAMCDLFHHETGWASAKQLLCTEDFYQELVFFPKEKITDSELIKLHLILKAPGMDDAALRAVSRPAASLAAWLWAVLHYGLAHCRGLPTDLLLQQVEATLTREQARLGYYQFQAQETLEHNLALAKMVEDAQASHNCVAKTLSQAQCGQYHKWPMKAALLTPMRAWTTQLQKLKGRCMTVFGDTLLCSAAIIYLGPFPPLRRQELLDEWLALCRGFQEALGPDDVAQALKRKQKSVSIPPKNPLLATHSPFSILSLLSSESEQYQWDGNLKPQAKSAHLAGLLLRSPTHYSSCRWPLLLDPSNEALIWLDPLPLEENRSFAPALTEGRGKGLMRNQKRESKTDMKEEDDESEESNEAEDQTKEQKAEERKNEQEKEQEENEEKEEEKTESQGSKPAYETQLPSLPYLSVLSGADPELGSQLQEAAACGLPVLLTNVELGLGCEELQWLLQREQLSPPQVQPGFCLYLSTTLSLCAMEKVLGCELLKGLNVLDLGLNMEILEEQMLHEILCREYPELETRWQDLKIRALDTCKAVEAAEERLLTMLLFQNPKRQKPAKFLRNIVRAQGKLCQLRAHCEELEGQKLQEMVLWAPYRPVVWHGMAMVKALSQLQNLLPLFCMSPENWLAVTKQALDSMKPREINHGEDLASHLLQLRAHLTRQLLGSTVTALGLTQVPLVGALGALALLQATGKASELERLALWPGLAASPSTVHSKPVSDVARPAWLGPKAWHECEMLELLPPFVGLCASLAGHSSAWQAYLSLSSTVLGPAPGPGPEPLSLLQKLILWRVLRPECLAGALADFTTSLLGRPLDENTYAPTMPFKHSQATQPMLILLPPPGHPSATLHPLTVIQKLAAKYQQGQKQLQVIALGSEAWDPVSVVVSTLSQAMYEGHWLVLDNCHLMPHWPKELLQLLLELLGRAKVVADLESEQLLDQPESRNVSTVHRDFRLWLIVPAESSASLPAVLTQHSMPVFWNQSLELGHVLIDSVELAQQVLYMQPPTQALPLLLLHGLLLHRQLYGTRLQAHRGRWSQVTLTQVLQTQDQLWASLSNPRAAMQELAASVFYGGPLGDTEDREALISLTQACLSPSSGSWVQPHTPQSLLATLMPLPELRELDAMAECKAQMHLLPSPPEPRLCGLSEGPQAWLLRRQSRALLSALQRSSPVWVPESRRGAQLAERRLRQRLVQVNRRLESLQDLLTHVIRQDESDAPWSVLGPNARRPLEGVLETEALELSQLVGTLQRDLDCLLQQLKGAPPCPSRRCAAVAHALWTGRLPLPWRPHAPAGPQPPWHWLRQLSRRGQLLVRYLGVGADASSDVPERVFHLSAFRHPRRLLLALRGEAALDQNVPSSNFPGSRGSVSSQLQYKRLEMNSNPLHFRVENGPNPTVPERGLLLIGLQVLHAEWDPIAGALQDSPSSQPSPLPPVSISTQAPGTSDLPAPADLTVYSCPVYMGGPLGTAKLQSRNIVMHLPLPTKLTPNTCVQRRVHVCSPPLS

SEQ ID NO: 1117 - protein, 456 aa, Homo sapiens
MFEEPEWAEAAPVAAGLGPVISRPPPAASSQNKGSKRRQLLATLRALEAASLSQHPPSLCISDSEEEEEERKKKCPKKASFASASAEVGKKGKKKCQKQGPPCSDSEEEVERKKKCHKQALVGSDSAEDEKRKRKCQKHAPINSAQHLDNVDQTGPKAWKGSTTNDPPKQSPGSTSPKPPHTLSRKQWRNRQKNKRRCKNKFQPPQVPDQAPAEAPTEKTEVSPVPRTDSHEARAGALRARMAQRLDGARFRYLNEQLYSGPSSAAQRLFQEDPEAFLLYHRGFQSQVKKWPLQPVDRIARDLRQRPASLVVADFGCGDCRLASSIRNPVHCFDLASLDPRVTVCDMAQVPLEDESVDVAVFCLSLMGTNIRDFLEEANRVLKPGGLLKVAEVSSRFEDVRTFLRAVTKLGFKIVSKDLTNSHFFLFDFQKTGPPLVGPKAQLSGLQLQPCLYKRR

SEQ ID NO: 1118 - protein, 821 aa, Homo sapiens
MPTRVCCCCSALRPRYKRLVDNIFPEDPKDGLVKTDMEKLTFYAVSAPEKLDRIGSYLAERLSRDVVRHRSGYVLIAMEALDQLLMACHSQSIKPFVESFLHMVAKLLESGEPKLQVLGTNSFVKFANIEEDTPSYHRRYDFFVSRFSAMCHSCHSDPEIRTEIRIAGIRGIQGVVRKTVNDELRATIWEPQHMDKIVPSLLFNMQKIEEVDSRIGPPSSPSATDKEENPAVLAENCFRELLGRATFGNMNNAVRPVFAHLDHHKLWDPNEFAVHCFKIIMYSIQAQYSHHVIQEILGHLDARKKDAPRVRAGIIQVLLEAVAIAAKGSIGPTVLEVFNTLLKHLRLSVEFEANDLQGGSVGSVNLNTSSKDNDEKIVQNAIIQTIGFFGSNLPDYQRSEIMMFIMGKVPVFGTSTHTLDISQLGDLGTRRIQIMLLRSLLMVTSGYKAKTIVTALPGSFLDPLLSPSLMEDYELRQLVLEVMHNLMDRHDNRAKLRGIRIIPDVADLKIKREKICRQDTSFMKKNGQQLYRHIYLGCKEEDNVQKNYELLYTSLALITIELANEEVVIDLIRLAIALQDSAIINEDNLPMFHRCGIMALVAAYLNFVSQMIAVPAFCQHVSKVIEIRTMEAPYFLPEHIFRDKCMLPKSLEKHEKDLYFLTNKIAESLGGSGYSVERLSVPYVPQVTDEDRLSRRKSIVDTVSIQVDILSNNVPSDDVVSNTEEITFEALKKAIDTSGMEEQEKEKRRLVIEKFQKAPFEEIAAQCESKANLLHDRLAQILELTIRPPPSPSGTLTITSGHAQYQSVPVYEMKFPDLCVY

SEQ ID NO: 1119 - protein, 477 aa, Homo sapiens
MIAFLLTSVLMIPHAGGHPLDTPHLPQELPPGLPNNINITFFSGMFKNVESVAEIFDCLGPHFTWLQAVFTNFPVLIQFVNGMKCVAGLCPRDFEDYGCTCRFEMEGLPVDESDSCCFQHRRCYEEAAEMDCLQDPAKLSTEVNCVSKKIICESKDNCEHLLCTCDKAAIECLARSSLNSSLNLLDTSFCLAQTPETTIKEDLTTLLPRVVPVEPTDTSLTALSGEEAGHDQEGVGAARATSPPGSAEIVATRVTAKIVTLVPAGIKSLGLAVSSVENDPEETTEKACDRFTFLHLGSGDNMQVMPQLGEMLFCLTSRCPEEFESYGCYCGQEGRGEPRDDLDRCCLSHHCCLEQVRRLGCLLERLPWSPVVCVDHTPKCGGQSLCEKLLCACDQTAAECMTSASFNQSLKSPSRLGCPGQPAACEDSLHPVPAAPTLGSSSEEDSEEDPPQEDLGRAKRFLRKSLGPLGIGPLHGR

SEQ ID NO: 1120 - protein, 689 aa, Homo sapiens
MAVVSAVRWLGLRSRLGQPLTGRRAGLCEQARSCRFYSGSATLSKVEGTDVTGIEEVVIPKKKTWDKVAVLQALASTVNRDTTAVPYVFQDDPYLMPASSLESRSFLLAKKSGENVAKFIINSYPKYFQKDIAEPHIPCLMPEYFEPQIKDISEAALKERIELRKVKASVDMFDQLLQAGTTVSLETTNSLLDLLCYYGDQEPSTDYHFQQTGQSEALEEENDETSRRKAGHQFGVTWRAKNNAERIFSLMPEKNEHSYCTMIRGMVKHRAYEQALNLYTELLNNRLHADVYTFNALIEATVCAINEKFEEKWSKILELLRHMVAQKVKPNLQTFNTILKCLRRFHVFARSPALQVLREMKAIGIEPSLATYHHIIRLFDQPGDPLKRSSFIIYDIMNELMGKRFSPKDPDDDKFFQSAMSICSSLRDLELAYQVHGLLKTGDNWKFIGPDQHRNFYYSKFFDLICLMEQIDVTLKWYEDLIPSAYFPHSQTMIHLLQALDVANRLEVIPKIWKDSKEYGHTFRSDLREEILMLMARDKHPPELQVAFADCAADIKSAYESQPIRQTAQDWPATSLNCIAILFLRAGRTQEAWKMLGLFRKHNKIPRSELLNELMDSAKVSNSPSQAIEVVELASAFSLPICEGLTQRVMSDFAINQEQKEALSNLTALTSDSDTDSSSDSDSDTSEGK

SEQ ID NO: 1121 - protein, 659 aa, Homo sapiens
MVLGPAAYNVPLPKKSIQSGPLKISSVSEVMKESKQPASQLQKQKGDTPASATAGDTLSVPAPAVQPEESLKTDHPEIGEGKPTPALSEASSSSIRERPPEEVAARLAQQEKQEQVKIESLAKSLEDALRQTASVTLQAIAAQNAAVQAVNAHSNILKAAMDNSEIAGEKKSAQWRTVEGALKERRKAVDEAADALLKAKEELEKMKSVIENAKKKEVAGAKPHITAAEGKLHNMIVDLDNVVKKVQAAQSEAKVVSQYHELVVQARDDFKRELDSITPEVLPGWKGMSVSDLADKLSTDDLNSLIAHAHRRIDQLNRELAEQKATEKQHITLALEKQKLEEKRAFDSAVAKALEHHRSEIQAEQDRKIEEVRDAMENEMRTQLRRQAAAHTDHLRDVLRVQEQELKSEFEQNLSEKLSEQELQFRRLSQEQVDNFTLDINTAYARLRGIEQAVQSHAVAEEEARKAHQLWLSVEALKYSMKTSSAETPTIPLGSAVEAIKANCSDNEFTQALTAAIPPESLTRGVYSEETLRARFYAVQKLARRVAMIDETRNSLYQYFLSYLQSLLLFPPQQLKPPPELCPEDINTFKLLSYASYCIEHGDLELAAKFVNQLKGESRRVAQDWLKEARMTLETKQIVEILTAYASAVGIGTTQVQPE

SEQ ID NO: 1122 - protein, 170 aa, Homo sapiens
MAASAFAGAVRAASGILRPLNILASSTYRNCVKNASLISALSTGRFSHIQTPVVSSTPRLTTSERNLTCGHTSVILNRMAPVLPSVLKLPVRSLTYFSARKGKRKTVKAVIDRFLRLHCGLWVRRKAGYKKKLWKKTPARKKRLREFVFCNKTQSKLLDKMTTSFWKRRN

SEQ ID NO: 1123 - protein, 679 aa, Homo sapiens
MSNAMYNKMWHQTQEALGALLDKEPQKMIEPQRNQVFIFQTLATFYVKYVQIFRNLENVYDQFVHPQKRILIRKVLDGVMGRILELKNEMVELELTEFHYFDDILQDLKLAPQQLDIPIPKYFLKEKLEVIKGREKILAQILADSGIDTSDMKYPVKSIPFDEAVKLIQIAERARQGRLRALFMKQIYLQEYRAKQSKMLGKKVTDTWAAALRIQKVWRRFHQRKETEKLREEEMIFLGMNPPPLFNEVSATVIQAEKVDRLRNEVQIKHEEDYREALVTIKNDLKLIEGVDIKENLQDQIRHWFIECRNLTGTFPDYPDVEEGGSAIIFSDKTIQQVIEDIIANQEEEEKNKKKKKKKEKQPKKAKKQKKGTKEKNKEEDEKWKMSPSLFLPAMKEGCNAYKEIWMKKDESWNFSQDYDPELIKEEKRKELQSEIRIQVDELMRQELKNLKLAVDRERERPVKAGKKKDKKKGKKGKKKEKKAKKDKDLTADRTIESLYKELVEEGLLIQALKVNLSDYIGEYSYLGTTLRQVSIEPMPSLLDVRQLITLYGIWPLGSAAVHEKAPLVKSLLLAGPSGVGKKMLVHAICTETGANLFNLSSSNIAGKYPGKNGLQMMLHAVFKVARQLQPSVVWIEDTEKTFYKKVPNAEKMFTPSAGEVAALQKNLKRSTSRMNLNA

SEQ ID NO: 1124 - protein, 1255 aa, Homo sapiens
MNGYAEFPPSPSNPTKEPVEPQPSQVPLQEDVDMSSGSSGHETNENCSTGRDSQGSDCDDSGKELGMLVEPPDARQSPDTFSLMMAKSEHNPSTSGCSSDQSSKVDTHKELIKTLKELKVHLPADKKAKGKASTLATLKYALRSVKQVKANEEYYQLLMSSEGHPCGADVPSYTVEEMESVTSEHIVKNADMFAVAVSLVSGKILYISDQVASIFHCKRDAFSDAKFVEFLAPHDVGVFHSFTSPYKLPLWSMCSGADSFTQECMEEKSFFCRVSVRKSHENEIRYHPFRMTPYLVKVRDQQGAESQLCCLLLAERVHSGYEAPRIPPEKRIFTTTHTPNCLFQDVDERAVPLLGYLPQDLIETPVLVQLHPSDRPLMLAIHKKILQSGGQPFDYSPIRFRARNGEYITLDTSWSSFINPWSRKISFIIGRHKVRVGPLNEDVFAAHPCTEEKALHPSIQELTEQIHRLLLQPVPHSGSSGYGSLGSNGSHEHLMSQTSSSDSNGHEDSRRRRAEICKNGNKTKNRSHYSHESGEQKKKSVTEMQTNPPAEKKAVPAMEKDSLGVSFPEELACKNQPTCSYQQISCLDSVIRYLESCNEAATLKRKCEFPANVPALRSSDKRKATVSPGPHAGEAEPPSRVNSRTGVGTHLTSLALPGKAESVASLTSQCSYSSTIVHVGDKKPQPELEMVEDAASGPESLDCLAGPALACGLSQEKEPFKKLGLTKEVLAAHTQKEEQSFLQKFKEIRKLSIFQSHCHYYLQERSKGQPSERTAPGLRNTSGIDSPWKKTGKNRKLKSKRVKPRDSSESTGSGGPVSARPPLVGLNATAWSPSDTSQSSCPAVPFPAPVPAAYSLPVFPAPGTVAAPPAPPHASFTVPAVPVDLQHQFAVQPPPFPAPLAPVMAFMLPSYSFPSGTPNLPQAFFPSQPQFPSHPTLTSEMASASQPEFPSRTSIPRQPCACPATRATPPSAMGRASPPLFQSRSSSPLQLNLLQLEEAPEGGTGAMGTTGATETAAVGADCKPGTSRDQQPKAPLTRDEPSDTQNSDALSTSSGLLNLLLNEDLCSASGSAASESLGSGSLGCDASPSGAGSSDTSHTSKYFGSIDSSENNHKAKMNTGMEESEHFIKCVLQDPIWLLMADADSSVMMTYQLPSRNLEAVLKEDREKLKLLQKLQPRFTESQKQELREVHQWMQTGGLPAAIDVAECVYCENKEKGNICIPYEEDIPSLGLSEVSDTKEDENGSPLNHRIEEQT

SEQ ID NO: 1125 - protein, 1037 aa, Homo sapiens
MATESTPSEIIERERKKLLEILQHDPDSILDTLTSRRLISEEEYETLENVTDLLKKSRKLLILVQKKGEATCQHFLKCLFSTFPQSAAICGLRHEVLKHENTVPPQSMGASSNSEDAFSPGIKQPEAPEITVFFSEKEHLDLETSEFFRDKKTSYRETALSARKNEKEYDTPEVTLSYSVEKVGCEVPATITYIKDGQRYEELDDSLYLGKEEYLGSVDTPEDAEATVEEEVYDDPEHVGYDGEEDFENSETTEFSGEEPSYEGSETSLSLEEEQEKSIEERKKVFKDVLLCLNMDRSRKVLPDFVKQFSLDRGCKWTPESPGDLAWNFLMKVQARDVTARDSILSHKVLDEDSKEDLLAGVENLEIRDIQTINPLDVLCATMLCSDSSLQRQVMSNMYQCQFALPLLLPDAENNKSILMLGAMKDIVKKQSTQFSGGPTEDTEKFLTLMKMPVISFVRLGYCSFSKSRILNTLLSPAQLKLHKIFLHQDLPLLVLPRQISDGLVEITWCFPDSDDRKENPFFQKPVALANLRGNLESFWTQFGFLMEVSSAVFFFTDCLGEKEWDLLMFLGEAAIERCYFVLSSQARESEEAQIFQRILNLKPAQLLFWERGDAGDRRKNMEGLQAALQEVMFSSCLRCVSVEDMAALARELGIQVDEDFENTQRIQVSSGENMAGTAEGEGQQRHSQLKSSSKSQALMPIQEPGTQCELSQNLQNLYGTPVFRPVLENSWLFPTRIGGNFNHVSLKASWVMGRPFGSEQRPKWFHPLPFQNAGAQGRGKSFGIQSFHPQIFYSGERFMKFSRVARGCHSNGTFGRLPRPICQHVQACPERPQMMGTLERSRAVASKIGHSYSLDSQPARAVGKPWPQQACTRVTELTEATGKLIRTSHIGKPHPQSFQPAAATQKLRPASQQGVQMKTQGGASNPALQIGSHPMCKSSQFKSDQSNPSTVKHSQPKPFHSVPSQPKSSQTKSCQSQPSQTKPSPCKSTQPKPSQPWPPQSKPSQPRPPQPKSSSTNPSQAKAHHSKAGQKRGGKH

SEQ ID NO: 1126 - protein, 730 aa, Homo sapiens
MFGRKRSVSFGGFGWIDKTMLASLKVKKQELANSSDATLPDRPLSPPLTAPPTMKSSEFFEMLEKMQGIKLEEQKPGPQKNKDDYIPYPSIDEVVEKGGPYPQVILPQFGGYWIEDPENVGTPTSLGSSICEEEEEDNLSPNTFGYKLECKGEARAYRRHFLGKDHLNFYCTGSSLGNLILSVKCEEAEGIEYLRVILRSKLKTVHERIPLAGLSKLPSVPQIAKAFCDDAVGLRFNPVLYPKASQMIVSYDEHEVNNTFKFGVIYQKARQTLEEELFGNNEESPAFKEFLDLLGDTITLQDFKGFRGGLDVTHGQTGVESVYTTFRDREIMFHVSTKLPFTDGDAQQLQRKRHIGNDIVAIIFQEENTPFVPDMIASNFLHAYIVVQVETPGTETPSYKVSVTAREDVPTFGPPLPSPPVFQKGPEFREFLLTKLTNAENACCKSDKFAKLEDRTRAALLDNLHDELHAHTQAMLGLGPEEDKFENGGHGGFLESFKRAIRVRSHSMETMVGGQKKSHSGGIPGSLSGGISHNSMEVTKTTFSPPVVAATVKNQSRSPIKRRSGLFPRLHTGSEGQGDSRARCDSTSSTPKTPDGGHSSQEIKSETSSNPSSPEICPNKEKPFMKLKENGRAISRSSSSTSSVSSTAGEGEAMEEGDSGGSQPSTTSPFKQEVFVYSPSPSSESPSLGAAATPIIMSRSPTDAKSRNSPRSNLKFRFDKLSHASSGAGH

SEQ ID NO: 1127 - protein, 1328 aa, Homo sapiens
MESRDPAQPMSPGEATQSGARPADRYGLLKHSREFLDFFWDIAKPEQETRLAATEKLLEYLRGRPKGSEMKYALKRLITGLGVGRETARPCYSLALAQLLQSFEDLPLCSILQQIQEKYDLHQVKKAMLRPALFANLFGVLALFQSGRLVKDQEALMKSVKLLQALAQYQNHLQEQPRKALVDILSEVSKATLQEILPEVLKADLNIILSSPEQLELFLLAQQKVPSKLKKLVGSVNLFSDENVPRLVNVLKMAASSVKKDRKLPAIALDLLRLALKEDKFPRFWKEVVEQGLLKMQFWPASYLCFRLLGAALPLLTKEQLHLVMQGDVIRHYGEHVCTAKLPKQFKFAPEMDDYVGTFLEGCQDDPERQLAVLVAFSSVTNQGLPVTPTFWRVVRFLSPPALQGYVAWLRAMFLQPDLDSLVDFSTNNQKKAQDSSLHMPERAVFRLRKWIIFRLVSIVDSLHLEMEEALTEQVARFCLFHSFFVTKKPTSQIPETKHPFSFPLENQAREAVSSAFFSLLQTLSTQFKQAPGQTQGGQPWTYHLVQFADLLLNHSHNVTTVTPFTAQQRQAWDRMLQTLKELEAHSAEARAAAFQHLLLLVGIHLLKSPAESCDLLGDIQTCIRKSLGEKPRRSRTKTIDPQEPPWVEVLVEILLALLAQPSHLMRQVARSVFGHICSHLTPRALQLILDVLNPETSEDENDRVVVTDDSDERRLKGAEDKSEEGEDNRSSESEEESEGEESEEEERDGDVDQGFREQLMTVLQAGKALGGEDSENEEELGDEAMMALDQSLASLFAEQKLRIQARRDEKNKLQKEKALRRDFQIRVLDLVEVLVTKQPENALVLELLEPLLSIIRRSLRSSSSKQEQDLLHKTARIFTHHLCRARRYCHDLGERAGALHAQVERLVQQAGRQPDSPTALYHFNASLYLLRVLKGNTAEGCVHETQEKQKAGTDPSHMPTGPQAASCLDLNLVTRVYSTALSSFLTKRNSPLTVPMFLSLFSRHPVLCQSLLPILVQHITGPVRPRHQACLLLQKTLSMREVRSCFEDPEWKQLMGQVLAKVTENLRVLGEAQTKAQHQQALSSLELLNVLFRTCKHEKLTLDLTVLLGVLQGQQQSLQQGAHSTGSSRLHDLYWQAMKTLGVQRPKLEKKDAKEIPSATQSPISKKRKKKGFLPETKKRKKRKSEDGTPAEDGTPAATGGSQPPSMGRKKRNRTKAKVPAQANGTPTTKSPAPGAPTRSPSTPAKSPKLQKKNQKPSQVNGAPGSPTEPAGQKQHQKALPKKGVLGKSPLSALARKKARLSLVIRSPSLLQSGAKKKAQVRKAGKP

SEQ ID NO: 1128 - protein, 596 aa, Homo sapiens
MAGRRVNVNVGVLGHIDSGKTALARALSTTASTAAFDKQPQSRERGITLDLGFSCFSVPLPARLRSSLPEFQAAPEAEPEPGEPLLQVTLVDCPGHASLIRTIIGGAQIIDLMMLVIDVTKGMQTQSAECLVIGQIACQKLVVVLNKIDLLPEGKRQAAIDKMTKKMQKTLENTKFRGAPIIPVAAKPGGPEAPETEAPQGIPELIELLTSQISIPTRDPSGPFLMSVDHCFSIKGQGTVMTGTILSGSISLGDSVEIPALKVVKKVKSMQMFHMPITSAMQGDRLGICVTQFDPKLLERGLVCAPESLHTVHAALISVEKIPYFRGPLQTKAKFHITVGHETVMGRLMFFSPAPDNFDQEPILDSFNFSQEYLFQEQYLSKDLTPAVTDNDEADKKAGQATEGHCPRQQWALVEFEKPVTCPRLCLVIGSRLDADIHTNTCRLAFHGILLHGLEDRNYADSFLPRLKVYKLKHKHGLVERAMDDYSVIGRSLFKKETNIQLFVGLKVHLSTGELGIIDSAFGQSGKFKIHIPGGLSPESKKILTPALKKRARAGRGEATRQEESAERSEPSQHVVLSLTFKRYVFDTHKRMVQSP

SEQ ID NO: 1129 - protein, 291 aa, Homo sapiens
MERNSSLWKNLIDEHPVCTTWKQEAEGAIYHLASILFVVGFMGGSGFFGLLYVFSLLGLGFLCSAVWAWVDVCAADIFSWNFVLFVICFMQFVHIAYQVRSITFAREFQVLYSSLFQPLGISLPVFRTIALSSEVVTLEKEHCYAMQGKTSIDKLSLLVSGRIRVTVDGEFLHYIFPLQFLDSPEWDSLRPTEEGIFQVTLTAETDCRYVSWRRKKLYLLFAQHRYISRLFSVLIGSDIADKLYALNDRVYIGKRYHYDIRLPNFYQMSTPEIRRSPLTQHFQNSRRYCDK

SEQ ID NO: 1130 - protein, 159 aa, Homo sapiens
MKNHLLFWGVLAVFIKAVHVKAQEDERIVLVDNKCKCARITSRIIRSSEDPNEDIVERNIRIIVPLNNRENISDPTSPLRTRFVYHLSDLCKKCDPTEVELDNQIVTATQSNICDEDSATETCYTYDRNKCYTAVVPLVYGGETKMVETALTPDACYPD

SEQ ID NO: 1131 - protein, 479 aa, Homo sapiens
MVGRSRRRGAAKWAAVRAKAGPTLTDENGDDLGLPPSPGDTSYYQDQVDDFHEARSRAALAKGWNEVQSGDEEDGEEEEEEVLALDMDDEDDEDGGNAGEEEEEENADDDGGSSVQSEAEASVDPSLSWGQRKKLYYDTDYGSKSRGRQSQQEAEEEEREEEEEAQIIQRRLAQALQEDDFGVAWVEAFAKPVPQVDEAETRVVKDLAKVSVKEKLKMLRKESPELLELIEDLKVKLTEVKDELEPLLELVEQGIIPPGKGSQYLRTKYNLYLNYCSNISFYLILKARRVPAHGHPVIERLVTYRNLINKLSVVDQKLSSEIRHLLTLKDDAVKKELIPKAKSTKPKPKSVSKTSAAACAVTDLSDDSDFDEKAKLKYYKEIEDRQKLKRKKEENSTEEQALEDQNAKRAITYQIAKNRGLTPRRKKIDRNPRVKHREKFRRAKIRRRGQVREVRKEEQRYSGELSGIRAGVKKSIKLK

SEQ ID NO: 1132 - protein, 136 aa, Homo sapiens
MARTKQTARKSTGGKAPRKQLATKAARKSAPSTGGVKKPHRYRPGTVALREIRRYQKSTELLIRKLPFQRLVREIAQDFKTDLRFQSAAIGALQEASEAYLVGLFEDTNLCAIHAKRVTIMPKDIQLARRIRGERA

SEQ ID NO: 1133 - protein, 1682 aa, Homo sapiens
MHRAVDPPGARAAREAFALGGLSCAGAWSSCPPHPPPRSAWLPGGRCSASIGQPPLPAPLPPSHGSSSGHPSKPYYAPGAPTPRPLHGKLESLHGCVQALLREPAQPGLWEQLGQLYESEHDSEEATRCYHSALRYGGSFAELGPRIGRLQQAQLWNFHTGSCQHRAKVLPPLEQVWNLLHLEHKRNYGAKRGGPPVKRAAEPPVVQPVPPAALSGPSGEEGLSPGGKRRRGCNSEQTGLPPGLPLPPPPLPPPPPPPPPPPPPLPGLATSPPFQLTKPGLWSTLHGDAWGPERKGSAPPERQEQRHSLPHPYPYPAPAYTAHPPGHRLVPAAPPGPGPRPPGAESHGCLPATRPPGSDLRESRVQRSRMDSSVSPAATTACVPYAPSRPPGLPGTTTSSSSSSSSNTGLRGVEPNPGIPGADHYQTPALEVSHHGRLGPSAHSSRKPFLGAPAATPHLSLPPGPSSPPPPPCPRLLRPPPPPAWLKGPACRAAREDGEILEELFFGTEGPPRPAPPPLPHREGFLGPPASRFSVGTQDSHTPPTPPTPTTSSSNSNSGSHSSSPAGPVSFPPPPYLARSIDPLPRPPSPAQNPQDPPLVPLTLALPPAPPSSCHQNTSGSFRRPESPRPRVSFPKTPEVGPGPPPGPLSKAPQPVPPGVGELPARGPRLFDFPPTPLEDQFEEPAEFKILPDGLANIMKMLDESIRKEEEQQQHEAGVAPQPPLKEPFASLQSPFPTDTAPTTTAPAVAVTTTTTTTTTTTATQEEEKKPPPALPPPPPLAKFPPPSQPQPPPPPPPSPASLLKSLASVLEGQKYCYRGTGAAVSTRPGPLPTTQYSPGPPSGATALPPTSAAPSAQGSPQPSASSSSQFSTSGGPWARERRAGEEPVPGPMTPTQPPPPLSLPPARSESEVLEEISRACETLVERVGRSATDPADPVDTAEPADSGTERLLPPAQAKEEAGGVAAVSGSCKRRQKEHQKEHRRHRRACKDSVGRRPREGRAKAKAKVPKEKSRRVLGNLDLQSEEIQGREKSRPDLGGASKAKPPTAPAPPSAPAPSAQPTPPSASVPGKKAREEAPGPPGVSRADMLKLRSLSEGPPKELKIRLIKVESGDKETFIASEVEERRLRMADLTISHCAADVVRASRNAKVKGKFRESYLSPAQSVKPKINTEEKLPREKLNPPTPSIYLESKRDAFSPVLLQFCTDPRNPITVIRGLAGSLRLNLGLFSTKTLVEASGEHTVEVRTQVQQPSDENWDLTGTRQIWPCESSRSHTTIAKYAQYQASSFQESLQEEKESEDEESEEPDSTTGTPPSSAPDPKNHHIIKFGTNIDLSDAKRWKPQLQELLKLPAFMRVTSTGNMLSHVGHTILGMNTVQLYMKVPGSRTPGHQENNNFCSVNINIGPGDCEWFAVHEHYWETISAFCDRHGVDYLTGSWWPILDDLYASNIPVYRFVQRPGDLVWINAGTVHWVQATGWCNNIAWNVGPLTAYQYQLALERYEWNEVKNVKSIVPMIHVSWNVARTVKISDPDLFKMIKFCLLQSMKHCQVQRESLVRAGKKIAYQGRVKDEPAYYCNECDVEVFNILFVTSENGSRNTYLVHCEGCARRRSAGLQGVVVLEQYRTEELAQAYDAFTLVRARRARGQRRRALGQAAGTGFGSPAAPFPEPPPAFSPQAPASTSR

SEQ ID NO: 1134 - protein, 448 aa, Homo sapiens
MAAPTLGRLVLTHLLVALFGMGSWAAVNGIWVELPVVVKDLPEGWSLPSYLSVVVALGNLGLLVVTLWRQLAPGKGEQVPIQVVQVLSVVGTALLAPLWHHVAPVAGQLHSVAFLTLALVLAMACCTSNVTFLPFLSHLPPPFLRSFFLGQGLSALLPCVLALVQGVGRLECPPAPTNGTSGPPLDFPERFPASTFFWALTALLVTSAAAFRGLLLLLPSLPSVTTGGSGPELQLGSPGAEEEEKEEEEALPLQEPPSQAAGTIPGPDPEAHQLFSAHGAFLLGLMAFTSAVTNGVLPSVQSFSCLPYGRLAYHLAVVLGSAANPLACFLAMGVLCRSLAGLVGLSLLGMLFGAYLMALAILSPCPPLVGTTAGVVLVVLSWVLCLCVFSYVKVAASSLLHGGGRPALLAAGVAIQVGSLLGAGAMFPPTSIYHVFQSRKDCVDPCGP

SEQ ID NO: 1135 - protein, 1103 aa, Homo sapiens
MTACARRAGGLPDPGLCGPAWWAPSLPRLPRALPRLPLLLLLLLLQPPALSAVFTVGVLGPWACDPIFSRARPDLAARLAAARLNRDPGLAGGPRFEVALLPEPCRTPGSLGAVSSALARVSGLVGPVNPAACRPAELLAEEAGIALVPWGCPWTQAEGTTAPAVTPAADALYALLRAFGWARVALVTAPQDLWVEAGRSLSTALRARGLPVASVTSMEPLDLSGAREALRKVRDGPRVTAVIMVMHSVLLGGEEQRYLLEAAEELGLTDGSLVFLPFDTIHYALSPGPEALAALANSSQLRRAHDAVLTLTRHCPSEGSVLDSLRRAQERRELPSDLNLQQVSPLFGTIYDAVFLLARGVAEARAAAGGRWVSGAAVARHIRDAQVPGFCGDLGGDEEPPFVLLDTDAAGDRLFATYMLDPARGSFLSAGTRMHFPRGGSAPGPDPSCWFDPNNICGGGLEPGLVFLGFLLVVGMGLAGAFLAHYVRHRLLHMQMVSGPNKIILTVDDITFLHPHGGTSRKVAQGSRSSLGARSMSDIRSGPSQHLDSPNIGVYEGDRVWLKKFPGDQHIAIRPATKTAFSKLQELRHENVALYLGLFLARGAEGPAALWEGNLAVVSEHCTRGSLQDLLAQREIKLDWMFKSSLLLDLIKGIRYLHHRGVAHGRLKSRNCIVDGRFVLKITDHGHGRLLEAQKVLPEPPRAEDQLWTAPELLRDPALERRGTLAGDVFSLAIIMQEVVCRSAPYAMLELTPEEVVQRVRSPPPLCRPLVSMDQAPVECILLMKQCWAEQPELRPSMDHTFDLFKNINKGRKTNIIDSMLRMLEQYSSNLEDLIRERTEELELEKQKTDRLLTQMLPPSVAEALKTGTPVEPEYFEQVTLYFSDIVGFTTISAMSEPIEVVDLLNDLYTLFDAIIGSHDVYKVETIGDAYMVASGLPQRNGQRHAAEIANMSLDILSAVGTFRMRHMPEVPVRIRIGLHSGPCVAGVVGLTMPRYCLFGDTVNTASRMESTGLPYRIHVNLSTVGILRALDSGYQVELRGRTELKGKGAEDTFWLVGRRGFNKPIPKPPDLQPGSSNHGISLQEIPPERRRKLEKARPGQFS

SEQ ID NO: 1136 - protein, 956 aa, Homo sapiens
MEKMLAGCFLLILGQIVLLPAEARERSRGRSISRGRHARTHPQTALLESSCENKRADLVFIIDSSRSVNTHDYAKVKEFIVDILQFLDIGPDVTRVGLLQYGSTVKNEFSLKTFKRKSEVERAVKRMRHLSTGTMTGLAIQYALNIAFSEAEGARPLRENVPRVIMIVTDGRPQDSVAEVAAKARDTGILIFAIGVGQVDFNTLKSIGSEPHEDHVFLVANFSQIETLTSVFQKKLCTAHMCSTLEHNCAHFCINIPGSYVCRCKQGYILNSDQTTCRIQDLCAMEDHNCEQLCVNVPGSFVCQCYSGYALAEDGKRCVAVDYCASENHGCEHECVNADGSYLCQCHEGFALNPDKKTCTKIDYCASSNHGCQHECVNTDDSYSCHCLKGFTLNPDKKTCRRINYCALNKPGCEHECVNMEESYYCRCHRGYTLDPNGKTCSRVDHCAQQDHGCEQLCLNTEDSFVCQCSEGFLINEDLKTCSRVDYCLLSDHGCEYSCVNMDRSFACQCPEGHVLRSDGKTCAKLDSCALGDHGCEHSCVSSEDSFVCQCFEGYILREDGKTCRRKDVCQAIDHGCEHICVNSDDSYTCECLEGFRLAEDGKRCRRKDVCKSTHHGCEHICVNNGNSYICKCSEGFVLAEDGRRCKKCTEGPIDLVFVIDGSKSLGEENFEVVKQFVTGIIDSLTISPKAARVGLLQYSTQVHTEFTLRNFNSAKDMKKAVAHMKYMGKGSMTGLALKHMFERSFTQGEGARPLSTRVPRAAIVFTDGRAQDDVSEWASKAKANGITMYAVGVGKAIEEELQEIASEPTNKHLFYAEDFSTMDEISEKLKKGICEALEDSDGRQDSPAGELPKTVQQPTESEPVTINIQDLLSCSNFAVQHRYLFEEDNLLRSTQKLSHSTKPSGSPLEEKHDQCKCENLIMFQNLANEEVRKLTQRLEEMTQRMEALENRLRYR

SEQ ID NO: 1137 - protein, 1235 aa, Homo sapiens
MATGTGKHKLLSTGPTEPWSIREKLCLASSVMRSGDQNWVSVSRAIKPFAEPGRPPDWFSQKHCASQYSELLETTETPKRKRGEKGEVVETVEDVIVRKLTAERVEELKKVIKETQERYRRLKRDAELIQAGHMDSRLDELCNDIATKKKLEEEEAEVKRKATDAAYQARQAVKTPPRRLPTVMVRSPIDSASPGGDYPLGDLTPTTMEEATSGVNESEMAVASGHLNSTGVLLEVGGVLPMIHGGEIQQTPNTVAASPAASGAPTLSRLLEAGPTQFTTPLASFTTVASEPPVKLVPPPVESVSQATIVMMPALPAPSSAPAVSTTESVAPVSQPDNCVPMEAVGDPHTVTVSMDSSEISMIINSIKEECFRSGVAEAPVGSKAPSIDGKEELDLAEKMDIAVSYTGEELDFETVGDIIAIIEDKVDDHPEVLDVAAVEAALSFCEENDDPQSLPGPWEHPIQQERDKPVPLPAPEMTVKQERLDFEETENKGIHELVDIREPSAEIKVEPAEPEPVISGAEIVAGVVPATSMEPPELRSQDLDEELGSTAAGEIVEADVAIGKGDETPLTNVKTEASPESMLSPSHGSNPIEDPLEAETQHKFEMSDSLKEESGTIFGSQIKDAPGEDEEEDGVSEAASLEEPKEEDQGEGYLSEMDNEPPVSESDDGFSIHNATLQSHTLADSIPSSPASSQFSVCSEDQEAIQAQKIWKKAIMLVWRAAANHRYANVFLQPVTDDIAPGYHSIVQRPMDLSTIKKNIENGLIRSTAEFQRDIMLMFQNAVMYNSSDHDVYHMAVEMQRDVLEQIQQFLATQLIMQTSESGISAKSLRGRDSTRKQDASEKDSVPMGSPAFLLSLFMGHEWVWLDSEQDHPNDSELSNDCRSLFSSWDSSLDLDVGNWRETEDPEAEELEESSPEREPSELLVGDGGSEESQEAARKASHQNLLHFLSEVAYLMEPLCISSNESSEGCCPPSGTRQEGREIKASEGERELCRETEELSAKGDPLVAEKPLGENGKPEVASAPSVICTVQGLLTESEEGEAQQESKGEDQGEVYVSEMEDQPPSGECDDAFNIKETPLVDTLFSHATSSKLTDLSQDDPVQDHLLFKKTLLPVWKMIASHRFSSPFLKPVSERQAPGYKDVVKRPMDLTSLKRNLSKGRIRTMAQFLRDLMLMFQNAVMYNDSDHHVYHMAVEMRQEVLEQIQVLNIWLDKRKGSSSLEGEPANPVDDGKPVF

SEQ ID NO: 1138 - protein, 437 aa, Homo sapiens
MTTSTLQKAIDLVTKATEEDKAKNYEEALRLYQHAVEYFLHAIKYEAHSDKAKESIRAKCVQYLDRAEKLKDYLRSKEKHGKKPVKENQSEGKGSDSDSEGDNPEKKKLQEQLMGAVVMEKPNIRWNDVAGLEGAKEALKEAVILPIKFPHLFTGKRTPWRGILLFGPPGTGKSYLAKAVATEANNSTFFSVSSSDLMSKWLGESEKLVKNLFELARQHKPSIIFIDEVDSLCGSRNENESEAARRIKTEFLVQMQGVGNNNDGTLVLGATNIPWVLDSAIRRRFEKRIYIPLPEEAARAQMFRLHLGSTPHNLTDANIHELARKTEGYSGADISIIVRDSLMQPVRKVQSATHFKKVCGPSRTNPSMMIDDLLTPCSPGDPGAMEMTWMDVPGDKLLEPVVCMSDMLRSLATTRPTVNADDLLKVKKFSEDFGQES

SEQ ID NO: 1139 - protein, 1218 aa, Homo sapiens
MRSPRTRGRSGRPLSLLLALLCALRAKVCGASGQFELEILSMQNVNGELQNGNCCGGARNPGDRKCTRDECDTYFKVCLKEYQSRVTAGGPCSFGSGSTPVIGGNTFNLKASRGNDRNRIVLPFSFAWPRSYTLLVEAWDSSNDTVQPDSIIEKASHSGMINPSRQWQTLKQNTGVAHFEYQIRVTCDDYYYGFGCNKFCRPRDDFFGHYACDQNGNKTCMEGWMGPECNRAICRQGCSPKHGSCKLPGDCRCQYGWQGLYCDKCIPHPGCVHGICNEPWQCLCETNWGGQLCDKDLNYCGTHQPCLNGGTCSNTGPDKYQCSCPEGYSGPNCEIAEHACLSDPCHNRGSCKETSLGFECECSPGWTGPTCSTNIDDCSPNNCSHGGTCQDLVNGFKCVCPPQWTGKTCQLDANECEAKPCVNAKSCKNLIASYYCDCLPGWMGQNCDININDCLGQCQNDASCRDLVNGYRCICPPGYAGDHCERDIDECASNPCLNGGHCQNEINRFQCLCPTGFSGNLCQLDIDYCEPNPCQNGAQCYNRASDYFCKCPEDYEGKNCSHLKDHCRTTPCEVIDSCTVAMASNDTPEGVRYISSNVCGPHGKCKSQSGGKFTCDCNKGFTGTYCHENINDCESNPCRNGGTCIDGVNSYKCICSDGWEGAYCETNINDCSQNPCHNGGTCRDLVNDFYCDCKNGWKGKTCHSRDSQCDEATCNNGGTCYDEGDAFKCMCPGGWEGTTCNIARNSSCLPNPCHNGGTCVVNGESFTCVCKEGWEGPICAQNTNDCSPHPCYNSGTCVDGDNWYRCECAPGFAGPDCRININECQSSPCAFGATCVDEINGYRCVCPPGHSGAKCQEVSGRPCITMGSVIPDGAKWDDDCNTCQCLNGRIACSKVWCGPRPCLLHKGHSECPSGQSCIPILDDQCFVHPCTGVGECRSSSLQPVKTKCTSDSYYQDNCANITFTFNKEMMSPGLTTEHICSELRNLNILKNVSAEYSIYIACEPSPSANNEIHVAISAEDIRDDGNPIKEITDKIIDLVSKRDGNSSLIAAVAEVRVQRRPLKNRTDFLVPLLSSVLTVAWICCLVTAFYWCLRKRRKPGSHTHSASEDNTTNNVREQLNQIKNPIEKHGANTVPIKDYENKNSKMSKIRTHNSEVEEDDMDKHQQKARFAKQPAYTLVDREEKPPNGTPTKHPNWTNKQDNRDLESAQSLNRMEYIV

SEQ ID NO: 1140 - protein, 206 aa, Homo sapiens
MAEDADMRNELEEMQRRADQLADESLESTRRMLQLVEESKDAGIRTLVMLDEQGEQLERIEEGMDQINKDMKEAEKNLTDLGKFCGLCVCPCNKLKSSDAYKKAWGNNQDGVVASQPARVVDEREQMAISGGFIRRVTNDARENEMDENLEQVSGIIGNLRHMALDMGNEIDTQNRQIDRIMEKADSNKTRIDEANQRATKMLGSG

SEQ ID NO: 1141 - protein, 461 aa, Homo sapiens
MAADIFPRKKPANSSSTSVQQYHQQNLSNNNLIPAPNWQGLYPTIRERNAMMFNNDLMADVHFVVGPPGGTQRLPGHKYVLAVGSSVFHAMFYGELAEDKDEIRIPDVEPAAFLAMLKYIYCDEIDLAADTVLATLYAAKKYIVPHLARACVNFLETSLSAKNACVLLSQSCLFEEPDLTQRCWEVIDAQAELALKSEGFCDIDFQTLESILRRETLNAKEIVVFEAALNWAEVECQRQDLALSIENKRKVLGKALYLIRIPTMALDDFANGAAQSGVLTLNETNDIFLWYTAAKKPELQFVSKARKGLVPQRCHRFQSCAYRSNQWRYRGRCDSIQFAVDKRVFIAGFGLYGSSCGSAEYSAKIELKRQGVVLGQNLSKYFSDGSSNTFPVWFEYPVQIEPDTFYTASVILDGNELSYFGQEGMTEVQCGKVTVQFQCSSDSTNGTGVQGGQIPELIFYA

SEQ ID NO: 1142 - protein, 944 aa, Homo sapiens
MLDSFSQESTLPFREARKRTSFQPVQVWRNFTASQTTESPACSGASLGEMTAWTMGARGLDKRGSFFKLIDTIASEIGELKQEMVRTDVNLENGLEPAETHSMVRHKDGGYSEEEDVKTCARDSGYDSLSNRLSILDRLLHTHPIWLQLSLSEEEAAEVLQAQPPGIFLVHKSTKMQKKVLSLRLPCEFGAPLKEFAIKESTYTFSLEGSGISFADLFRLIAFYCISRDVLPFTLKLPYAISTAKSEAQLEELAQMGLNFWSSPADSKPPNLPPPHRPLSSDGVCPASLRQLCLINGVHSIKTRTPSELECSQTNGALCFINPLFLKVHSQDLSGGLKRPSTRTPNANGTERTRSPPPRPPPPAINSLHTSPRLARTETQTSMPETVNHNKHGNVALPGTKPTPIPPPRLKKQASFLEAEGGAKTLSGGRPGAGPELELGTAGSPGGAPPEAAPGDCTRAPPPSSESRPPCHGGRQRLSDMSISTSSSDSLEFDRSMPLFGYEADTNSSLEDYEGESDQETMAPPIKSKKKRSSSFVLPKLVKSQLQKVSGVFSSFMTPEKRMVRRIAELSRDKCTYFGCLVQDYVSFLQENKECHVSSTDMLQTIRQFMTQVKNYLSQSSELDPPIESLIPEDQIDVVLEKAMHKCILKPLKGHVEAMLKDFHMADGSWKQLKENLQLVRQRNPQELGVFAPTPDFVDVEKIKVKFMTMQKMYSPEKKVMLLLRVCKLIYTVMENNSGRMYGADDFLPVLTYVIAQCDMLELDTEIEYMMELLDPSLLHGEGGYYLTSAYGALSLIKNFQEEQAARLLSSETRDTLRQWHKRRTTNRTIPSVDDFQNYLRVAFQEVNSGCTGKTLLVRPYITTEDVCQICAEKFKVGDPEEYSLFLFVDETWQQLAEDTYPQKIKAELHSRPQPHIFHFVYKRIKNDPYGIIFQNGEEDLTTS

SEQ ID NO: 1143 - protein, 388 aa, Homo sapiens
MSAPSTLPPGGEEGLGTAWPSAANASSAPAEAEEAVAGPGDARAAGMVAIQCIYALVCLVGLVGNALVIFVILRYAKMKTATNIYLLNLAVADELFMLSVPFVASSAALRHWPFGSVLCRAVLSVDGLNMFTSVFCLTVLSVDRYVAVVHPLRAATYRRPSVAKLINLGVWLASLLVTLPIAIFADTRPARGGQAVACNLQWPHPAWSAVFVVYTFLLGFLLPVLAIGLCYLLIVGKMRAVALRAGWQQRRRSEKKITRLVLMVVVVFVLCWMPFYVVQLLNLFVTSLDATVNHVSLILSYANSCANPILYGFLSDNFRRFFQRVLCLRCCLLEGAGGAEEEPLDYYATALKSKGGAGCMCPPLPCQQEALQPEPGRKRIPLTRTTTF

SEQ ID NO: 1144 - protein, 223 aa, Homo sapiens
MNKPLLWISVLTSLLEAFAHTDLSGKVFVFPRESVTDHVNLITPLEKPLQNFTLCFRAYSDLSRAYSLFSYNTQGRDNELLVYKERVGEYSLYIGRHKVTSKVIEKFPAPVHICVSWESSSGIAEFWINGTPLVKKGLRQGYFVEAQPKIVLGQEQDSYGGKFDRSQSFVGEIGDLYMWDSVLPPENILSAYQGTPLPANILDWQALNYEIRGYVIIKPLVWV

SEQ ID NO: 1145 - protein, 993 aa, Homo sapiens
MASAAVESFVTKQLDLLELERDAEVEERRSWQENISLKELQSRGVCLLKLQVSSQRTGLYGRLLVTFEPRRYGSAAALPSNSFTSGDIVGLYDAANEGSQLATGILTRVTQKSVTVAFDESHDFQLSLDRENSYRLLKLANDVTYRRLKKALIALKKYHSGPASSLIEVLFGRSAPSPASEIHPLTFFNTCLDTSQKEAVLFALSQKELAIIHGPPGTGKTTTVVEIILQAVKQGLKVLCCAPSNIAVDNLVERLALCKQRILRLGHPARLLESIQQHSLDAVLARSDSAQIVADIRKDIDQVFVKNKKTQDKREKSNFRNEIKLLRKELKEREEAAMLESLTSANVVLATNTGASADGPLKLLPESYFDVVVIDECAQALEASCWIPLLKARKCILAGDHKQLPPTTVSHKAALAGLSLSLMERLAEEYGARVVRTLTVQYRMHQAIMRWASDTMYLGQLTAHSSVARHLLRDLPGVAATEETGVPLLLVDTAGCGLFELEEEDEQSKGNPGEVRLVSLHIQALVDAGVPARDIAVVSPYNLQVDLLRQSLVHRHPELEIKSVDGFQGREKEAVILSFVRSNRKGEVGFLAEDRRINVAVTRARRHVAVICDSRTVNNHAFLKTLVEYFTQHGEVRTAFEYLDDIVPENYSHENSQGSSHAATKPQGPATSTRTGSQRQEGGQEAAAPARQGRKKPAGKSLASEAPSQPSLNGGSPEGVESQDGVDHFRAMIVEFMASKKMQLEFPPSLNSHDRLRVHQIAEEHGLRHDSSGEGKRRFITVSKRAPRPRAALGPPAGTGGPAPLQPVPPTPAQTEQPPREQRGPDQPDLRTLHLERLQRVRSAQGQPASKEQQASGQQKLPEKKKKKAKGHPATDLPTEEDFEALVSAAVKADNTCGFAKCTAGVTTLGQFCQLCSRRYCLSHHLPEIHGCGERARAHARQRISREGVLYAGSGTKNGSLDPAKRAQLQRRLDKKLSELSNQRTSRRKERGT

SEQ ID NO: 1146 - protein, 385 aa, Homo sapiens
MKDEPRSTNLFMKLDSVFIWKEPFGLVLIIAPWNYPLNLTLVLLVGALAAGSCVVLKPSEISQGTEKVLAEVLPQYLDQSCFAVVLGGPQETGQLLEHKLDYIFFTGSPRVGKIVMTAATKHLTPVTLELGGKNPCYVDDNCDPQTVANRVAWFCYFNAGQTCVAPDYVLCSPEMQERLLPALQSTITRFYGDDPQSSPNLGHIINQKQFQRLRALLGCSRVAIGGQSNESDRYIAPTVLVDVQETEPVMQEEIFGPILPIVNVQSVDEAIKFINRQEKPLALYAFSNSSQVVNQMLERTSSGSFGGNEGFTYISLLSVPFGGVGHSGMGRYHGKFTFDTFSHHRTCLLAPSGLEKLKEIHYPPYTDWNQQLLRWGMGSQSCTLL

SEQ ID NO: 1147 - protein, 489 aa, Homo sapiens
MESMFSSPAEAALQRETGVPGLLTPLPDLDGVYELERVAGFVRDLGCERVALQFPDQLLGDAVAVAARLEETTGSKMFILGDTAYGSCCVDVLGAEQAGAQALIHFGPACLSPPARPLPVAFVLRQRSVALELCVKAFEAQNPDPKAPVVLLSEPACAHALEALATLLRPRYLDLLVSSPAFPQPVGSLSPEPMPLERFGRRFPLAPGRRLEEYGAFYVGGSKASPDPDLDPDLSRLLLGWAPGQPFSSCCPDTGKTQDEGARAGRLRARRRYLVERARDARVVGLLAGTLGVAQHREALAHLRNLTQAAGKRSYVLALGRPTPAKLANFPEVDVFVLLACPLGALAPQLSGSFFQPILAPCELEAACNPAWPPPGLAPHLTHYADLLPGSPFHVALPPPESELWETPDVSLITGDLRPPPAWKSSNDHGSLALTPRPQLELAESSPAASFLSSRSWQGLEPRLGQTPVTEAVSGRRGIAIAYEDEGSG

SEQ ID NO: 1148 - protein, 680 aa, Homo sapiens
MKMKKFQIPVSFQDLTVNFTQEEWQQLDPAQRLLYRDVMLENYSNLVSVGYHVSKPDVIFKLEQGEEPWIVEEFSNQNYPDIDDALEKNKEIQDKHLTQTVFFSNKTLITERENVFGKTLNLGMNSVPSRKMPYKCNPGGNSLKTNSEVIVAKKSKENRKIPDGYSGFGKHEKSHLGMKKYRYNPMRKASNQNENLILHQNIQILKQPFDYNKCGKTFFKRAILITQKGRQTERKPNECNECRKTFSKRSTLIVHQRIHTGEKPYVCSDCRKTFRVKTSLTRHRRIHTGERPYECSECRKTFIDKSALIVHQKIHGGEKSYECNECGKTFFRKSALAEHFRSHTGEKPYECKECGNAFSKKSYLVVHQRTHRGEKPNECKECGKTFFCQSALTAHQRIHTGEKPYECSECEKTFFCQSALNVHRRSHTGEKPYECSQCGKFLCTKSALIAHQITHRGKKSYECNECGKFFCHKSTLTIHQRTHTGEKHGVFNKCGRISIVKSNCSQCKRMNTKENLYECSEHGHAVSKNSHLIVHQRTIWERPYECNECGRTYCRKSALTHHQRTHTGQRPYECNECGKTFCQKFSFVEHQRTHTGEKPYECNECGKSFCHKSAFRVHRRIHTGEKPYECNQCGKTYRRLWTLTEHQKIHTGEKPYECNKCEKTFRHKSNFLLHQKSHKE

SEQ ID NO: 1149 - protein, 696 aa, Homo sapiens
MELGSCFKTYEDFKECFSAYKRENRCSFILRDCVSVRFHNLNHGTSIREDILYVQVKFVCIRTQSNRKRTREADMCPAYLLLRYNERLDRLFISELNTQHIHGDSKVASPGGDTTGKSQKTMCLQRLQPVQPTTKKDLDTAEKSLVEPSFCLDKVQVSSKPEQEGITPSDLAKIAKVMKNFLKVDEGSMASFSVGDSQHLDRLSFQSSKMTDLFIRFPENLLLHRVENTQGHILYAFLVENKERESRVVHFAVLKAETVTSVAKMLSIFTEFNSDWPKVKVVFVDPSFHYRAILQEIFPAARILLSIYHTTRLLEKKLHRSSANPSFKRLMKEALREAVFVTSEASLKNLCQMSQAVLDEDLFNFLQAHWFTCELLWYMHVRKGLLACNTYMDSLDIVTSKVSSLFREQQSLLDCILCFVDYIDFFNTKGLKNLPTPPPKLKRARPASMPLKSKKAFGICGESLTSLPAEETKPDAQQVQVQQQSQVPPSQVGMLDTLHQSGSELAYKLCHNEWEVVQNSTHLVDMAGSSVDVQLLEDSHQVSKDGCSCSCSFQQWYHLPCRHILALLHTSQQPVGEAMVCRRWQKKYQYLLGPNGELQDRGMVPNTGQPEKQGRNDMIQDLSRELANLLMQTEGPELEERYSTLRKIVDIWAGPSQPSELFQQPGDFKDVGRLPFLWGKQEEGEGFPPATAVMHY

SEQ ID NO: 1150 - protein, 866 aa, Homo sapiens
MLRPGAQLLRGLLLRSCPLQGSPGRPRSVCGREGEEKPPLSAETQWKDRAETVIIGGGCVGVSLAYHLAKAGMKDVVLLEKSELTAGSTWHAAGLTTYFHPGINLKKIHYDSIKLYEKLEEETGQVVGFHQPGSIRLATTPVRVDEFKYQMTRTGWHATEQYLIEPEKIQEMFPLLNMNKVLAGLYNPGDGHIDPYSLTMALAAGARKCGALLKYPAPVTSLKARSDGTWDVETPQGSMRANRIVNAAGFWAREVGKMIGLEHPLIPVQHQYVVTSTISEVKALKRELPVLRDLEGSYYLRQERDGLLFGPYESQEKMKVQDSWVTNGVPPGFGKELFESDLDRIMEHIKAAMEMVPVLKKADIINVVNGPITYSPDILPMVGPHQGVRNYWVAIGFGYGIIHAGGVGKYLSDWILHGEPPFDLIELDPNRYGKWTTTQYTEAKARESYGFNNIVGYPKEERFAGRPTQRVSGLYQRLESKCSMGFHAGWEQPHWFYKPGQDTQYRPSFRRTNWFEPVGSEYKQVMQRVAVTDLSPFGKFNIKGQDSIRLLDHLFANVIPKVGFTNISHMLTPKGRVYAELTVSHQSPGEFLLITGSGSELHDLRWIEEEAVKGGYDVEIKNITDELGVLGVAGPQARKVLQKLTSEDLSDDVFKFLQTKSLKVSNIPVTAIRISYTGELGWELYHRREDSVALYDAIMNAGQEEGIDNFGTYAMNALRLEKAFRAWGLEMNCDTNPLEAGLEYFVKLNKPADFIGKQALKQIKAKGLKRRLVCLTLATDDVDPEGNESIWYNGKVVGNTTSGSYSYSIQKSLAFAYVPVQLSEVGQQVEVELLGKNYPAVIIQEPLVLTEPTRNRLQKKGGKDKT

SEQ ID NO: 1151 - protein, 1094 aa, Homo sapiens
MSSNSFPYNEQSGGGEATELGQEATSTISPSGAFGLFSSDLKKNEDLKQMLESNKDSAKLDAMKRIVGMIAKGKNASELFPAVVKNVASKNIEIKKLVYVYLVRYAEEQQDLALLSISTFQRALKDPNQLIRASALRVLSSIRVPIIVPIMMLAIKEASADLSPYVRKNAAHAIQKLYSLDPEQKEMLIEVIEKLLKDKSTLVAGSVVMAFEEVCPDRIDLIHKNYRKLCNLLVDVEEWGQVVIIHMLTRYARTQFVSPWKEGDELEDNGKNFYESDDDQKEKTDKKKKPYTMDPDHRLLIRNTKPLLQSRNAAVVMAVAQLYWHISPKSEAGIISKSLVRLLRSNREVQYIVLQNIATMSIQRKGMFEPYLKSFYVRSTDPTMIKTLKLEILTNLANEANISTLLREFQTYVKSQDKQFAAATIQTIGRCATNILEVTDTCLNGLVCLLSNRDEIVVAESVVVIKKLLQMQPAQHGEIIKHMAKLLDSITVPVARASILWLIGENCERVPKIAPDVLRKMAKSFTSEDDLVKLQILNLGAKLYLTNSKQTKLLTQYILNLGKYDQNYDIRDRTRFIRQLIVPNVKSGALSKYAKKIFLAQKPAPLLESPFKDRDHFQLGTLSHTLNIKATGYLELSNWPEVAPDPSVRNVEVIELAKEWTPAGKAKQENSAKKFYSESEEEEDSSDSSSDSESESGSESGEQGESGEEGDSNEDSSEDSSSEQDSESGRESGLENKRTAKRNSKAKGKSDSEDGEKENEKSKTSDSSNDESSSIEDSSSDSESESEPESESESRRVTKEKEKKTKQDRTPLTKDVSLLDLDDFNPVSTPVALPTPALSPSLMADLEGLHLSTSSSVISVSTPAFVPTKTHVLLHRMSGKGLAAHYFFPRQPCIFGDKMVSIQITLNNTTDRKIENIHIGEKKLPIGMKMHVFNPIDSLEPEGSITVSMGIDFCDSTQTASFQLCTKDDCFNVNIQPPVGELLLPVAMSEKDFKKEQGVLTGMNETSAVIIAAPQNFTPSVIFQKVVNVANVGAVPSGQDNIHRFAAKTVHSGSLMLVTVELKEGSTAQLIINTEKTVIGSVLLRELKPVLSQG

SEQ ID NO: 1152 - protein, 425 aa, Homo sapiens
MAPITTSREEFDEIPTVVGIFSAFGLVFTVSLFAWICCQRKSSKSNKTPPYKFVHVLKGVDIYPENLNSKKKFGADDKNEVKNKPAVPKNSLHLDLEKRDLNGNFPKTNLKPGSPSDLENATPKLFLEGEKESVSPESLKSSTSLTSEEKQEKLGTLFFSLEYNFERKAFVVNIKEARGLPAMDEQSMTSDPYIKMTILPEKKHKVKTRVLRKTLDPAFDETFTFYGIPYTQIQELALHFTILSFDRFSRDDIIGEVLIPLSGIELSEGKMLMNREIIKRNVRKSSGRGELLISLCYQSTTNTLTVVVLKARHLPKSDVSGLSDPYVKVNLYHAKKRISKKKTHVKKCTPNAVFNELFVFDIPCEGLEDISVEFLVLDSERGSRNEVIGQLVLGAAAEGTGGEHWKEICDYPRRQIAKWHVLCDG

SEQ ID NO: 1153 - protein, 920 aa, Homo sapiens
MSDPHSSPLLPEPLSSRYKLYEAEFTSPSWPSTSPDTHPALPLLEMPEEKDLRSSNEDSHIVKIEKLNERSKRKDDGVAHRDSAGQRCICLSKAVGYLTGDMKEYRIWLKDKHLALQFIDWVLRGTAQVMFINNPLSGLIIFIGLLIQNPWWTITGGLGTVVSTLTALALGQDRSAIASGLHGYNGMLVGLLMAVFSEKLDYYWWLLFPVTFTAMSCPVLSSALNSIFSKWDLPVFTLPFNIAVTLYLAATGHYNLFFPTTLVEPVSSVPNITWTEMEMPLLLQAIPVGVGQVYGCDNPWTGGVFLVALFISSPLICLHAAIGSIVGLLAALSVATPFETIYTGLWSYNCVLSCIAIGGMFYALTWQTHLLALICALFCAYMEAAISNIMSVVGVPPGTWAFCLATIIFLLLTTNNPAIFRLPLSKVTYPEANRIYYLTVKSGEEEKAPSGGGGEHPPTAGPKVEEGSEAVLSKHRSVFHIEWSSIRRRSKVFGKGEHQERQNKDPFPYRYRKPTVELLDLDTMEESSEIKVETNISKTSWIRSSMAASGKRVSKALSYITGEMKECGEGLKDKSPVFQFFDWVLRGTSQVMFVNNPLSGILIILGLFIQNPWWAISGCLGTIMSTLTALILSQDKSAIAAGFHGYNGVLVGLLMAVFSDKGDYYWWLLLPVIIMSMSCPILSSALGTIFSKWDLPVFTLPFNITVTLYLAATGHYNLFFPTTLLQPASAMPNITWSEVQVPLLLRAIPVGIGQVYGCDNPWTGGIFLIALFISSPLICLHAAIGSTMGMLAALTIATPFDSIYFGLCGFNSTLACIAIGGMFYVITWQTHLLAIACALFAAYLGAALANMLSVFGLPPCTWPFCLSALTFLLLTTNNPAIYKLPLSKVTYPEANRIYYLSQERNRRASIITKYQAYDVS

SEQ ID NO: 1154 - protein, 415 aa, Homo sapiens
MSGMEKLQNASWIYQQKLEDPFQKHLNSTEEYLAFLCGPRRSHFFLPVSVVYVPIFVVGVIGNVLVCLVILQHQAMKTPTNYYLFSLAVSDLLVLLLGMPLEVYEMWRNYPFLFGPVGCYFKTALFETVCFASILSITTVSVERYVAILHPFRAKLQSTRRRALRILGIVWGFSVLFSLPNTSIHGIKFHYFPNGSLVPGSATCTVIKPMWIYNFIIQVTSFLFYLLPMTVISVLYYLMALRLKKDKSLEADEGNANIQRPCRKSVNKMLFVLVLVFAICWAPFHIDRLFFSFVEEWSESLAAVFNLVHVVSGVFFYLSSAVNPIIYNLLSRRFQAAFQNVISSFHKQWHSQHDPQLPPAQRNIFLTECHFVELTEDIGPQFPCQSSMHNSHLPAALSSEQMSRTNYQSFHFNKT

SEQ ID NO: 1155 - protein, 860 aa, Homo sapiens
MGEVTAEEVEKFLDSNIGFAKQYYNLHYRAKLISDLLGAKEAAVDFSNYHSPSSMEESEIIFDLLRDFQENLQTEKCIFNVMKKLCFLLQADRMSLFMYRTRNGIAELATRLFNVHKDAVLEDCLVMPDQEIVFPLDMGIVGHVAHSKKIANVPNTEEDEHFCDFVDILTEYKTKNILASPIMNGKDVVAIIMAVNKVDGSHFTKRDEEILLKYLNFANLIMKVYHLSYLHNCETRRGQILLWSGSKVFEELTDIERQFHKALYTVRAFLNCDRYSVGLLDMTKQKEFFDVWPVLMGEVPPYSGPRTPDGREINFYKVIDYILHGKEDIKVIPNPPPDHWALVSGLPAYVAQNGLICNIMNAPAEDFFAFQKEPLDESGWMIKNVLSMPIVNKKEEIVGVATFYNRKDGKPFDEMDETLMESLTQFLGWSVLNPDTYESMNKLENRKDIFQDIVKYHVKCDNEEIQKILKTREVYGKEPWECEEEELAEILQAELPDADKYEINKFHFSDLPLTELELVKCGIQMYYELKVVDKFHIPQEALVRFMYSLSKGYRKITYHNWRHGFNVGQTMFSLLVTGKLKRYFTDLEALAMVTAAFCHDIDHRGTNNLYQMKSQNPLAKLHGSSILERHHLEFGKTLLRDESLNIFQNLNRRQHEHAIHMMDIAIIATDLALYFKKRTMFQKIVDQSKTYESEQEWTQYMMLEQTRKEIVMAMMMTACDLSAITKPWEVQSQVALLVAAEFWEQGDLERTVLQQNPIPMMDRNKADELPKLQVGFIDFVCTFVYKEFSRFHEEITPMLDGITNNRKEWKALADEYDAKMKVQEEKKQKQQSAKSAAAGNQPGGNPSPGGATTSKSCCIQ

SEQ ID NO: 1156 - protein, 994 aa, Homo sapiens [sequence omitted]

SEQ ID NO: 1157 - protein, 1092 aa, Homo sapiens
MMDSPKIGNGLPVIGPGTDIGISSLHMVGYLGKNFDSAKVPSDEYCPACREKGKLKALKTYRISFQESIFLCEDLQCIYPLGSKSLNNLISPDLEECHTPHKPQKRKSLESSYKDSLLLANSKKTRNYIAIDGGKVLNSKHNGEVYDETSSNLPDSSGQQNPIRTADSLERNEILEADTVDMATTKDPATVDVSGTGRPSPQNEGCTSKLEMPLESKCTSFPQALCVQWKNAYALCWLDCILSALVHSEELKNTVTGLCSKEESIFWRLLTKYNQANTLLYTSQLSGVKDGDCKKLTSEIFAEIETCLNEVRDEIFISLQPQLRCTLGDMESPVFAFPLLLKLETHIEKLFLYSFSWDFECSQCGHQYQNRHMKSLVTFTNVIPEWHPLNAAHFGPCNNCNSKSQIRKMVLEKVSPIFMLHFVEGLPQNDLQHYAFHFEGCLYQITSVIQYRANNHFITWILDADGSWLECDDLKGPCSERHKKFEVPASEIHIVIWERKISQVTDKEAACLPLKKTNDQHALSNEKPVSLTSCSVGDAASAETASVTHPKDISVAPRTLSQDTAVTHGDHLLSGPKGLVDNILPLTLEETIQKTASVSQLNSEAFLLENKPVAENTGILKTNTLLSQESLMASSVSAPCNEKLIQDQFVDISFPSQVVNTNMQSVQLNTEDTVNTKSVNNTDATGLIQGVKSVEIEKDAQLKQFLTPKTEQLKPERVTSQVSNLKKKETTADSQTTTSKSLQNQSLKENQKKPFVGSWVKGLISRGASFMPLCVSAHNRNTITDLQPSVKGVNNFGGFKTKGINQKASHVSKKARKSASKPPPISKPPAGPPSSNGTAAHPHAHAASEVLEKSGSTSCGAQLNHSSYGNGISSANHEDLVEGQIHKLRLKLRKKLKAEKKKLAALMSSPQSRTVRSENLEQVPQDGSPNDCESIEDLLNELPYPIDIASESACTTVPGVSLYSSQTHEEILAELLSPTPVSTELSENGEGDFRYLGMGDSHIPPPVPSEFNDVSQNTHLRQDHNYCSPTKKNPCEVQPDSLTNNACVRTLNLESPMKTDIFDEFFSSSALNALANDTLDLPHFDEYLFENY

SEQ ID NO: 1158 - protein, 1151 aa, Homo sapiens
MMAAALGPPEVIAQLENAAKVLMAPPSMVNNEQRQHAEHIFLSFRKSKSPFAVCKHILETSKVDYVLFQAATAIMEAVVREWILLEKGSIESLRTFLLTYVLQRPNLQKYVREQILLAVAVIVKRGSLDKSIDCKSIFHEVSQLISSGNPTVQTLACSILTALLSEFSSSSKTSNIGLSMEFHGNCKRVFQEEDLRQIFMLTVEVLQEFSRRENLNAQMSSVFQRYLALANQVLSWNFLPPNLGRHYIAMFESSQNVLLKPTESWRETLLDSRVMELFFTVHRKIREDSDMAQDSLQCLAQLASLHGPIFPDEGSQVDYLAHFIEGLLNTINGIEIEDSEAVGISSIISNLITVFPRNVLTAIPSELFSSFVNCLTHLTCSFGRSAALEEVLDKDDMVYMEAYDKLLESWLTLVQDDKHFHKGFFTQHAVQVFNSYIQCHLAAPDGTRNLTANGVASREEEEISELQEDDRDQFSDQLASVGMLGRIAAEHCIPLLTSLLEERVTRLHGQLQRHQQQLLASPGSSTVDNKMLDDLYEDIHWLILVTGYLLADDTQGETPLIPPEIMEYSIKHSSEVDINTTLQILGSPGEKASSIPGYNRTDSVIRLLSAILRVSEVESRAIRADLTHLLSPQMGKDIVWFLKRWAKTYLLVDEKLYDQISLPFSTAFGADTEGSQWIIGYLLQKVISNLSVWSSEQDLANDTVQLLVTLVERRERANLVIQCENWWNLAKQFASRSPPLNFLSSPVQRTLMKALVLGGFAHMDTETKQQYWTEVLQPLQQRFLRVINQENFQQMCQQEEVKQEITATLEALCGIAEATQIDNVAILFNFLMDFLTNCIGLMEVYKNTPETVNLIIEVFVEVAHKQICYLGESKAMNLYEACLTLLQVYSKNNLGRQRIDVTAEEEQYQDLLLIMELLTNLLSKEFIDFSDTDEVFRGHEPGQAANRSVSAADVVLYGVNLILPLMSQDLLKFPTLCNQYYKLITFICEIFPEKIPQLPEDLFKSLMYSLELGMTSMSSEVCQLCLEALTPLAEQCAKAQETDSPLFLATRHFLKLVFDMLVLQKHNTEMTTAAGEAFYTLVCLHQAEYSELVETLLSSQQDPVIYQRLADAFNKLTASSTPPTLDRKQKMAFLKSLEEFMANVGGLLCVK

SEQ ID NO: 1159 - protein, 445 aa, Homo sapiens
MNESPQTNEFKGTTEEAPAKESPHTSEFKGAALVSPISKRIFGVFLVLLDVTLLLADLIFTDSKLYIPLEYRSISLAIGLFFLMDVLLRVFVEGWTHLVRLLRLIILIRIFHLLHQKRQLEKLMRRLVSENKRRYTRDGFDLDLTYVTERIIAMSFPSSGRQSFYRNPIEEVVRFLDKKHRNHYRVYNLCSERAYDPKHFHNRVSRIMIDDHNVPTLHEMVVFTKEVNEWMAQDLENIVAIHCKGGKGRTGTMVCALLIASEIFLTAEESLYYFGERRTNKTHSNKFQGVETPSQNRYVGYFAQVKHLYNWNLPPRRILFIKRFIIYSIRGDVCDLKVQVVMEKKVVFSSTSLGNCSILHDIETDKILINVYDGPPLYDDVKVQFFSSNLPKYYDNCPFFFWFNTSFIQNNRLCLPRNELDNPHKQKAWKIYPPEFAVEILFGEK

SEQ ID NO: 1160 - protein, 1623 aa, Homo sapiens
MAAEASKTGPSRSSYQRMGRKSQPWGAAEIQCTRCGRRVSRSSGHHCELQCGHAFCELCLLMTEECTTIICPDCEVATAVNTRQRYYPMAGYIKEDSIMEKLQPKTIKNCSQDFKKTADQLTTGLERSASTDKTLLNSSAVMLDTNTAEEIDEALNTAHHSFEQLSIAGKALEHMQKQTIEERERVIEVVEKQFDQLLAFFDSRKKNLCEEFARTTDDYLSNLIKAKSYIEEKKNNLNAAMNIARALQLSPSLRTYCDLNQIIRTLQLTSDSELAQVSSPQLRNPPRLSVNCSEIICMFNNMGKIEFRDSTKCYPQENEIRQNVQKKYNNKKELSCYDTYPPLEKKKVDMSVLTSEAPPPPLQPETNDVHLEAKNFQPQKDVATASPKTIAVLPQMGSSPDVIIEEIIEDNVESSAELVFVSHVIDPCHFYIRKYSQIKDAKVLEKKVNEFCNRSSHLDPSDILELGARIFVSSIKNGMWCRGTITELIPIEGRNTRKPCSPTRLFVHEVALIQIFMVDFGNSEVLIVTGVVDTHVRPEHSAKQHIALNDLCLVLRKSEPYTEGLLKDIQPLAQPCSLKDIVPQNSNEGWEEEAKVEFLKMVNNKAVSMKVFREEDGVLIVDLQKPPPNKISSDMPVSLRDALVFMELAKFKSQSLRSHFEKNTTLHYHPPILPKEMTDVSVTVCHINSPGDFYLQLIEGLDILFLLKTIEEFYKSEDGENLEILCPVQDQACVAKFEDGIWYRAKVIGLPGHQEVEVKYVDFGNTAKITIKDVRKIKDEFLNAPEKAIKCKLAYIEPYKRTMQWSKEAKEKFEEKAQDKFMTCSVIKILEDNVLLVELFDSLGAPEMTTTSINDQLVKEGLASYEIGYILKDNSQKHIEVWDPSPEEIISNEVHNLNPVSAKSLPNENFQSLYNKELPVHICNVISPEKIYVQWLLTENLLNSLEEKMIAAYENSKWEPVKWENDMHCAVKIQDKNQWRRGQIIRMVTDTLVEVLLYDVGVELVVNVDCLRKLEENLKTMGRLSLECSLVDIRPAGGSDKWTATACDCLSLYLTGAVATIILQVDSEENNTTWPLPVKIFCRDEKGERVDVSKYLIKKGLALRERRINNLDNSHSLSEKSLEVPLEQEDSVVTNCIKTNFDPDKKTADIISEQKVSEFQEKILEPRTTRGYKPPAIPNMNVFEATVSCVGDDGTIFVVPKLSEFELIKMTNEIQSNLKCLGLLEPYFWKKGEACAVRGSDTLWYRGKVMEVVGGAVRVQYLDHGFTEKIPQCHLYPILLYPDIPQFCIPCQLHNTTPVGNVWQPDAIEVLQQLLSKRQVDIHIMELPKNPWEKLSIHLYFDGMSLSYFMAYYKYCTSEHTEEMLKEKPRSDHDKKYEEEQWEIRFEELLSAETDTPLLPPYLSSSLPSPGELYAVQVKHVVSPNEVYICLDSIETSNQSNQHSDTDDSGVSGESESESLDEALQRVNKKVEALPPLTDFRTEMPCLAEYDDGLWYRAKIVAIKEFNPLSILVQFVDYGSTAKLTLNRLCQIPSHLMRYPARAIKVLLAGFKPPLRDLGETRIPYCPKWSMEALWAMIDCLQGKQLYAVSMAPAPEQIVTLYDDEQHPVHMPLVEMGLADKDE

SEQ ID NO: 1161 - protein, 653 aa, Homo sapiens
MAAEASKTGPSRSSYQRMGRKSQPWGAAEIQCTRCGRRVSRSSGHHCELQCGHAFCELCLLMTEECTTIICPDCEVATAVNTRQRYYPMAGYIKEDSIMEKLQPKTIKNCSQDFKKTADQLTTGLERSASTDKTLLNSSAVMLDTNTAEEIDEALNTAHHSFEQLSIAGKALEHMQKQTIEERERVIEVVEKQFDQLLAFFDSRKKNLCEEFARTTDDYLSNLIKAKSYIEEKKNNLNAAMNIARALQLSPSLRTYCDLNQIIRTLQLTSDSELAQVSSPQLRNPPRLSVNCSEIICMFNNMGKIEFRDSTKCYPQENEIRQNVQKKYNNKKELSCYDTYPPLEKKKVDMSVLTSEAPPPPLQPETNDVHLEAKNFQPQKDVATASPKTIAVLPQMGSSPDVIIEEIIEDNVESSAELVFVSHVIDPCHFYIRKYSQIKDAKVLEKKVNEFCNRSSHLDPSDILELGARIFVSSIKNGMWCRGTITELIPIEGRNTRKPCSPTRLFVHEVALIQIFMVDFGNSEVLIVTGVVDTHVRPEHSAKQHIALNDLCLVLRKSEPYTEGLLKDIQPLAQPCSLKDIVPQNSNEGWEEEAKVEFLKMVNNKAVSMKVFREEDGVLIVDLQKPPPNKISSDMPVSLRDALVFMELAKDLI

SEQ ID NO: 1162 - protein, 590 aa, Homo sapiens
MTLHNNSTTSPLFPNISSSWIHSPSDAGLPPGTVTHFGSYNVSRAAGNFSSPDGTTDDPLGGHTVWQVVFIAFLTGILALVTIIGNILVIVSFKVNKQLKTVNNYFLLSLACADLIIGVISMNLFTTYIIMNRWALGNLACDLWLAIDYVASNASVMNLLVISFDRYFSITRPLTYRAKRTTKRAGVMIGLAWVISFVLWAPAILFWQYFVGKRTVPPGECFIQFLSEPTITFGTAIAAFYMPVTIMTILYWRIYKETEKRTKELAGLQASGTEAETENFVHPTGSSRSCSSYELQQQSMKRSNRRKYGRCHFWFTTKSWKPSSEQMDQDHSSSDSWNNNDAAASLENSASSDEEDIGSETRAIYSIVLKLPGHSTILNSTKLPSSDNLQVPEEELGMVDLERKADKLQAQKSVDDGGSFPKSFSKLPIQLESAVDTAKTSDVNSSVGKSTATLPLSFKEATLAKRFALKTRSQITKRKRMSLVKEKKAAQTLSAILLAFIITWTPYNIMVLVNTFCDSCIPKTFWNLGYWLCYINSTVNPVCYALCNKTFRTTFKMLLLCQCDKKKRRKQQYQQRQSVIFHKRAPEQAL

SEQ ID NO: 1163 - protein, 1939 aa, Homo sapiens
MSSDSEMAIFGEAAPFLRKSEKERIEAQNKPFDAKTSVFVVDPKESYVKAIVQSREGGKVTAKTEAGATVTVKEDQVFSMNPPKYDKIEDMAMMTHLHEPAVLYNLKERYAAWMIYTYSGLFCVTVNPYKWLPVYNPEVVTAYRGKKRQEAPPHIFSISDNAYQFMLTDRENQSILITGESGAGKTVNTKRVIQYFATIAVTGEKKKEEPASGKMQGTLEDQIISANPLLEAFGNAKTVRNDNSSRFGKFIRIHFGATGKLASADIETYLLEKSRVTFQLKAERSYHIFYQILSNKKPELIEMLLITTNPYDFAFVSQGEITVPSIDDQEELMATDSAVDILGFTADEKVAIYKLTGAVMHYGNMKFKQKQREEQAEPDGTEVADKAAYLTSLNSADLLKSLCYPRVKVGNEFVTKGQTVQQVYNAVGALAKAIYEKMFLWMVTRINQQLDTKQPRQYFIGVLDIAGFEIFDFNSLEQLCINFTNEKLQQFFNHHMFVLEQEEYKKEGIEWEFIDFGMDLAACIELIEKPMGIFSILEEECMFPKATDTSFKNKLYEQHLGKSNNFQKPKPAKGKPEAHFSLVHYAGTVDYNIAGWLDKNKDPLNETVVGLYQKSAMKTLAFLFSGAQTAEAEGGGGKKGGKKKGSSFQTVSALFRENLNKLMTNLRSTHPHFVRCIIPNETKTPGAMEHELVLHQLRCNGVLEGIRICRKGFPSRILYADFKQRYKVLNASAIPEGQFIDSKKASEKLLGSIEIDHTQYKFGHTKVFFKAGLLGTLEEMRDEKLAQLITRTQAICRGFLMRVEFRKMMERRESIFCIQYNIRAFMNVKHWPWMKLYFKIKPLLKSAETEKEMANMKEEFEKTKEELAKTEAKRKELEEKMVTLMQEKNDLQLQVQAEADALADAEERCDQLIKTKIQLEAKIKEVTERAEDEEEINAELTAKKRKLEDECSELKKDIDDLELTLAKVEKEKHATENKVKNLTEEMAGLDETIAKLTKEKKALQEAHQQTLDDLQMEEDKVNTLTKAKTKLEQQVDDLEGSLEQEKKLCMDLERAKRKLEGDLKLAQESTMDTENDKQQLNEKLKKKEFEMSNLQGKIEDEQALAIQLQKKIKELQARIEELEEEIEAERASRAKAEKQRSDLSRELEEISERLEEAGGATSAQIEMNKKREAEFQKMRRDLEESTLQHEATAAALRKKHADSVAELGEQIDSLQRVKQKLEKEKSELKMEINDLASNMETVSKAKANFEKMCRTLEDQLSEIKTKEEEQQRLINELSAQKARLHTESGEFSRQLDEKDAMVSQLSRGKQAFTQQIEELKRQLEEETKAKSTLAHALQSARHDCDLLREQYEEEQEAKAELQRGMSKANSEVAQWRTKYETDAIQRTEELEEAKKKLAQRLQDAEEHVEAVNSKCASLEKTKQRLQNEVEDLMIDVERSNAACIALDKKQRNFDKVLAEWKQKYEETQAELEASQKESRSLSTELFKVKNAYEESLDHLETLKRENKNLQQEISDLTEQIAEGGKHIHELEKVKKQLDHEKSELQTSLEEAEASLEHEEGKILRIQLELNQVKSEIDRKIAEKDEELDQLKRNHLRVVESMQSTLDAEIRSRNDALRIKKKMEGDLNEMEIQLNHANRQAAEALRNLRNTQGILKDTQLHLDDAIRGQDDLKEQLAMVERRANLMQAEVEELRASLERTERGRKMAEQELLDASERVQLLHTQNTSLINTKKKLETDISQIQGEMEDIVQEARNAEEKAKKAITDAAMMAEELKKEQDTSAHLERMKKNMEQTVKDLQLRLDEAEQLALKGGKKQIQKLEARVRELESEVESEQKHNVEAVKGLRKHERRVKELTYQTEEDRKNILRLQDLVDKLQTKVKAYKRQAEEAEEQSNVNLAKFRKLQHELEEAKERADIAESQVNKLRVKSREVHTKVISEE

SEQ ID NO: 1164 - protein, 915 aa, Homo sapiens
MGRPRLTLVCQVSIIISARDLSMNNLTELQPGLFHHLRFLEELRLSGNHLSHIPGQAFSGLYSLKILMLQNNQLGGIPAEALWELPSLQSLRLDANLISLVPERSFEGLSSLRHLWLDDNALTEIPVRALNNLPALQAMTLALNRISHIPDYAFQNLTSLVVLHLHNNRIQHLGTHSFEGLHNLETLDLNYNKLQEFPVAIRTLGRLQELGFHNNNIKAIPEKAFMGNPLLQTIHFYDNPIQFVGRSAFQYLPKLHTLSLNGAMDIQEFPDLKGTTSLEILTLTRAGIRLLPSGMCQQLPRLRVLELSHNQIEELPSLHRCQKLEEIGLQHNRIWEIGADTFSQLSSLQALDLSWNAIRSIHPEAFSTLHSLVKLDLTDNQLTTLPLAGLGGLMHLKLKGNLALSQAFSKDSFPKLRILEVPYAYQCCPYGMCASFFKASGQWEAEDLHLDDEESSKRPLGLLARQAENHYDQDLDELQLEMEDSKPHPSVQCSPTPGPFKPCEYLFESWGIRLAVWAIVLLSVLCNGLVLLTVFAGGPVPLPPVKFVVGAIAGANTLTGISCGLLASVDALTFGQFSEYGARWETGLGCRATGFLAVLGSEASVLLLTLAAVQCSVSVSCVRAYGKSPSLGSVRAGVLGCLALAGLAAALPLASVGEYGASPLCLPYAPPEGQPAALGFTVALVMMNSFCFLVVAGAYIKLYCDLPRGDFEAVWDCAMVRHVAWLIFADGLLYCPVAFLSFASMLGLFPVTPEAVKSVLLVVLPLPACLNPLLYLLFNPHFRDDLRRLRPRAGDSGPLAYAAAGELEKSSCDSTQALVAFSDVDLILEASEAGRPPGLETYGFPSVTLISCQQPGAPRLEGSHCVEPEGNHFGNPQPSMDGELLLRAEGSTPAGGGLSGGGGFQPSGLAFASHV

SEQ ID NO: 1165 - protein, 729 aa, Homo sapiens
MSFGRDMELEHFDERDKAQRYSRGSRVNGLPSPTHSAHCSFYRTRTLQTLSSEKKAKKVRFYRNGDRYFKGIVYAISPDRFRSFEALLADLTRTLSDNVNLPQGVRTIYTIDGLKKISSLDQLVEGESYVCGSIEPFKKLEYTKNVNPNWSVNVKTTSASRAVSSLATAKGSPSEVRENKDFIRPKLVTIIRSGVKPRKAVRILLNKKTAHSFEQVLTDITDAIKLDSGVVKRLYTLDGKQVMCLQDFFGDDDIFIACGPEKFRYQDDFLLDESECRVVKSTSYTKIASSSRRSTTKSPGPSRRSKSPASTSSVNGTPGSQLSTPRSGKSPSPSPTSPGSLRKQRSSQHGGSSTSLASTKVCSSMDENDGPGEEVSEEGFQIPATITERYKVGRTIGDGNFAVVKECVERSTAREYALKIIKKSKCRGKEHMIQNEVSILRRVKHPNIVLLIEEMDVPTELYLVMELVKGGDLFDAITSTNKYTERDASGMLYNLASAIKYLHSLNIVHRDIKPENLLVYEHQDGSKSLKLGDFGLATIVDGPLYTVCGTPTYVAPEIIAETGYGLKVDIWAAGVITYILLCGFPPFRGSGDDQEVLFDQILMGQVDFPSPYWDNVSDSAKELITMMLLVDVDQRFSAVQVLEHPWVNDDGLPENEHQLSVAGKIKKHFNTGPKPNSTAAGVSVIALDHGFTIKRSGSLDYYQQPGMYWIRPPLLIRRGRFSDEDATRM

SEQ ID NO: 1166 - protein, 1105 aa, Homo sapiens
MLEPSSVLHANVNQAPLWCLVLRWCRECKDTVCGGKQKSRVNHTFQRREIEAKEACDWLRAAGFPQYAQLYEDSQFPINIVAVKNDHDFLEKDLVEPLCRRLNTLNKCASMKLDVNFQRKKGDDSDEEDLCISNKWTFQRTSRRWSRVDDLYTLLPRGDRNGSPGGTGMRNTTSSESVLTDLSEPEVCSIHSESSGGSDSRSQPGQCCTDNPVMLDAPLVSSSLPQPPRDVLNHPFHPKNEKPTRARAKSFLKRMETLRGKGAHGRHKGSGRTGGLVISGPMLQQEPESFKAMQCIQIPNGDLQNSPPPACRKGLPCSGKSSGESSPSEHSSSGVSTPCLKERKCHEANKRGGMYLEDLDVLAGTALPDAGDQSRMHEFHSQENLVVHIPKDHKPGTFPKALSIESLSPTDSSNGVNWRTGSISLGREQVPGAREPRLMASCHRASRVSIYDNVPGSHLYASTGDLLDLEKDDLFPHLDDILQHVNGLQEVVDDWSKDVLPELQTHDTLVGEPGLSTFPSPNQITLDFEGNSVSEGRTTPSDVERDVTSLNESEPPGVRDRRDSGVGASLTRPNRRLRWNSFQLSHQPRPAPASPHISSQTASQLSLLQRFSLLRLTAIMEKHSMSNKHGWTWSVPKFMKRMKVPDYKDKAVFGVPLIVHVQRTGQPLPQSIQQALRYLRSNCLDQVGLFRKSGVKSRIHALRQMNENFPENVNYEDQSAYDVADMVKQFFRDLPEPLFTNKLSETFLHIYQYVSKEQRLQAVQAAILLLADENREVLQTLLCFLNDVVNLVEENQMTPMNLAVCLAPSLFHLNLLKKESSPRVIQKKYATGKPDQKDLNENLAAAQGLAHMIMECDRLFEVPHELVAQSRNSYVEAEIHVPTLEELGTQLEESGATFHTYLNHLIQGLQKEAKEKFKGWVTCSSTDNTDLAFKKVGDGNPLKLWKASVEVEAPPSVVLNRVLRERHLWDEDFVQWKVVETLDRQTEIYQYVLNSMAPHPSRDFVVLRTWKTDLPKGMCTLVSLSVEHEEAQLLGGVRAVVMDSQYLIEPCGSGKSRLTHICRIDLKGHSPEWYSKGFGHLCAAEVARIRNSFQPLIAEGPETKI

SEQ ID NO: 1167 - protein, 900 aa, Homo sapiens
MLLYRGAPAGPGAPGCGLARPGGGPQAFGIRLSTMSPRYLQSNSSSHTRPFSAIAELLDNAVDPDVSARTVFIDVEEVKNKSCLTFTDDGCGMTPHKLHRMLSFGFTDKVIKKSQCPIGVFGNGFKSGSMRLGKDALVFTKNGGTLTVGLLSQTYLECVQAQAVIVPIVPFNQQNKKMIITEDSLPSLEAILNYSIFNRENDLLAQFDAIPGKKGTRVLIWNIRRNKNGKSELDFDTDQYDILVSDFDTEEKMTGGVTSELPETEYSLRAFCGILYMKPRMKIFLRQKKVTTQMIAKSLANVEYDTYKPTFTNKQVRITFGFSCKNSNQFGIMMYHNNRLIKSFEKVGCQVKPTRGEGVGVIGVIECNFLKPAYNKQDFEYTKEYRLTINALAQKLNAYWKEKTSQDNFETSTVARPIPKVPDQTWVQCDECLKWRKLPGKIDPSMLPARWFCYYNSHPKYRRCSVPEEQELTDEDLCLSKAKKQEQTVEEKKKMPMENENHQVFSNPPKILTVQEMAGLNNKTIGYEGIHSPSVLPSGGEESRSPSLQLKPLDSSVLQFSSKYKWILGEEPVEKRRRLQNEMTTPSLDYSMPAPYRRVEAPVAYPEGENSHDKSSSERSTPPYLFPEYPEASKNTGQNREVSILYPGAKDQRQGSLLPEELEDQMPRLVAEESNRGSTTINKEEVNKGPFVAVVGVAKGVRDSGAPIQLIPFNREELAERRKAVESWNPVPYSVASAAIPAAAIGEKARGYEESEGHNTPKLKNQRELEELKRTTEKLERVLAERNLFQQKVEELEQERNHWQSEFKKVQHELVIYSTQEAEGLYWSKKHMGYRQAEFQILKAELERTKEEKQELKEKLKETETHLEMLQKAQGFGKAYAATYPRQLSPYFCPPSLGAS

SEQ ID NO: 1168 - protein, 1101 aa, Homo sapiens
MESLLLPVLLLLAILWTQAAALINLKYSVEEEQRAGTVIANVAKDAREAGFALDPRQASAFRVVSNSAPHLVDINPSSGLLVTKQKIDRDLLCRQSPKCIISLEVMSSSMEICVIKVEIKDLNDNAPSFPAAQIELEISEAASPGTRIPLDSAYDPDSGSFGVQTYELTPNELFGLEIKTRGDGSRFAELVVEKSLDRETQSHYSFRITALDGGDPPRLGTVGLSIKVTDSNDNNPVFSESTYAVSVPENSPPNTPVIRLNASDPDEGTNGQVVYSFYGYVNDRTRELFQIDPHSGLVTVTGALDYEEGHVYELDVQAKDLGPNSIPAHCKVTVSVLDTNDNPPVINLLSVNSELVEVSESAPPGYVIALVRVSDRDSGLNGRVQCRLLGNVPFRLQEYESFSTILVDGRLDREQHDQYNLTIQARDGGVPMLQSAKSFTVLITDENDNHPHFSKPYYQVIVQENNTPGAYLLSVSARDPDLGLNGSVSYQIVPSQVRDMPVFTYVSINPNSGDIYALRSFNHEQTKAFEFKVLAKDGGLPSLQSNATVRVIILDVNDNTPVITAPPLINGTAEVYIPRNSGIGYLVTVVKAEDYDEGENGRVTYDMTEGDRGFFEIDQVNGEVRTTRTFGESSKSSYELIVVAHDHGKTSLSASALVLIYLSPALDAQESMGSVNLSLIFIIALGSIAGILFVTMIFVAIKCKRDNKEIRTYNCRIAEYSYGHQKKSSKKKKISKNDIRLVPRDVEETDKMNVVSCSSLTSSLNYFDYHQQTLPLGCRRSESTFLNVENQNTRNTSANHIYHHSFNSQGPQQPDLIINGVPLPETENYSFDSNYVNSRAHLIKSSSTFKDLEGNSLKDSGHEESDQTDSEHDVQRSLYCDTAVNDVLNTSVTSMGSQMPDHDQNEGFHCREECRILGHSDRCWMPRNPMPIRSKSPEHVRNIIALSIEATAADVEAYDDCGPTKRTFATFGKDVSDHPAEERPTLKGKRTVDVTICSPKVNSVIREAGNGCEAISPVTSPLHLKSSLPTKPSVSYTIALAPPARDLEQYVNNVNNGPTRPSEAEPRGADSEKVMHEVSPILKEGRNKESPGVKRLKDIVL

SEQ ID NO: 1169 - protein, 335 aa, Homo sapiens
MLQGHSSVFQALLGTFFTWGMTAAGAALVFVFSSGQRRILDGSLGFAAGVMLAASYWSLLAPAVEMATSSGGFGAFAFFPVAVGFTLGAAFVYLADLLMPHLGAAEDPQTTLALNFGSTLMKKKSDPEGPALLFPESELSIRIDKSENGEAYQRKKAAATGLPEGPAVPVPSRGNLAQPGGSSWRRIALLILAITIHNVPEGLAVGVGFGAIEKTASATFESARNLAIGIGIQNFPEGLAVSLPLRGAGFSTWRAFWYGQLSGMVEPLAGVFGAFAVVLAEPILPYALAFAAGAMVYVVMDDIIPEAQISGNGKLASWASILGFVVMMSLDVGLG

SEQ ID NO: 1170 - protein, 462 aa, Homo sapiens
MGPDRVTARELCENDDLATSLVLDPYLGFRTHKMNVSPVPPLRRQQHLRSALETFLRQRDLEAAYRALTLGGWTARYFQSRGPRQEAALKTHVYRYLRAFLPESGFTILPCTRYSMETNGAKIVSTRAWKKNEKLELLVGCIAELREADEGLLRAGENDFSIMYSTRKRSAQLWLGPAAFINHDCKPNCKFVPADGNAACVKVLRDIEPGDEVTCFYGEGFFGEKNEHCECHTCERKGEGAFRTRPREPALPPRPLDKYQLRETKRRLQQGLDSGSRQGLLGPRACVHPSPLRRDPFCAACQPLRLPACSARPDTSPLWLQWLPQPQPRVRPRKRRRPRPRRAPVLSTHHAARVSLHRWGGCGPHCRLRGEALVALGQPPHARWAPQQDWHWARRYGLPYVVRVDLRRLAPAPPATPAPAGTPGPILIPKQALAFAPFSPPKRLRLVVSHGSIDLDVGGEEL

SEQ ID NO: 1171 - protein, 853 aa, Homo sapiens
MSLSEEQARSFLDQNPDFARQYFGKKLSPENVAAACEDGCPPDCDSLRDLCQVEESTALLELVQDMQESINMERVVFKVLRRLCTLLQADRCSLFMYRQRNGVAELATRLFSVQPDSVLEDCLVPPDSEIVFPLDIGVVGHVAQTKKMVNVEDVAECPHFSSFADELTDYKTKNMLATPIMNGKDVVAVIMAVNKLNGPFFTSEDEDVFLKYLNFATLYLKIYHLSYLHNCETRRGQVLLWSANKVFEELTDIERQFHKAFYTVRAYLNCERYSVGLLDMTKEKEFFDVWSVLMGESQPYSGPRTPDGREIVFYKVIDYVLHGKEEIKVIPTPSADHWALASGLPSYVAESGFICNIMNASADEMFKFQEGALDDSGWLIKNVLSMPIVNKKEEIVGVATFYNRKDGKPFDEQDEVLMESLTQFLGWSVMNTDTYDKMNKLENRKDIAQDMVLYHVKCDRDEIQLILPTRARLGKEPADCDEDELGEILKEELPGPTTFDIYEFHFSDLECTELDLVKCGIQMYYELGVVRKFQIPQEVLVRFLFSISKGYRRITYHNWRHGFNVAQTMFTLLMTGKLKSYYTDLEAFAMVTAGLCHDIDHRGTNNLYQMKSQNPLAKLHGSSILERHHLEFGKFLLSEETLNIYQNLNRRQHEHVIHLMDIAIIATDLALYFKKRAMFQKIVDESKNYQDKKSWVEYLSLETTRKEIVMAMMMTACDLSAITKPWEVQSKVALLVAAEFWEQGDLERTVLDQQPIPMMDRNKAAELPKLQVGFIDFVCTFVYKEFSRFHEEILPMFDRLQNNRKEWKALADEYEAKVKALEEKEEEERVAAKKGTEICNGGPAPKSSTCCIL

SEQ ID NO: 1172 - protein, 2200 aa, Homo sapiens
MVLAGLIRKLGHQLAEIRERALKSILCKIEHNLICYADLIQERQLFLHLLEWFNFPSVPMKEEVLNLLSRLVKYPPAVQHLVDVGAVEFLSKLRSNVEPNLQAEIDGILDGLFLLPSEVPALSSASYQTNQTELSKNPEILTGYFPQDKSNFQQMEVPPRPVVNQTVKCLKFSTFPWLPLTTTDRHVLSSNESSLRSSNHTLIWNTCELLKDVIMQDFPAEIFLQRPKIVQSLLSLLKLAFGDGKHRLALQSVSCLQQLCMYLRNRLNFHRDPGFFSNKHDTVSQNSSLSYCHEARGTHHSQNPSPGSSSPRPSVVGRTGQRPRGDGQDWDAASSSGSSSHAHVNSRISVHSPLDMGHIDLPELETEDTLELQFQQLSLPQFCVSILESAVPLLRTGSRQVIIRVLELLTEDMTLIGEAISTDIWDDSSLFGIDMKEKLLLVLGALGETMCYHKSSISLEQPEVMLVHHRMAFISISLFAVRLLQTLLPVEKASEFLSEPMSTALFLLSLDMPISLEYPNIHEAVVAYLEQLNSENYSIYKRTAEAVYSIECTCNFLSDIGKEGEKNLLELVELADQALRSFSYHQHFPLIKEIISICSKIWKSAQASPLLQGESQKVLLHMLSHPLPRVKAETYHCCLEITKECLGVHNVTKPVSSLCNGIHFLLHPKVLYEISVFGIQEPESEVNTAAKAILLYLLQGRLMMTALTWNKFIESLCPVIPILQGYADTEDPLGNCILLLSKASSDTEEMLPCTTRLKSMLRLLLVKKPSVRSLALKLLAFHLTSEEGADTKRPLIDARVLSRVTDLFIGKKPIELRLDDRRELVIKLETVEKVYEIFTSDDVDLVLRKSAAEQLAVIMQDIKMHAVVKKLCLIDKIIEYLNECVSQDGKVVECLVQPCLTLLRKVLCGDPVMRVSLSQQSSLLTVLFRVSLIFHEDCSVVTEVGALFCLLLFDEVSRMDMWSVNPSNKPSLPSVFSLPVSVFRRYHLPVHVIGHHAVSPYSIVLPLSADCLALKPVSDMLRIAWNLSWYHGSDNLLKQMNSETKTQEILDALKLSTEDILTLKITHMASGLQDCLHSIVQAATHREVRAAVTRMSFYLLNDRLSLKGCPGPCGVTLKSLAWHTALNRFLQVLPACTEDEKLLIDIIHFLNKLIKEQRKNSSLELLNWILELLLRHSANPLLDLLVLTESQAREETDDIRTAVRQQLQKELIALFDTLLLNFMEVTDRKCSELLYVFQTQLALKLLQCLKVTDAPHFYGLPSLERTLRGMANLTAFPGWSSHSPLTKPLDICVKYLSGLLEVITSFYVERGGNAMSFMGKGVTKSTILCLLHLSHEMMAQAGSLEWMSLWFLPLGSHSEEHIPTQQGLAWLIPLWVDRDPEVRFTSLGLGSALTTLETGCVALANSCQNISGGLWGTVVNILLDQSECSMVRREAAFILQNLLVIPMPTEIIKDYTWQGPCVHDEDSGLSLIGKPALQALLYHCHFYEHLNQMVKHCYLGRCMFDLNFSAFDRNSESNDLNGLDDSFKFWRAPSRTSQDRDPSSLSTSETTVAPSLGSTEFQPLVQSTTLLPEASHDQFVAQGHQESTSPRPPHDSSLSAPLPKLCVFVTPSLLSAMCSLLDNLLTIAPRDTAKAFRQAHLIELLCSIADATLIQTCVQELRALLPSSPPAEHTQAQVSFLLEYLSSLSRLLQSCLLVEPDLVIQDELVKPLITNIIGILTICTKDVLDKELISAFYHTWTHLFNLLAMLLRKAGAITLPFVTVALAKHWTAAIDMFCTCAGLSATCPALYTASLQFLSVLLTEEAKGHLQAKSKTHLCCSPTVASLLDDSQENQKSLEQLSDVILQCYEGKSSKDILKRVAANALMSLLAVSRRAQKHALKANLIDNCMEQMKHINAQLNLDSLRPGKAALKKKEDGVIKELSIAMQLLRNCLYQNEECKEAALEAHLVPVLHSLWPWILMDDSLMQISLQLLCVYTANFPNGCSSLCWSSCGQHPVQATHRGAVSNSLMLCILKLASQMPLENTTVQQMVFMLLSNLALSHDCKGVIQKSNFLQNFLSLALPKGGNKHLSNLTILWLKLLLNISSGEDGQQMILRLDGCLDLLTEMSKYKHKSSPLLPLLIFHNVCFSPANKPKILANEKVITVLAACLESENQNAQRIGAAALWALIYNYQKAKTALKSPSVKRRVDEAYSLAKKTP

SEQ ID NO: 1173 - protein, 162 aa, Homo sapiens
MALARPRPRLGDLIEISRFGYAHWAIYVGDGYVVHLAPASEIAGAGAASVLSALTNKAIVKKELLSVVAGGDNYRVNNKHDDRYTPLPSNKIVKRAEELVGQELPYSLTSDNCEHFVNHLRYGVSRSDQVTGAVTTVGVAAGLLAAASLVGILLARSKRERQ

SEQ ID NO: 1174 - protein, 411 aa, Homo sapiens
MAKRPGSPGSREMGLLTFRDVVIEFSLEEWQCLDHAQQNLYRDVMLENYRNLVSLGIAVSKPDLITCLEQNKEPWNIKRNEMVTKHPVMCSHFTQDLPPELGIKDSLQKVIPRRYGKSGHDNLQVKTCKSMGECEVQKGGCNEVNQCLSTTQNKIFQTHKCVKVFGKFSNSNRHKTRHTGKKHFKCKKYGKSFCMVSQLHQHQIIHTRENSYQCEECGKPFNCSSTLSKHKRIHTGEKPYRCEECGKAFTWSSTLTKHRRIHTGEKPYTCEECGQAFSRSSTLANHKRIHTGEKPYTCEECGKAFSLSSSLTYHKRIHTGEKPYTCEECGKAFNCSSTLKKHKIIHTGEKPYKCKECGKAFAFSSTLNTHKRIHTGEEPYKCEECDKAFKWSSSLANHKSMHTGEKPYKCE

SEQ ID NO: 1175 - protein, 2102 aa, Homo sapiens
MAAAPARGGGGGGGGGGGCSGSGSSASRGFYFNTVLSLARSLAVQRPASLEKVQKLLCMCPVDFHGIFQLDERRRDAVIALGIFLIESDLQHKDCVVPYLLRLLKGLPKVYWVEESTARKGRGALPVAESFSFCLVTLLSDVAYRDPSLRDEILEVLLQVLHVLLGMCQALEIQDKEYLCKYAIPCLIGISRAFGRYSNMEESLLSKLFPKIPPHSLRVLEELEGVRRRSFNDFRSILPSNLLTVCQEGTLKRKTSSVSSISQVSPERGMPPPSSPGGSAFHYFEASCLPDGTALEPEYYFSTISSSFSVSPLFNGVTYKEFNIPLEMLRELLNLVKKIVEEAVLKSLDAIVASVMEANPSADLYYTSFSDPLYLTMFKMLRDTLYYMKDLPTSFVKEIHDFVLEQFNTSQGELQKILHDADRIHNELSPLKLRCQANAACVDLMVWAVKDEQGAENLCIKLSEKLQSKTSSKVIIAHLPLLICCLQGLGRLCERFPVVVHSVTPSLRDFLVIPSPVLVKLYKYHSQYHTVAGNDIKISVTNEHSESTLNVMSGKKSQPSMYEQLRDIAIDNICRCLKAGLTVDPVIVEAFLASLSNRLYISQESDKDAHLIPDHTIRALGHIAVALRDTPKVMEPILQILQQKFCQPPSPLDVLIIDQLGCLVITGNQYIYQEVWNLFQQISVKASSVVYSATKDYKDHGYRHCSLAVINALANIAANIQDEHLVDELLMNLLELFVQLGLEGKRASERASEKGPALKASSSAGNLGVLIPVIAVLTRRLPPIKEAKPRLQKLFRDFWLYSVLMGFAVEGSGLWPEEWYEGVCEIATKSPLLTFPSKEPLRSVLQYNSAMKNDTVTPAELSELRSTIINLLDPPPEVSALINKLDFAMSTYLLSVYRLEYMRVLRSTDPDRFQVMFCYFEDKAIQKDKSGMMQCVIAVADKVFDAFLNMMADKAKTKENEEELERHAQFLLVNFNHIHKRIRRVADKYLSGLVDKFPHLLWSGTVLKTMLDILQTLSLSLSADIHKDQPYYDIPDAPYRITVPDTYEARESIVKDFAARCGMILQEAMKWAPTVTKSHLQEYLNKHQNWVSGLSQHTGLAMATESILHFAGYNKQNTTLGATQLSERPACVKKDYSNFMASLNLRNRYAGEVYGMIRFSGTTGQMSDLNKMMVQDLHSALDRSHPQHYTQAMFKLTAMLISSKDCDPQLLHHLCWGPLRMFNEHGMETALACWEWLLAGKDGVEVPFMREMAGAWHMTVEQKFGLFSAEIKEADPLAASEASQPKPCPPEVTPHYIWIDFLVQRFEIAKYCSSDQVEIFSSLLQRSMSLNIGGAKGSMNRHVAAIGPRFKLLTLGLSLLHADVVPNATIRNVLREKIYSTAFDYFSCPPKFPTQGEKRLREDISIMIKFWTAMFSDKKYLTASQLVPPDNQDTRSNLDITVGSRQQATQGWINTYPLSSGMSTISKKSGMSKKTNRGSQLHKYYMKRRTLLLSLLATEIERLITWYNPLSAPELELDQAGENSVANWRSKYISLSEKQWKDNVNLAWSISPYLAVQLPARFKNTEAIGNEVTRLVRLDPGAVSDVPEAIKFLVTWHTIDADAPELSHVLCWAPTDPPTGLSYFSSMYPPHPLTAQYGVKVLRSFPPDAILFYIPQIVQALRYDKMGYVREYILWAASKSQLLAHQFIWNMKTNIYLDEEGHQKDPDIGDLLDQLVEEITGSLSGPAKDFYQREFDFFNKITNVSAIIKPYPKGDERKKACLSALSEVKVQPGCYLPSNPEAIVLDIDYKSGTPMQSAAKAPYLAKFKVKRCGVSELEKEGLRCRSDSEDECSTQEADGQKISWQAAIFKVGDDCRQDMLALQIIDLFKNIFQLVGLDLFVFPYRVVATAPGCGVIECIPDCTSRDQLGRQTDFGMYDYFTRQYGDESTLAFQQARYNFIRSMAAYSLLLFLLQIKDRHNGNIMLDKKGHIIHIDFGFMFESSPGGNLGWEPDIKLTDEMVMIMGGKMEATPFKWFMEMCVRGYLAVRPYMDAVVSLVTLMLDTGLPCFRGQTIKLLKHRFSPNMTEREAANFIMKVIQSCFLSNRSRTYDMIQYYQNDIPY

SEQ ID NO: 1176 - protein, 329 aa, Homo sapiens
MAAQYGSMSFNPSTPGASYGPGRQEPRNSQLRIVLVGKTGAGKSATGNSILGRKVFHSGTAAKSITKKCEKRSSSWKETELVVVDTPGIFDTEVPNAETSKEIIRCILLTSPGPHALLLVVPLGRYTEEEHKATEKILKMFGERARSFMILIFTRKDDLGDTNLHDYLREAPEDIQDLMDIFGDRYCALNNKATGAEQEAQRAQLLGLIQRVVRENKEGCYTNRMYQRAEEEIQKQTQAMQELHRVELEREKARIREEYEEKIRKLEDKVEQEKRKKQMEKKLAEQEAHYAVRQQRARTEVESKDGILELIMTALQIASFILLRLFAED

SEQ ID NO: 1177 - protein, 482 aa, Homo sapiens
MAEAATPGTTATTSGAGAAAATAAAASPTPIPTVTAPSLGAGGGGGGSDGSGGGWTKQVTCRYFMHGVCKEGDNCRYSHDLSDSPYSVVCKYFQRGYCIYGDRCRYEHSKPLKQEEATATELTTKSSLAASSSLSSIVGPLVEMNTGEAESRNSNFATVGAGSEDWVNAIEFVPGQPYCGRTAPSCTEAPLQGSVTKEESEKEQTAVETKKQLCPYAAVGECRYGENCVYLHGDSCDMCGLQVLHPMDAAQRSQHIKSCIEAHEKDMELSFAVQRSKDMVCGICMEVVYEKANPSERRFGILSNCNHTYCLKCIRKWRSAKQFESKIIKSCPECRITSNFVIPSEYWVEEKEEKQKLILKYKEAMSNKACRYFDEGRGSCPFGGNCFYKHAYPDGRREEPQRQKVGTSSRYRAQRRNHFWELIEERENSNPFDNDEEEVVTFELGEMLLMLLAAGGDDELTDSEDEWDLFHDELEDFYDLDL

SEQ ID NO: 1178 - protein, 418 aa, Homo sapiens
MAGSLPPCVVDCGTGYTKLGYAGNTEPQFIIPSCIAIRESAKVVDQAQRRVLRGVDDLDFFIGDEAIDKPTYATKWPIRHGIIEDWDLMERFMEQVVFKYLRAEPEDHYFLMTEPPLNTPENREYLAEIMFESFNVPGLYIAVQAVLALAASWTSRQVGERTLTGIVIDSGDGVTHVIPVAEGYVIGSCIKHIPIAGRDITYFIQQLLREREVGIPPEQSLETAKAIKEKYCYICPDIVKEFAKYDVDPRKWIKQYTGINAINQKKFVIDVGYERFLGPEIFFHPEFANPDFMESISDVVDEVIQNCPIDVRRPLYKNVVLSGGSTMFRDFGRRLQRDLKRVVDARLRLSEELSGGRIKPKPVEVQVVTHHMQRYAVWFGGSMLASTPEFFQVCHTKKDYEEYGPSICRHNPVFGVMS

SEQ ID NO: 1179 - protein, 170 aa, Homo sapiens
MMAGMKIQLVCMLLLAFSSWSLCSDSEEEMKALEADFLTNMHTSKISKAHVPSWKMTLLNVCSLVNNLNSPAEETGEVHEEELVARRKLPTALDGFSLEAMLTIYQLHKICHSRAFQHWELIQEDILDTGNDKNGKEEVIKRKIPYILKRQLYENKPRRPYILKRDSYYY

SEQ ID NO: 1180 - protein, 171 aa, Homo sapiens
MHPFYTRAATMIGEIAAAVSFISKFLRTKGLTSERQLQTFSQSLQELLAEHYKHHWFPEKPCKGSGYRCIRINHKMDPLIGQAAQRIGLSSQELFRLLPSELTLWVDPYEVSYRIGEDGSICVLYEASPAGGSTQNSTNVQMVDSRISCKEELLLGRTSPSKNYNMMTVSG

SEQ ID NO: 1181 - protein, 1226 aa, Homo sapiens
MDREERKTINQGQEDEMEIYGYNLSRWKLAIVSLGVICSGGFLLLLLYWMPEWRVKATCVRAAIKDCEVVLLRTTDEFKMWFCAKIRVLSLETYPVSSPKSMSNKLSNGHAVCLIENPTEENRHRISKYSQTESQQIRYFTHHSVKYFWNDTIHNFDFLKGLDEGVSCTSIYEKHSAGLTKGMHAYRKLLYGVNEIAVKVPSVFKLLIKEVLNPFYIFQLFSVILWSTDEYYYYALAIVVMSIVSIVSSLYSIRKQYVMLHDMVATHSTVRVSVCRVNEEIEEIFSTDLVPGDVMVIPLNGTIMPCDAVLINGTCIVNESMLTGESVPVTKTNLPNPSVDVKGIGDELYNPETHKRHTLFCGTTVIQTRFYTGELVKAIVVRTGFSTSKGQLVRSILYPKPTDFKLYRDAYLFLLCLVAVAGIGFIYTIINSILNEVQVGVIIIESLDIITITVPPALPAAMTAGIVYAQRRLKKIGIFCISPQRINICGQLNLVCFDKTGTLTEDGLDLWGIQRVENARFLSPEENVCNEMLVKSQFVACMATCHSLTKIEGVLSGDPLDLKMFEAIGWILEEATEEETALHNRIMPTVVRPPKQLLPESTPAGNQEMELFELPATYEIGIVRQFPFSSALQRMSVVARVLGDRKMDAYMKGAPEAIAGLCKPETVPVDFQNVLEDFTKQGFRVIALAHRKLESKLTWHKVQNISRDAIENNMDFMGLIIMQNKLKQETPAVLEDLHKANIRTVMVTGDSMLTAVSVARDCGMILPQDKVIIAEALPPKDGKVAKINWHYADSLTQCSHPSAIDPEAIPVKLVHDSLEDLQMTRYHFAMNGKSFSVILEHFQDLVPKLMLHGTVFARMAPDQKTQLIEALQNVDYFVGMCGDGANDCGALKRAHGGISLSELEASVASPFTSKTPSISCVPNLIREGRAALITSFCVFKFMALYSIIQYFSVTLLYSILSNLGDFQFLFIDLAIILVVVFTMSLNPAWKELVAQRPPSGLISGALLFSVLSQIIICIGFQSLGFFWVKQQPWYEVWHPKSDACNTTGSGFWNSSHVDNETELDEHNIQNYENTTVFFISSFQYLIVAIAFSKGKPFRQPCYKNYFFVFSVIFLYIFILFIMLYPVASVDQVLQIVCVPYQWRVTMLIIVLVNAFVSITVEESVDRWGKCCLPWALGCRKKTPKAKYMYLAQELLVDPEWPPKPQTTTEAKALVKENGSCQIITIT

SEQ ID NO: 1182 - protein, 774 aa, Homo sapiens
MNPFYFHAVNIILHCLVTLVLMYTCDKTVFKNRGLAFVTALLFAVHPIHTEAVAGIVGRADVLACLLFLLAFLSYNRSLDQGCVGGSFPSTVSPFFLLLSLFLGTCAMLVKETGITVFGVCLVYDLFSLSNKQDKSSNGALCPRSPQQPGSPQPSSLPGHPHRENGKQQRFPHKGAWGGCHSPLPPEPKSSGFPVSPRAVWSMMRFLTYSYLLAFNVWLLLAPVTLCYDWQVGSIPLVETIWDMRNLATIFLAVVMALLSLHCLAAFKRLEHKEVLVGLLFLVFPFIPASNLFFRVGFVVAERVLYMPSMGYCILFVHGLSKLCTWLNRCGATTLIVSTVLLLLLFSWKTVKQNEIWLSRESLFRSGVQTLPHNAKVHYNYANFLKDQGRNKEAIYHYRTALKLYPRHASALNNLGTLTRDTAEAKMYYQRALQLHPQHNRALFNLGNLLKSQEKKEEAITLLKDSIKYGPEFADAYSSLASLLAEQERFKEAEEIYQTGIKNCPDSSDLHNNYGVFLVDTGLPEKAVAHYQQAIKLSPSHHVAMVNLGRLYRSLGENSMAEEWYKRALQVAHKAEILSPLGALYYNTGRYEEALQIYQEAAALQPSQRELRLALAQVLAVMGQTKEAEKMTNHIVSEETGCLECYRLLSAIYSKQENHDKALDAIDKALQLKPKDPKVISELFFTKGNQLREQNLLDKAFESYRVAVQLNPDQAQAWMNMGGIQHIKGKYVSARAYYERALQLVPDSKLLKENLAKLDRLEKRLQEVREKDQT

SEQ ID NO: 1183 - protein, 189 aa, Homo sapiens [sequence omitted]

SEQ ID NO: 1184 - protein, 1037 aa, Homo sapiens
MDLNRIIQALKGTIDPKLRIAAENELNQSYKIINFAPSLLRIIVSDHVEFPVRQAAAIYLKNMVTQYWPDREPPPGEAIFPFNIHENDRQQIRDNIVEGIIRSPDLVRVQLTMCLRAIIKHDFPGHWPGVVDKIDYYLQSQSSASWLGSLLCLYQLVKTYEYKKAEEREPLIIAMQIFLPRIQQQIVQLLPDSSYYSVLLQKQILKIFYALVQYALPLQLVNNQTMTTWMEIFRTIIDRTVPPETLHIDEDDRPELVWWKCKKWALHIVARLFERYGSPGNVTKEYFEFSEFFLKTYAVGIQQVLLKILDQYRQKEYVAPRVLQQAFNYLNQGVVHSITWKQMKPHIQNISEDVIFSVMCYKDEDEELWQEDPYEYIRMKFDIFEDYASPTTAAQTLLYTAAKKRKEVLPKMMAFCYQILTDPNFDPRKKDGALHVIGSLAEILLKKSLFKDQMELFLQNHVFPLLLSNLGYLRARSCWVLHAFSSLKFHNELNLRNAVELAKKSLIEDKEMPVKVEAALALQSLISNQIQAKEYMKPHVRPIMQELLHIVRETENDDVTNVIQKMICEYSQEVASIAVDMTQHLAEIFGKVLQSDEYEEVEDKTVMAMGILHTIDTILTVVEDHKEITQQLENICLRIIDLVLQKHVIEFYEEILSLAYSLTCHSISPQMWQLLGILYEVFQQDCFEYFTDMMPLLHNYVTIDTDTLLSNAKHLEILFTMCRKVLCGDAGEDAECHAAKLLEVIILQCKGRGIDQCIPLFVQLVLERLTRGVKTSELRTMCLQVAIAALYYNPDLLLHTLERIQLPHNPGPITVQFINQWMNDTDCFLGHHDRKMCIIGLSILLELQNRPPAVDAVVGQIVPSILFLFLGLKQVCATRQLVNREDRSKAEKADMEENEEISSDEEETNVTAQAMQSNNGRGEDEEEEDDDWDEEVLEETALEGFSTPLDLDNSVDEYQFFTQALITVQSRDAAWYQLLMAPLSEDQRTALQEVYTLAEHRRTVAEAKKKIEQQGGFTFENKGVLSAFNFGTVPSNN

SEQ ID NO: 1185 - protein, 1064 aa, Homo sapiens
MKIATVSVLLPLALCLIQDAASKNEDQEMCHEFQAFMKNGKLFCPQDKKFFQSLDGIMFINKCATCKMILEKEAKSQKRARHLARAPKATAPTELNCDDFKKGERDGDFICPDYYEAVCGTDGKTYDNRCALCAENAKTGSQIGVKSEGECKSSNPEQDVCSAFRPFVRDGRLGCTRENDPVLGPDGKTHGNKCAMCAELFLKEAENAKREGETRIRRNAEKDFCKEYEKQVRNGRLFCTRESDPVRGPDGRMHGNKCALCAEIFKQRFSEENSKTDQNLGKAEEKTKVKREIVKLCSQYQNQAKNGILFCTRENDPIRGPDGKMHGNLCSMCQAYFQAENEEKKKAEARARNKRESGKATSYAELCSEYRKLVRNGKLACTRENDPIQGPDGKVHGNTCSMCEVFFQAEEEEKKKKEGKSRNKRQSKSTASFEELCSEYRKSRKNGRLFCTRENDPIQGPDGKMHGNTCSMCEAFFQQEERARAKAKREAAKEICSEFRDQVRNGTLICTREHNPVRGPDGKMHGNKCAMCASVFKLEEEEKKNDKEEKGKVEAEKVKREAVQELCSEYRHYVRNGRLPCTRENDPIEGLDGKIHGNTCSMCEAFFQQEAKEKERAEPRAKVKREAEKETCDEFRRLLQNGKLFCTRENDPVRGPDGKTHGNKCAMCKAVFQKENEERKRKEEEDQRNAAGHGSSGGGGGNTQDECAEYREQMKNGRLSCTRESDPVRDADGKSYNNQCTMCKAKLEREAERKNEYSRSRSNGTGSESGKDTCDEFRSQMKNGKLICTRESDPVRGPDGKTHGNKCTMCKEKLEREAAEKKKKEDEDRSNTGERSNTGERSNDKEDLCREFRSMQRNGKLICTRENNPVRGPYGKMHINKCAMCQSIFDREANERKKKDEEKSSSKPSNNAKDECSEFRNYIRNNELICPRENDPVHGADGKFYTNKCYMCRAVFLTEALERAKLQEKPSHVRASQEEDSPDSFSSLDSEMCKDYRVLPRIGYLCPKDLKPVCGDDGQTYNNPCMLCHENLIRQTNTHIRSTGKCEESSTPGTTAASMPPSDE

SEQ ID NO: 1186 - protein, 241 aa, Homo sapiens
MAPVRRSAKWRPGGIEARGEGVSTVGYRNKNVRQKTWRPNHPQAFVGSVREGQGFAFRRKLKIQQSYKKLLRKEKKAQTSLESQFTDRYPDNLKHLYLAEEERHRKQARKVDHPLSEQVHQPLLEEQCSIDEPLFEDQCSFDQPQPEEQCIKTVNSFTIPKKNKKKTSNQKAQEEYEQIQAKRAAKKQEFERRKQEREEAQRQYKKKKMEVFKILNKKTKKGQPNLNVQMEYLLQKIQEKC

SEQ ID NO: 1187 - protein, 695 aa, Homo sapiens
MSPPKDPSPSLPLPSSSSHSSSPPSSSSTSVSGNAPDGSSPPQMTASEPLSQVSRGHPSPPTPNFRRRAVAQGAPREIPLYLPHHPKPEWAEYCLVSPGEDGLSDPAEMTSDECQPAEAPLGDIGSNHRDPHPIWGKDRSWTGQELSPLAGEDREKGSTGARKEEEGGPVLVKEKLGLKKLVLTQEQKTMLLDWNDSIPESVHLKAGERISQKSAENGRGGRVLKPVRPLLLPRAAGEPLPTQRGAQEKMGTPAEQAQGERNVPPPKSPLRLIANAIRRSLEPLLSNSEGGKKAWAKQESKTLPAQACTRSFSLRKTNSNKDGDQHSPGRNQSSAFSPPDPALRTHSLPNRPSKVFPALRSPPCSKIEDVPTLLEKVSLQENFPDASKPPKKRISLFSSLRLKDKSFESFLQESRQRKDIRDLFGSPKRKVLPEDSAQALEKLLQPFKSTSLRQAAPPPPPPPPPPPPPPTAGGADSKNFPLRAQVTEASSSASSTSSSSADEEFDPQLSLQLKEKKTLRRRKKLEKAMKQLVKQEELKRLYKAQAIQRQLEEVEERQRASEIQGVRLEKALRGEADSGTQDEAQLLQEWFKLVLEKNKLMRYESELLIMAQELELEDHQSRLEQKLREKMLKEESQKDEKDLNEEQEVFTELMQVIEQRDKLVDSLEEQRIREKAEDQHFESFVFSRGCQLSRT

SEQ ID NO: 1188 - protein, 1849 aa, Homo sapiens
MARLADYFIVVGYDHEKPGSGEGLGKIIQRFPQKDWDDTPFPQGIELFCQPGGWQLSRERKQPTFFVVVLTDIDSDRHYCSCLTFYEAEINLQGTKKEEIEGEAKVSGLIQPAEVFAPKSLVLVSRLYYPEIFRACLGLIYTVYVDSLNVSLESLIANLCACLVPAAGGSQKLFSLGAGDRQLIQTPLHDSLPITGTSVALLFQQLGIQNVLSLFCAVLTENKVLFHSASFQRLSDACRALESLMFPLKYSYPYIPILPAQLLEVLSSPTPFIIGVHSVFKTDVHELLDVIIADLDGGTIKIPECIHLSSLPEPLLHQTQSALSLILHPDLEVADHAFPPPRTALSHSKMLDKEVRAVFLRLFAQLFQGYRSCLQLIRIHAEPVIHFHKTAFLGQRGLVENDFLTKVLSGMAFAGFVSERGPPYRSCDLFDELVAFEVERIKVEENNPVKMIKHVRELAEQLFKNENPNPHMAFQKVPRPTEGSHLRVHILPFPEINEARVQELIQENVAKNQNAPPATRIEKKCVVPAGPPVVSIMDKVTTVFNSAQRLEVVRNCISFIFENKILETEKTLPAALRALKGKAARQCLTDELGLHVQQNRAILDHQQFDYIIRMMNCTLQDCSSLEEYNIAAALLPLTSAFYRKLAPGVSQFAYTCVQDHPIWTNQQFWETTFYNAVQEQVRSLYLSAKEDNHAPHLKQKDKLPDDHYQEKTAMDLAAEQLRLWPTLSKSTQQELVQHEESTVFSQAIHFANLMVNLLVPLDTSKNKLLRTSAPGDWESGSNSIVTNSIAGSVAESYDTESGFEDSENTDIANSVVRFITRFIDKVCTESGVTQDHIKSLHCMIPGIVAMHIETLEAVHRESRRLPPIQKPKILRPALLPGEEIVCEGLRVLLDPDGREEATGGLLGGPQLLPAEGALFLTTYRILFRGTPHDQLVGEQTVVRSFPIASITKEKKITMQNQLQQNMQEGLQITSASFQLIKVAFDEEVSPEVVEIFKKQLMKFRYPQSIFSTFAFAAGQTTPQIILPKQKEKNTSFRTFSKTIVKGAKRAGKMTIGRQYLLKKKTGTIVEERVNRPGWNEDDDVSVSDESELPTSTTLKASEKSTMEQLVEKACFRDYQRLGLGTISGSSSRSRPEYFRITASNRMYSLCRSYPGLLVVPQAVQDSSLPRVARCYRHNRLPVVCWKNSRSGTLLLRSGGFHGKGVVGLFKSQNSPQAAPTSSLESSSSIEQEKYLQALLNAVSVHQKLRGNSTLTVRPAFALSPGVWASLRSSTRLISSPTSFIDVGARLAGKDHSASFSNSSYLQNQLLKRQAALYIFGEKSQLRNFKVEFALNCEFVPVEFHEIRQVKASFKKLMRACIPSTIPTDSEVTFLKALGDSEWFPQLHRIMQLAVVVSEVLENGSSVLVCLEEGWDITAQVTSLVQLLSDPFYRTLEGFQMLVEKEWLSFGHKFSQRSSLTLNCQGSGFAPVFLQFLDCVHQVHNQYPTEFEFNLYYLKFLAFHYVSNRFKTFLLDSDYERLEHGTLFDDKGEKHAKKGVCIWECIDRMHKRSPIFFNYLYSPLEIEALKPNVNVSSLKKWDYYIEETLSTGPSYDWMMLTPKHFPSEDSDLAGEAGPRSQRRTVWPCYDDVSCTQPDALTSLFSEIEKLEHKLNQAPEKWQQLWERVTVDLKEEPRTDRSQRHLSRSPGIVSTNLPSYQKRSLLHLPDSSMGEEQNSSISPSNGVERRAATLYSQYTSKNDENRSFEGTLYKRGALLKGWKPRWFVLDVTKHQLRYYDSGEDTSCKGHIDLAEVEMVIPAGPSMGAPKHTSDKAFFDLKTSKRVYNFCAQDGQSAQQWMDKIQSCISDA

SEQ ID NO: 1189 - protein, 1124 aa, Homo sapiens
MGENEDEKQAQAGQVFENFVQASTCKGTLQAFNILTRHLDLDPLDHRNFYSKLKSKVTTWKAKALWYKLDKRGSHKEYKRGKSCTNTKCLIVGGGPCGLRTAIELAYLGAKVVVVEKRDSFSRNNVLHLWPFTIHDLRGLGAKKFYGKFCAGSIDHISIRQLQLILFKVALMLGVEIHVNVEFVKVLEPPEDQENQKIGWRAEFLPTDHSLSEFEFDVIIGADGRRNTLEGFRRKEFRGKLAIAITANFINRNSTAEAKVEEISGVAFIFNQKFFQDLKEETGIDLENIVYYKDCTHYFVMTAKKQSLLDKGVIINDYIDTEMLLCAENVNQDNLLSYAREAADFATNYQLPSLDFAMNHYGQPDVAMFDFTCMYASENAALVRERQAHQLLVALVGDSLLEPFWPMGTGCARGFLAAFDTAWMVKSWNQGTPPLELLAERESLYRLLPQTTPENINKNFEQYTLDPGTRYPNLNSHCVRPHQVKHLYITKELEHYPLERLGSVRRSVNLSRKESDIRPSKLLTWCQQQTEGYQHVNVTDLTTSWRSGLALCAIIHRFRPELINFDSLNEDDAVENNQLAFDVAEREFGIPPVTTGKEMASAQEPDKLSMVMYLSKFYELFRGTPLRPVDSWRKNYGENADLSLAKSSISNNYLNLTFPRKRTPRVDGQTGENDMNKRRRKGFTNLDEPSNFSSRSLGSNQECGSSKEGGNQNKVKSMANQLLAKFEESTRNPSLMKQERRVSGIGKPVLCSSSGPPVHSCCPKPEEATPSPSPPLKRQFPSVVVTGHVLRELKQVSAGSECLSRPWRARAKSDLQLGGTENFATLPSTRPRAQALSGVLWRLQQVEEKILQKRAQNLANREFHTKNIKEKAAHLASMFGHGDFPQNKLLSKGLSHTHPPSPPSRLPSPDPAASSSPSTVDSASPARKEKKSPSGFHFHPSHLRTVHPQLTVGKVSSGIGAAAEVLVNLYMNDHRPKAQATSPDLESMRKSFPLNLGGSDTCYFCKKRVYVMERLSAEGHFFHRECFRCSICATTLRLAAYTFDCDEGKFYCKPHFIHCKTNSKQRKRRAELKQQREEEATWQEQEAPRRDTPTESSCAVAAIGTLEGSPPVHFSLPVLHPLLG

SEQ ID NO: 1190 - protein, 2789 aa, Homo sapiens
MPSDAKDSVNGDLLLNWTSLKNILSGLNASFPLHNNTGSSTVTTSKSIKDPRLMRREESMGEQSSTAGLNEVLQFEKSSDNVNSEIKSTPSNSASSSEVVPGDCAVLTNGLDTPCFKTSVNDSQSWAHNMGSEDYDCIPPNKVTMAGQCKDQGNFSFPISVSNVVSEVENQNHSEEKAQRAQQESGNAYTKEYSSHIFQDSQSSDLKTIYQTGCQTSTVFPLKKKVSIDEYLQNTGKMKNFADLEDSSKHEEKQTSWKEIDNDFTNETKISPIDNYIVLHQEYKESESHNSFGKSCDKILITQELEITKSSTSTIKDKDELDHLALEWQITPSFESLSQKHPQHSVEYEGNIHTSLAIAQKLMELKLGKINQNYASIITEAFPKPKDIPQAKEMFIDTVISSYNIETAHDSSNCSITREHICVHRKNENEPVSLENIQRDYKETAYVEDRGQDHNLFCNSQLSNDIWLNVNFKKQTDRENQNEAKENSASCVENNIENIYGDKKQDSHTNENFSNIDEKEDKNYHNIEILSSEEFSTKFNLICREDNAVSAATALLESEEDTISAVKQKDTENTGRSVEHLASTTFPKTASSSVCVASNAAIQIASATMPALSLNNDDHQIYQFKETCSSESPDFGLLVKHRVSDCEIDTDKNKSQESFHQSINENLVLQSIELESEIEIELEDCDDAFIFQQDTHSHENMLCEEFVTSYKALKSRISWEGLLALDNGEMEVLESTTGRENSDQHYSKESNYFYSSTQNNETELTSPILLPDLQIKITNIFRPGFSPTADSLALKDSFCTHVTEATKPEINKEDGEILGFDIYSQPFGENADYPCEDKVDNIRQESGPVSNSEISLSFDLSRNTDVNHTSENQNSESLFTEPSNVTTIDDGSRCFFTKSKTDYNDTKNKKEVESRISKRKLHISSRDQNIPHKDLRRHKIYGRKRRLTSQDSSECFSSLSQGRIKTFSQSEKHIKSVLNILSDEASLCKSKCLSRKLDKAVVHLKKAHRRVHTSLQLITKVGEERKGPLPKSYAIICNNFWESCDLQGYSSVSQRKYYSTKHFSSKRKYDKRRKKRAPKADISKSLTHVSKHKSYKTSGEKKCLSRKSMASSVSKSHPTTSHMGEFCNQEHPESQLPVSSTSQSTSQSVYYNSSVSNPSLSEEHQPFSGKTAYLFSPDHSDEKLIEKENQIDTAFLSSTSKYEKLEKHSANHNVKDATKENSCDANEVINESNSVSLSCIKENINSSTGNDCDATCIGHTKAKTDVLISVLDSNVKHFLNDLYQQGNLILSDCKRNLEVKWTDPIERPKQNIITGNFLMGPLNLTLIASKKYSIPQLSAAAVTDSEGESSKSYLDKQRILTVDSFAASSTVPHCEQSCREKELLKTEQCSSGNCLHTDGNETNVTENYELDVASGTEEDKSYGENIVELSSSDSSLLLKDNVKGSSSETCIVKKDTEDRITWKVKQAEKAKDSVYKRSMTEGSTVNTEYKNQKNQISEESCLNEKIITTNLIDSHLSTKNTTTESVPLKNTVSNPLNKREKKGEIKVSKDSQSDLTLHSEIAYISKPGILGVNHTPILPAHSETCKVPTLLKKPASYVSDFKEKHCSANHTALIANLSQILQRADEASSLQILQEETKVCLNILPLFVEAFERKQECSVEQILISRELLVDQNLWNNCKHTLKPCAVDTLVELQMMMETIQFIENKKRHLEGEPTLRSLLWYDETLYAELLGKPRGFQQQSNFYPGFQGRLKYNAFCELQTYHDQLVELLEETKREKNSYYVFLKYKRQVNECEAIMEHCSDCFDFSLSVPFTCGVNFGDSLEDLEILRKSTLKLINVCGDSPKVHSYPGKQDHLWIIIEMISSKVNFIKNNEAVRVKISLYGLEHIFFDAAKNLVWKERTQSFSKKYSQKKDEERLLRVNKCAFSKLQKIYDTLSKDLNNEPISPIGLEEDTIIASRKSDHPINEATISIENSKFNSNLLAHPDICCISEILDQAEFADLKKLQDLTLRCTDHLEILKKYFQMLQDNNMDNIFITEENVLDVVINHSHEAIILKPEAIEMYIEIVMVSETIHFLKNSIAKKLDKQRFRGMLWFDLSLLPELVQCQEKMASFSFLKDNSTDVCLWKVIETAVSELKKDLDIICKYNEAVNCSYAIHLLSRELQELSEIKKLLKKSKYFISTYIDFVPYIASINYGSTVTELEYNYNQFSTLLKNVMSAPRKDLGKMAHIRKVMKTIEHMKMICTKNAELTISFFLCQMLYNRRKILQLKRKEKMNIHIVKPGENNNKFSISTMLPPVSECINKNISNSSKKRPSTVDKCEDSQEQQQDTTVSSCKKLKVDMKDVTKINREKATFKHPRTTGSHPKSENKIVPSSCDSLKRNHLTPKKVEMQRSLPGSLLPLENPKDTCASKSESKIDLTVSSDHFSGQQENLNSMKKRNVNFSAAETKSDKKDCAAFAICDQKSVHGTFSPDHGTLLQKFLKNSPDPTQKSCLSDINPETDVSLVPDASVLSKPIFCFVKDVHPDLEMNDTVFELQDNDIVNSSIKNSSCMTSPEPICIQNKIPTLQINKLQPTETESEDKYMKDTLNPNTVHTFGASGHITLNVNQGAEYSLSEQQNDKNSKVLMQNAATYWNELPQSACNPTYNSSEHLFGTSYPYSAWCVYQYSNSNGNAITQTYQGITSYEVQPSPSGLLTTVASTAQGTHSNLLYSQYFTYFAGEPQANGFVPVNGYFQSQIPASNFRQPIFSQYASHQPLPQATYPYLPNRFVPPEVPWVYAPWHQESFHPGH

SEQ ID NO: 1191 - protein, 621 aa, Homo sapiens
MPFTLHLRSRLPSAIRSLILQKKPNIRNTSSMAGELRPASLVVLPRSLAPAFERFCQVNTGPLPLLGQSEPEKWMLPPQGAISETRMGHPQFWKYEFGACTGSLASLEQYSEQLKDMVAFFLGCSFSLEEALEKAGLPRRDPAGHSQAGAYKTTVPCVTHAGFCCPLVVTMRPIPKDKLEGLVRACCSLGGEQGQPVHMGDPELLGIKELSKPAYGDAMVCPPGEVPVFWPSPLTSLGAVSSCETPLAFASIPGCTVMTDLKDAKAPPGCLTPERIPEVHHISQDPLHYSIASVSASQKIRELESMIGIDPGNRGIGHLLCKDELLKASLSLSHARSVLITTGFPTHFNHEPPEETDGPPGAVALVAFLQALEKEVAIIVDQRAWNLHQKIVEDAVEQGVLKTQIPILTYQGGSVEAAQAFLCKNGDPQTPRFDHLVAIERAGRAADGNYYNARKMNIKHLVDPIDDLFLAAKKIPGISSTGVGDGGNELGMGKVKEAVRRHIRHGDVIACDVEADFAVIAGVSNWGGYALACALYILYSCAVHSQYLRKAVGPSRAPGDQAWTQALPSVIKEEKMLGILVQHKVRSGVSGIVGMEVDGLPFHNTHAEMIQKLVDVTTAQV

SEQ ID NO: 1192 - protein, 2458 aa, Homo sapiens
MISTLATFPPFLHKDIIEYLSTSFLPMAILGSSRREGVPAHVNLSASSMLMIAMQYTSNPVYHCQLLECLMKYKQEVWKDLLYVIAYGPSQVKPPAVQMLFHYWPNLKPPGAISEYRGLQYTAWNPIHCQHIECHNAINKPAVKMCIDPSLSVALGDKPPPLYLCEECSERIAGDHSEWLIDVLLPQAEISAICQKKNCSSHVRRAVVTCFSAGCCGRHGNRPVRYCKRCHSNHHSNEVGAAAETHLYQTSPPPINTRECGAEELVCAVEAVISLLKEAEFHAEQREHELNRRRQLGLSSSHHSLDNADFDNKDDDKHDQRLLSQFGIWFLVSLCTPSENTPTESLARLVAMVFQWFHSTAYMMDDEVGSLVEKLKPQFVTKWLKTVCDVRFDVMVMCLLPKPMEFARVGGYWDKSCSTVTQLKEGLNRILCLIPYNVINQSVWECIMPEWLEAIRTEVPDNQLKEFREVLSKMFDIELCPLPFSMEEMFGFISCRFTGYPSSVQEQALLWLHVLSELDIMVPLQLLISMFSDGVNSVKELANQRKSRVSELAGNLASRRVSVASDPGRRVQHNMLSPFHSPFQSPFRSPLRSPFRSPFKNFGHPGGRTIDFDCEDDEMNLNCFILMFDLLLKQMELQDDGITMGLEHSLSKDIISIINNVFQAPWGGSHTCQKDEKAIECNLCQSSILCYQLACELLERLAPKEESRLVEPTDSLEDSLLSSRPEFIIGPEGEEEENPASKHGENPGNCTEPVEHAAVKNDTERKFCYQQLPVTLRLIYTIFQEMAKFEEPDILFNMLNCLKILCLHGECLYIARKDHPQFLAYIQDHMLIASLWRVVKSEFSQLSSLAVPLLLHALSLPHGADIFWTIINGNFNSKDWKMRFEAVEKVAVICRFLDIHSVTKNHLLKYSLAHAFCCFLTAVEDVNPAVATRAGLLLDTIKRPALQGLCLCLDFQFDTVVKDRPTILSKLLLLHFLKQDIPALSWEFFVNRFETLSLEAQLHLDCNKEFPFPTTITAVRTNVANLSDAALWKIKRARFARNRQKSVRSLRDSVKGPVESKRALSLPETLTSKIRQQSPENDNTIKDLLPEDAGIDHQTVHQLITVLMKFMAKDESSAESDISSAKAFNTVKRHLYVLLGYDQQEGCFMIAPQKMRLSTCFNAFIAGIAQVMDYNINLGKHLLPLVVQVLKYCSCPQLRHYFQQPPRCSLWSLKPHIRQMWLKALLVILYKYPYRDCDISKILLHLIHITVNTLNAQYHSCKPHATAGPLYSDNSNISRYSEKEKGEIELAEYRETGALQDSLLHCVREESIPKKKLRSFKQKSLDIGNADSLLFTLDEHRRKSCIDRCDIEKPPTQAAYIAQRPNDPGRSRQNSATRPDNSEIPENPAMEGFPDARRPVIPEVRLNCMETFEVKVDSPVKPAPKEDLDLIDLSSDSTSGPEKHSILSTSDSDSLVFEPLPPLRIVESDEEEETMNQGDDGPSGKNAASSPSVPSHPSVLSLSTAPLVQVSVEDCSKDFSSKDSGNNQSAGNTDSALITLEDPMDAEGSSKPEELPEFSCGSPLTLKQKRDLLQKSFALPEMSLDDHPDPGTEGEKPGELMPSSGAKTVLLKVPEDAENPTESEKPDTSAESDTEQNPERKVEEDGAEESEFKIQIVPRQRKQRKIAVSAIQREYLDISFNILDKLGEQKDPDPSTKGLSTLEMPRESSSAPTLDAGVPETSSHSSISTQYRQMKRGSLGVLTMSQLMKRQLEHQSSAPHNISNWDTEQIQPGKRQCNVPTCLNPDLEGQPLRMRGATKSSLLSAPSIVSMFVPAPEEFTDEQPTVMTDKCHDCGAILEEYDEETLGLAIVVLSTFIHLSPDLAAPLLLDIMQSVGRLASSTTFSNQAESMMVPGNAAGVAKQFLRCIFHQLAPNGIFPQLFQSTIKDGTFLRTLASSLMDFNELSSIAALSQLLEGLNNKKNLPAGGAMIRCLENIATFMEALPMDSPSSLWTTISNQFQTFFAKLPCVLPLKCSLDSSLRIMICLLKIPSTNATRSLLEPFSKLLSFVIQNAVFTLAYLVELCGLCYRAFTKERDKFYLSRSVVLELLQALKLKSPLPDTNLLLLVQFICADAGTKLAESTILSKQMIASVPGCGTAAMECVRQYINEVLDFMADMHTLTKLKSHMKTCSQPLHEDTFGGHLKVGLAQIAAMDISRGNHRDNKAVIRYLPWLYHPPSAMQQGPKEFIECVSHIRLLSWLLLGSLTHNAVCPNASSPCLPIPLDAGSHVADHLIVILIGFPEQSKTSVLHMCSLFHAFIFAQLWTVYCEQSAVATNLQNQNEFSFTAILTALEFWSRVTPSILQLMAHNKVMVEMVCLHVISLMEALQECNSTIFVKLIPMWLPMIQSNIKHLSAGLQLRLQAIQNHVNHHSLRTLPGSGQSSAGLAALRKWLQCTQFKMAQVEIQSSEAASQFYPL

SEQ ID NO: 1193 - protein, 1116 aa, Homo sapiens
MESPLIYVSVLLLNIFEFSSGIVYNKDDTEKRFACSNKGFPQENEIIKLYLFLENLKIQCFFQTENEIASKAMLSVFTSGGLAPSLGIMNSTYNGIFHFNLTLFSDRILWLVDIPRENITQSTDIAAVEEWLVRITLHHGLNIYATEGTLLDVIREPILQWTPGDVIPESEISKLYPHVVDLKVTKCPCANDVALLGFIVDTIVDGVYIGITFGGFWHDYDTTWFNMTQTIYSQLQEEYEDLSLVDMVLTNHFLVILTSLGLFVSEDLRYPSRHSLSFSRADFCGFERVDYVKGKLWYNERCFANREHFEVDYVTVTFERNRTLSESSSCFYSQEPFLEWVPCLPHIFKGIKIFPTVLTFLVDQERGTGVYLFYNKVRKTAIASVSTLRNNEPNSQSKFPIFRFPSSFSSPVGMVFHPRSHFLYAYGNQIWLSVDGGNTFQLIANFHDDIIKKTFHSFYTSAITFVSQRGKVYSTKAGMGRYSAVGSVTERIFTLYYDHLGFLHKLTLGRFEASGPPTAFGNSRNLFGQPPDMGFETALAPQHTSLDEIIFFAYVPENEPQETIYSKKFGNIHYGKVIHSGKTGRAYIRKVLQHTTPKGFLSSVIAEMKEPFGLEEVNESSCLSSSLLINKAGNVYKLTLDSQVVQALFEDTDIEKTVVLPGYSSFLITSILDNKNALAIATMPESAPNNMTFLKSTWFLYNFGQRNGRTWKIYSKPCNYWFQHDDSPSLNIVKYIDLGNSYVLKAKVIRNAKGFRMLEIPLLTVFVGNPNLLEVTAEVTFDDTDSYVITISAASKVLHQGSTSLAFIMWSASTECFVTTMVPTLKSSCSYLRSMHHIPSKFIPFEDWISGVHKDSQGFNLIKTLPINYRPPSNMGIAIPLTDNFYHADPSKPIPRNMFHMSKKTGKFKQCANVSTREECNCTKDQKFSHAVAFSDCREKVPRFKFPITQYPVSLEIINEDGRVPLQSPYLVTVTEVNMRHNWKLKHTVPENIKRMKQLVEPILGAAVYNPSGLNLSIKGSELFHFRVTVISGVTFCNLIEEFQIYVDEAPLPFPGHTLIAVATAVVLGGLIFIAFMFQLQGIHPWRTFQRWIRRNQEKFSSISLSELIHRSKSEE

SEQ ID NO: 1194 - protein, 702 aa, Homo sapiens
MTSRNQLVQKVLQELQEAVECEGLEGLIGASLEAKQVLSSFTLPTCREGGPGLQVLEVDSVALSLYPEDAPRNMLPLVCKGEGSLLFEAASMLLWGDAGLSLELRARTVVEMLLHRHYYLQGMIDSKVMLQAVRYSLCSEESPEMTSLPPATLEAIFDADVKASCFPSSFSNVWHLYALASVLQRNIYSIYPMRNLKIRPYFNRVIRPRRCDHVPSTLHIMWAGQPLTSHFFRHQYFAPVVGLEEVEAEGAPGVAPALPALAPLSSPAKTLELLNREPGLSYSHLCERYSVTKSTFYRWRRQSQEHRQKVAARFSAKHFLQDSFHRGGVVPLQQFLQRFPEISRSTYYAWKHELLGSGTCPALPPREVLGMEELEKLPEEQVAEEELECSALAVSSPGMVLMQRAKLYLEHCISLNTLVPYRCFKRRFPGISRSTYYNWRRKALRRNPSFKPAPALSAAGTPQLASVGEGAVIPWKSEAEEGAGNATGEDPPAPGELLPLRMPLSRWQRRLRRAARRQVLSGHLPFCRFRLRYPSLSPSAFWVWKSLARGWPRGLSKLQVPVPTLGKGGQEAEEKQEKEAGRDVTAVMAPPVGASSEDVEGGPSREGALQEGATAQGQPHSGPLLSQPVVAAAGGRDGRMLVMDMIATTKFKAQAKLFLQKRFQSKSFPSYKEFSALFPLTARSTYYMWKRALYDGLTLVDG

SEQ ID NO: 1195 - protein, 470 aa, Homo sapiens
MLRGISQLPAVATMSWVLLPVLWLIVQTQAIAIKQTPELTLHEIVCPKKLHILHKREIKNNQTEKHGKEERYEPEVQYQMILNGEEIILSLQKTKHLLGPDYTETLYSPRGEEITTKPENMEHCYYKGNILNEKNSVASISTCDGLRGYFTHHHQRYQIKPLKSTDEKEHAVFTSNQEEQDPANHTCGVKSTDGKQGPIRISRSLKSPEKEDFLRAQKYIDLYLVLDNAFYKNYNENLTLIRSFVFDVMNLLNVIYNTIDVQVALVGMEIWSDGDKIKVVPSASTTFDNFLRWHSSNLGKKIHDHAQLLSGISFNNRRVGLAASNSLCSPSSVAVIEAKKKNNVALVGVMSHELGHVLGMPDVPFNTKCPSGSCVMNQYLSSKFPKDFSTSCRAHFERYLLSQKPKCLLQAPIPTNIMTTPVCGNHLLEVGEDCDCGSPKECTNLCCEALTCKLKPGTDCGGDAPNHTTE

SEQ ID NO: 1196 - protein, 598 aa, Homo sapiens
MENSSAASASSEAGSSRSQEIEELERFIDSYVLEYQVQGLLADKTEGDGESERTQSHISQWTADCSEPLDSSCSFSRGRAPPQQNGSKDNSLDMLGTDIWAANTFDSFSGATWDLQPEKLDFTQFHRKVRHTPKQPLPHIDREGCGKGKLEDGDGINLNDIEKVLPAWQGYHPMPHEVEIAHTKKLFRRRRNDRRRQQRPPGGNKPQQHGDHQPGSAKHNRDHQKSYQGGSAPHPSGRPTHHGYSQNRRWHHGNMKHPPGDKGEAGAHRNAKETMTIENPKLEDTAGDTGHSSLEAPRSPDTLAPVASERLPPQQSGGPEVETKRKDSILPERIGERPKITLLQSSKDRLRRRLKEKDEVAVETTTPQQNKMDKLIEILNSMRNNSSDVDTKLTTFMEEAQNSTNSEEMLGEIVRTIYQKAVSDRSFAFTAAKLCDKMALFMVEGTKFRSLLLNMLQKDFTVREELQQQDVERWLGFITFLCEVFGTMRSSTGEPFRVLVCPIYTCLRELLQSQDVKEDAVLCCSMELQSTGRLLEEQLPEMMTELLASARDKMLCPSESMLTRSLLLEVIELHANSWNPLTPPITQYYNRTIQKLTA

SEQ ID NO: 1197 - protein, 420 aa, Homo sapiens
MIIVAHVLLILLGATEILQADLLPDEKISLLPPVNFTIKVTGLAQVLLQWKPNPDQEQRNVNLEYQVKINAPKEDDYETRITESKCVTILHKGFSASVRTILQNDHSLLASSWASAELHAPPGSPGTSIVNLTCTTNTTEDNYSRLRSYQVSLHCTWLVGTDAPEDTQYFLYYRYGSWTEECQEYSKDTLGRNIACWFPRTFILSKGRDWLAVLVNGSSKHSAIRPFDQLFALHAIDQINPPLNVTAEIEGTRLSIQWEKPVSAFPIHCFDYEVKIHNTRNGYLQIEKLMTNAFISIIDDLSKYDVQVRAAVSSMCREAGLWSEWSQPIYVGNDEHKPLREWFVIVIMATICFILLILSLICKICHLWIKLFPPIPAPKSNIKDLFVTTNYEKAGSSETEIEVICYIEKPGVETLEDSVF

SEQ ID NO: 1198 - protein, 213 aa, Homo sapiens
MPRRAENWDEAEVGAEEAGVEEYGPEEDGGEESGAEESGPEESGPEELGAEEEMEAGRPRPVLRSVNSREPSQVIFCNRSPRVVLPVWLNFDGEPQPYPTLPPGTGRRIHSYRGHLWLFRDAGTHDGLLVNQTELFVPSLNVDGQPIFANITLPVYTLKERCLQVVRSLVKPENYRRLDIVRSLYEDLEDHPNVQKDLERLTQERIAHQRMGD

SEQ ID NO: 1199 - protein, 657 aa, Homo sapiens
MQWRALVLGLVLLRLGLHGVLWLVFGLGPSMGFYQRFPLSFGFQRLRSPDGPASPTSGPVGRPGGVSGPSWLQPPGTGAAQSPRKAPRRPGPGMCGPANWGYVLGGRGRGPDEYEKRYSGAFPPQLRAQMRDLARGMFVFGYDNYMAHAFPQDELNPIHCRGRGPDRGDPSNLNINDVLGNYSLTLVDALDTLAIMGNSSEFQKAVKLVINTVSFDKDSTVQVFEATIRVLGSLLSAHRIITDSKQPFGDMTIKDYDNELLYMAHDLAVRLLPAFENTKTGIPYPRVNLKTGVPPDTNNETCTAGAGSLLVEFGILSRLLGDSTFEWVARRAVKALWNLRSNDTGLLGNVVNIQTGHWVGKQSGLGAGLDSFYEYLLKSYILFGEKEDLEMFNAAYQSIQNYLRRGREACNEGEGDPPLYVNVNMFSGQLMNTWIDSLQAFFPGLQVLIGDVEDAICLHAFYYAIWKRYGALPERYNWQLQAPDVLFYPLRPELVESTYLLYQATKNPFYLHVGMDILQSLEKYTKVKCGYATLHHVIDKSTEDRMESFFLSETCKYLYLLFDEDNPVHKSGTRYMFTTEGHIVSVDEHLRELPWKEFFSEEGGQDQGGKSVHRPKPHELKVINSSSNCNRVPDERRYSLPLKSIYMRQIDQMVGLI

SEQ ID NO: 1200 - protein, 1224 aa, Homo sapiens
MEPLLLGRGLIVYLMFLLLKFSKAIEIPSSVQQVPTIIKQSKVQVAFPFDEYFQIECEAKGNPEPTFSWTKDGNPFYFTDHRIIPSNNSGTFRIPNEGHISHFQGKYRCFASNKLGIAMSEEIEFIVPSVPKFPKEKIDPLEVEEGDPIVLPCNPPKGLPPLHIYWMNIELEHIEQDERVYMSQKGDLYFANVEEKDSRNDYCCFAAFPRLRTIVQKMPMKLTVNSLKHANDSSSSTEIGSKANSIKQRKPKLLLPPTESGSESSITILKGEILLLECFAEGLPTPQVDWNKIGGDLPKGRETKENYGKTLKIENVSYQDKGNYRCTASNFLGTATHDFHVIVEEPPRWTKKPQSAVYSTGSNGILLCEAEGEPQPTIKWRVNGSPVDNHPFAGDVVFPREISFTNLQPNHTAVYQCEASNVHGTILANANIDVVDVRPLIQTKDGENYATVVGYSAFLHCEFFASPEAVVSWQKVEEVKPLEGRRYHIYENGTLQINRTTEEDAGSYSCWVENAIGKTAVTANLDIRNATKLRVSPKNPRIPKLHMLELHCESKCDSHLKHSLKLSWSKDGEAFEINGTEDGRIIIDGANLTISNVTLEDQGIYCCSAHTALDSAADITQVTVLDVPDPPENLHLSERQNRSVRLTWEAGADHNSNISEYIVEFEGNKEEPGRWEELTRVQGKKTTVILPLAPFVRYQFRVIAVNEVGRSQPSQPSDHHETPPAAPDRNPQNIRVQASQPKEMIIKWEPLKSMEQNGPGLEYRVTWKPQGAPVEWEEETVTNHTLRVMTPAVYAPYDVKVQAINQLGSGPDPQSVTLYSGEDYPDTAPVIHGVDVINSTLVKVTWSTVPKDRVHGRLKGYQINWWKTKSLLDGRTHPKEVNILRFSGQRNSGMVPSLDAFSEFHLTVLAYNSKGAGPESEPYIFQTPEGVPEQPTFLKVIKVDKDTATLSWGLPKKLNGNLTGYLLQYQIINDTYEIGELNDINITTPSKPSWHLSNLNATTKYKFYLRACTSQGCGKPITEESSTLGEGSKGIGKISGVNLTQKTHPIEVFEPGAEHIVRLMTKNWGDNDSIFQDVIETRGREYAGLYDDISTQGWFIGLMCAIALLTLLLLTVCFVKRNRGGKYSVKEKEDLHPDPEIQSVKDETFGEYSDSDEKPLKGSLRSLNRDMQPTESADSLVEYGEGDHGLFSEDGSFIGAYAGSKEKGSVESNGSSTATFPLRA

SEQ ID NO: 1201 - protein, 1625 aa, Homo sapiens
MGQKSWIEKTFCKRECIFVIPSMKDSNRCCCGQFTNQHIPPLPSATPSKNEEESKQVETQPEKWSVAKHTQSYPTDSYGVLEFQGGGYSNKAMYIRVSYDTKPDSLLHLMVKDWQLELPKLLISVHGGLQNFEMQPKLKQVFGKGLIKAAMTTGAWIFTGGVSTGVISHVGDALKDHSSKSRGRVCAIGIAPWGIVENKEDLVGKDVTRVYQTMSNPLSKLSVLNNSHTHFILADNGTLGKYGAEVKLRRLLEKHISLQKINTRLGQGVPLVGLVVEGGPNVVSIVLEYLQEEPPIPVVICDGSGRASDILSFAHKYCEEGGIINESLREQLLVTIQKTFNYNKAQSHQLFAIIMECMKKKELVTVFRMGSEGQQDIEMAILTALLKGTNVSAPDQLSLALAWNRVDIARSQIFVFGPHWPPLGSLAPPTDSKATEKEKKPPMATTKGGRGKGKGKKKGKVKEEVEEETDPRKIELLNWVNALEQAMLDALVLDRVDFVKLLIENGVNMQHFLTIPRLEELYNTRLGPPNTLHLLVRDVKKSNLPPDYHISLIDIGLVLEYLMGGAYRCNYTRKNFRTLYNNLFGPKRPKALKLLGMEDDEPPAKGKKKKKKKKEEEIDIDVDDPAVSRFQYPFHELMVWAVLMKRQKMAVFLWQRGEESMAKALVACKLYKAMAHESSESDLVDDISQDLDNNSKDFGQLALELLDQSYKHDEQIAMKLLTYELKNWSNSTCLKLAVAAKHRDFIAHTCSQMLLTDMWMGRLRMRKNPGLKVIMGILLPPTILFLEFRTYDDFSYQTSKENEDGKEKEEENTDANADAGSRKGDEENEHKKQRSIPIGTKICEFYNAPIVKFWFYTISYLGYLLLFNYVILVRMDGWPSLQEWIVISYIVSLALEKIREILMSEPGKLSQKIKVWLQEYWNITDLVAISTFMIGAILRLQNQPYMGYGRVIYCVDIIFWYIRVLDIFGVNKYLGPYVMMIGKMMIDMLYFVVIMLVVLMSFGVARQAILHPEEKPSWKLARNIFYMPYWMIYGEVFADQIDLYAMEINPPCGENLYDEEGKRLPPCIPGAWLTPALMACYLLVANILLVNLLIAVFNNTFFEVKSISNQVWKFQRYQLIMTFHDRPVLPPPMIILSHIYIIIMRLSGRCRKKREGDQEERDRGLKLFLSDEELKRLHEFEEQCVQEHFREKEDEQQSSSDERIRVTSERVENMSMRLEEINERETFMKTSLQTVDLRLAQLEELSNRMVNALENLAGIDRSDLIQARSRASSECEATYLLRQSSINSADGYSLYRYHFNGEELLFEDTSLSTSPGTGVRKKTCSFRIKEEKDVKTHLVPECQNSLHLSLGTSTSATPDGSHLAVDDLKNAEESKLGPDIGISKEDDERQTDSKKEETISPSLNKTDVIHGQDKSDVQNTQLTVETTNIEGTISYPLEETKITRYFPDETINACKTMKSRSFVYSRGRKLVGGVNQDVEYSSITDQQLTTEWQCQVQKITRSHSTDIPYIVSEAAVQAEHKEQFADMQDEHHVAEAIPRIPRLSLTITDRNGMENLLSVKPDQTLGFPSLRSKSLHGHPRNVKSIQGKLDRSGHASSVSSLVIVSGMTAEEKKVKKEKASTETEC

SEQ ID NO: 1202 - protein, 138 aa, Homo sapiens
MTALFLMSMLFGLTCGQAMSFCIPTEYTMHIERRECAYCLTINTTICAGYCMTRDINGKLFLPKYALSQDVCTYRDFIYRTVEIPGCPLHVAPYFSYPVALSCKCGKCNTDYSDCIHEAIKTNYCTKPQKSYLVGFSV

SEQ ID NO: 1203 - protein, 831 aa, Homo sapiens
MERPWGAADGLSRWPHGLGLLLLLQLLPPSTLSQDRLDAPPPPAAPLPRWSGPIGVSWGLRAAAAGGAFPRGGRWRRSAPGEDEECGRVRDFVAKLANNTHQHVFDDLRGSVSLSWVGDSTGVILVLTTFHVPLVIMTFGQSKLYRSEDYGKNFKDITDLINNTFIRTEFGMAIGPENSGKVVLTAEVSGGSRGGRIFRSSDFAKNFVQTDLPFHPLTQMMYSPQNSDYLLALSTENGLWVSKNFGGKWEEIHKAVCLAKWGSDNTIFFTTYANGSCKADLGALELWRTSDLGKSFKTIGVKIYSFGLGGRFLFASVMADKDTTRRIHVSTDQGDTWSMAQLPSVGQEQFYSILAANDDMVFMHVDEPGDTGFGTIFTSDDRGIVYSKSLDRHLYTTTGGETDFTNVTSLRGVYITSVLSEDNSIQTMITFDQGGRWTHLRKPENSECDATAKNKNECSLHIHASYSISQKLNVPMAPLSEPNAVGIVIAHGSVGDAISVMVPDVYISDDGGYSWTKMLEGPHYYTILDSGGIIVAIEHSSRPINVIKFSTDEGQCWQTYTFTRDPIYFTGLASEPGARSMNISIWGFTESFLTSQWVSYTIDFKDILERNCEEKDYTIWLAHSTDPEDYEDGCILGYKEQFLRLRKSSVCQNGRDYVVTKQPSICLCSLEDFLCDFGYYRPENDSKCVEQPELKGHDLEFCLYGREEHLTTNGYRKIPGDKCQGGVNPVREVKDLKKKCTSNFLSPEKQNSKSNSVPIILAIVGLMLVTVVAGVLIVKKYVCGGRFLVHRYSVLQQHAEANGVDGVDALDTASHTNKSGYHDDSDEDLLE

SEQ ID NO: 1204 - protein, 2471 aa, Homo sapiens
MPALRPALLWALLALWLCCAAPAHALQCRDGYEPCVNEGMCVTYHNGTGYCKCPEGFLGEYCQHRDPCEKNRCQNGGTCVAQAMLGKATCRCASGFTGEDCQYSTSHPCFVSRPCLNGGTCHMLSRDTYECTCQVGFTGKECQWTDACLSHPCANGSTCTTVANQFSCKCLTGFTGQKCETDVNECDIPGHCQHGGTCLNLPGSYQCQCPQGFTGQYCDSLYVPCAPSPCVNGGTCRQTGDFTFECNCLPGFEGSTCERNIDDCPNHRCQNGGVCVDGVNTYNCRCPPQWTGQFCTEDVDECLLQPNACQNGGTCANRNGGYGCVCVNGWSGDDCSENIDDCAFASCTPGSTCIDRVASFSCMCPEGKAGLLCHLDDACISNPCHKGALCDTNPLNGQYICTCPQGYKGADCTEDVDECAMANSNPCEHAGKCVNTDGAFHCECLKGYAGPRCEMDINECHSDPCQNDATCLDKIGGFTCLCMPGFKGVHCELEINECQSNPCVNNGQCVDKVNRFQCLCPPGFTGPVCQIDIDDCSSTPCLNGAKCIDHPNGYECQCATGFTGVLCEENIDNCDPDPCHHGQCQDGIDSYTCICNPGYMGAICSDQIDECYSSPCLNDGRCIDLVNGYQCNCQPGTSGVNCEINFDDCASNPCIHGICMDGINRYSCVCSPGFTGQRCNIDIDECASNPCRKGATCINGVNGFRCICPEGPHHPSCYSQVNECLSNPCIHGNCTGGLSGYKCLCDAGWVGINCEVDKNECLSNPCQNGGTCDNLVNGYRCTCKKGFKGYNCQVNIDECASNPCLNQGTCFDDISGYTCHCVLPYTGKNCQTVLAPCSPNPCENAAVCKESPNFESYTCLCAPGWQGQRCTIDIDECISKPCMNHGLCHNTQGSYMCECPPGFSGMDCEEDIDDCLANPCQNGGSCMDGVNTFSCLCLPGFTGDKCQTDMNECLSEPCKNGGTCSDYVNSYTCKCQAGFDGVHCENNINECTESSCFNGGTCVDGINSFSCLCPVGFTGSFCLHEINECSSHPCLNEGTCVDGLGTYRCSCPLGYTGKNCQTLVNLCSRSPCKNKGTCVQKKAESQCLCPSGWAGAYCDVPNVSCDIAASRRGVLVEHLCQHSGVCINAGNTHYCQCPLGYTGSYCEEQLDECASNPCQHGATCSDFIGGYRCECVPGYQGVNCEYEVDECQNQPCQNGGTCIDLVNHFKCSCPPGTRGLLCEENIDDCARGPHCLNGGQCMDRIGGYSCRCLPGFAGERCEGDINECLSNPCSSEGSLDCIQLTNDYLCVCRSAFTGRHCETFVDVCPQMPCLNGGTCAVASNMPDGFICRCPPGFSGARCQSSCGQVKCRKGEQCVHTASGPRCFCPSPRDCESGCASSPCQHGGSCHPQRQPPYYSCQCAPPFSGSRCELYTAPPSTPPATCLSQYCADKARDGVCDEACNSHACQWDGGDCSLTMENPWANCSSPLPCWDYINNQCDELCNTVECLFDNFECQGNSKTCKYDKYCADHFKDNHCDQGCNSEECGWDGLDCAADQPENLAEGTLVIVVLMPPEQLLQDARSFLRALGTLLHTNLRIKRDSQGELMVYPYYGEKSAAMKKQRMTRRSLPGEQEQEVAGSKVFLEIDNRQCVQDSDHCFKNTDAAAALLASHAIQGTLSYPLVSVVSESLTPERTQLLYLLAVAVVIILFIILLGVIMAKRKRKHGSLWLPEGFTLRRDASNHKRREPVGQDAVGLKNLSVQVSEANLIGTGTSEHWVDDEGPQPKKVKAEDEALLSEEDDPIDRRPWTQQHLEAADIRRTPSLALTPPQAEQEVDVLDVNVRGPDGCTPLMLASLRGGSSDLSDEDEDAEDSSANIITDLVYQGASLQAQTDRTGEMALHLAARYSRADAAKRLLDAGADANAQDNMGRCPLHAAVAADAQGVFQILIRNRVTDLDARMNDGTTPLILAARLAVEGMVAELINCQADVNAVDDHGKSALHWAAAVNNVEATLLLLKNGANRDMQDNKEETPLFLAAREGSYEAAKILLDHFANRDITDHMDRLPRDVARDRMHHDIVRLLDEYNVTPSPPGTVLTSALSPVICGPNRSFLSLKHTPMGKKSRRPSAKSTMPTSLPNLAKEAKDAKGSRRKKSLSEKVQLSESSVTLSPVDSLESPHTYVSDTTSSPMITSPGILQASPNPMLATAAPPAPVHAQHALSFSNLHEMQPLAHGASTVLPSVSQLLSHHHIVSPGSGSAGSLSRLHPVPVPADWMNRMEVNETQYNEMFGMVLAPAEGTHPGIAPQSRPPEGKHITTPREPLPPIVTFQLIPKGSIAQPAGAPQPQSTCPPAVAGPLPTMYQIPEMARLPSVAFPTAMMPQQDGQVAQTILPAYHPFPASVGKYPTPPSQHSYASSNAAERTPSHSGHLQGEHPYLTPSPESPDQWSSSSPHSASDWSDVTTSPTPGGAGGGQRGPGTHMSEPPHNNMQVYA

SEQ ID NO: 1205 - protein, 580 aa, Homo sapiens
MSENRKPLLGFVSKLTSGTALGNSGKTHCPLCLGLFKAPRLLPCLHTVCTTCLEQLEPFSVVDIRGGDSDTSSEGSIFQELKPRSLQSQIGILCPVCDAQVDLPMGGVKALTIDHLAVNDVMLESLRGEGQGLVCDLCNDREVEKRCQTCKANLCHFCCQAHRRQKKTTYHTMVDLKDLKGYSRIGKPILCPVHPAEELRLFCEFCDRPVCQDCVVGEHREHPCDFTSNVIHKHGDSVWELLKGTQPHVEALEEALAQIHIINSALQKRVEAVAADVRTFSEGYIKAIEEHRDKLLKQLEDIRAQKENSLQLQKAQLEQLLADMRTGVEFTEHLLTSGSDLEILITKRVVVERLRKLNKVQYSTRPGVNDKIRFCPQEKAGQCRGYEIYGTINTKEVDPAKCVLQGEDLHRAREKQTASFTLLCKDAAGEIMGRGGDNVQVAVVPKDKKDSPVRTMVQDNKDGTYYISYTPKEPGVYTVWVCIKEQHVQGSPFTVMVRRKHRPHSGVFHCCTFCSSGGQKTARCACGGTMPGGYLGCGHGHKGHPGHPHWSCCGKFNEKSECTWTGGQSAPRSLLRTVAL

SEQ ID NO: 1206 - protein, 1021 aa, Homo sapiens
MAGISYVASFFLLLTKLSIGQREVTVQKGPLFRAEGYPVSIGCNVTGHQGPSEQHFQWSVYLPTNPTQEVQIISTKDAAFSYAVYTQRVRSGDVYVERVQGNSVLLHISKLQMKDAGEYECHTPNTDEKYYGSYSAKTNLIVIPDTLSATMSSQTLGKEEGEPLALTCEASKATAQHTHLSVTWYLTQDGGGSQATEIISLSKDFILVPGPLYTERFAASDVQLNKLGPTTFRLSIERLQSSDQGQLFCEATEWIQDPDETWMFITKKQTDQTTLRIQPAVKDFQVNITADSLFAEGKPLELVCLVVSSGRDPQLQGIWFFNGTEIAHIDAGGVLGLKNDYKERASQGELQVSKLGPKAFSLKIFSLGPEDEGAYRCVVAEVMKTRTGSWQVLQRKQSPDSHVHLRKPAARSVVMSTKNKQQVVWEGETLAFLCKAGGAESPLSVSWWHIPRDQTQPEFVAGMGQDGIVQLGASYGVPSYHGNTRLEKMDWATFQLEITFTAITDSGTYECRVSEKSRNQARDLSWTQKISVTVKSLESSLQVSLMSRQPQVMLTNTFDLSCVVRAGYSDLKVPLTVTWQFQPASSHIFHQLIRITHNGTIEWGNFLSRFQKKTKVSQSLFRSQLLVHDATEEETGVYQCEVEVYDRNSLYNNRPPRASAISHPLRIAVTLPESKLKVNSRSQVQELSINSNTDIECSILSRSNGNLQLAIIWYFSPVSTNASWLKILEMDQTNVIKTGDEFHTPQRKQKFHTEKVSQDLFQLHILNVEDSDRGKYHCAVEEWLLSTNGTWHKLGEKKSGLTELKLKPTGSKVRVSKVYWTENVTEHREVAIRCSLESVGSSATLYSVMWYWNRENSGSKLLVHLQHDGLLEYGEEGLRRHLHCYRSSSTDFVLKLHQVEMEDAGMYWCRVAEWQLHGHPSKWINQASDESQRMVLTVLPSEPTLPSRICSSAPLLYFLFICPFVLLLLLLISLLCLYWKARKLSTLRSNTRKEKALWVDLKEAGGVTTNRREDEEEDEGN

SEQ ID NO: 1207 - protein, 739 aa, Homo sapiens
MPYLGSEDVVKELKKALCNPHIQADRLRYRNVIQRVIRYMTQGLDMSGVFMEMVKASATVDIVQKKLVYLYMCTYAPLKPDLALLAINTLCKDCSDPNPMVRGLALRSMCSLRMPGVQEYIQQPILNGLRDKASYVRRVAVLGCAKMHNLHGDSEVDGALVNELYSLLRDQDPIVVVNCLRSLEEILKQEGGVVINKPIAHHLLNRMSKLDQWGQAEVLNFLLRYQPRSEEELFDILNLLDSFLKSSSPGVVMGATKLFLILAKMFPHVQTDVLVRVKGPLLAACSSESRELCFVALCHVRQILHSLPGHFSSHYKKFFCSYSEPHYIKLQKVEVLCELVNDENVQQVLEELRGYCTDVSADFAQAAIFAIGGIARTYTDQCVQILTELLGLRQEHITTVVVQTFRDLVWLCPQCTEAVCQALPGCEENIQDSEGKQALIWLLGVHGERIPNAPYVLEDFVENVKSETFPAVKMELLTALLRLFLSRPAECQDMLGRLLYYCIEEEKDMAVRDRGLFYYRLLLVGIDEVKRILCSPKSDPTLGLLEDPAERPVNSWASDFNTLVPVYGKAHWATISKCQGAERCDPELPKTSSFAASGPLIPEENKERVQELPDSGALMLVPNRQLTADYFEKTWLSLKVAHQQVLPWRGEFHPDTLQMALQVVNIQTIAMSRAGSRPWKAYLSAQDDTGCLFLTELLLEPGNSEMQISVKQNEARTETLNSFISVLETVIGTIEEIKS

SEQ ID NO: 1208 - protein, 506 aa, Homo sapiens
MKKAEMGRFSISPDEDSSSYSSNSDFNYSYPTKQAALKSHYADVDPENQNFLLESNLGKKKYETEFHPGTTSFGMSVFNLSNAIVGSGILGLSYAMANTGIALFIILLTFVSIFSLYSVHLLLKTANEGGSLLYEQLGYKAFGLVGKLAASGSITMQNIGAMSSYLFIVKYELPLVIQALTNIEDKTGLWYLNGNYLVLLVSLVVILPLSLFRNLGYLGYTSGLSLLCMVFFLIVVICKKFQVPCPVEAALIINETINTTLTQPTALVPALSHNVTENDSCRPHYFIFNSQTVYAVPILIFSFVCHPAVLPIYEELKDRSRRRMMNVSKISFFAMFLMYLLAALFGYLTFYEHVESELLHTYSSILGTDILLLIVRLAVLMAVTLTVPVVIFPIRSSVTHLLCASKDFSWWRHSLITVSILAFTNLLVIFVPTIRDIFGFIGASAASMLIFILPSAFYIKLVKKEPMKSVQKIGALFFLLSGVLVMTGSMALIVLDWVHNAPGGGH

SEQ ID NO: 1209 - protein, 1771 aa, Homo sapiens
MSVLISQSVINYVEEENIPALKALLEKCKDVDERNECGQTPLMIAAEQGNLEIVKELIKNGANCNLEDLDNWTALISASKEGHVHIVEELLKCGVNLEHRDMGGWTALMWACYKGRTDVVELLLSHGANPSVTGLYSVYPIIWAAGRGHADIVHLLLQNGAKVNCSDKYGTTPLVWAARKGHLECVKHLLAMGADVDQEGANSMTALIVAVKGGYTQSVKEILKRNPNVNLTDKDGNTALMIASKEGHTEIVQDLLDAGTYVNIPDRSGDTVLIGAVRGGHVEIVRALLQKYADIDIRGQDNKTALYWAVEKGNATMVRDILQCNPDTEICTKDGETPLIKATKMRNIEVVELLLDKGAKVSAVDKKGDTPLHIAIRGRSRKLAELLLRNPKDGRLLYRPNKAGETPYNIDCSHQKSILTQIFGARHLSPTETDGDMLGYDLYSSALADILSEPTMQPPICVGLYAQWGSGKSFLLKKLEDEMKTFAGQQIEPLFQFSWLIVFLTLLLCGGLGLLFAFTVHPNLGIAVSLSFLALLYIFFIVIYFGGRREGESWNWAWVLSTRLARHIGYLELLLKLMFVNPPELPEQTTKALPVRFLFTDYNRLSSVGGETSLAEMIATLSDACEREFGFLATRLFRVFKTEDTQGKKKWKKTCCLPSFVIFLFIIGCIISGITLLAIFRVDPKHLTVNAVLISIASVVGLAFVLNCRTWWQVLDSLLNSQRKRLHNAASKLHKLKSEGFMKVLKCEVELMARMAKTIDSFTQNQTRLVVIIDGLDACEQDKVLQMLDTVRVLFSKGPFIAIFASDPHIIIKAINQNLNSVLRDSNINGHDYMRNIVHLPVFLNSRGLSNARKFLVTSATNGDVPCSDTTGIQEDADRRVSQNSLGEMTKLGSKTALNRRDTYRRRQMQRTITRQMSFDLTKLLVTEDWFSDISPQTMRRLLNIVSVTGRLLRANQISFNWDRLASWINLTEQWPYRTSWLILYLEETEGIPDQMTLKTIYERISKNIPTTKDVEPLLEIDGDIRNFEVFLSSRTPVLVARDVKVFLPCTVNLDPKLREIIADVRAAREQISIGGLAYPPLPLHEGPPRAPSGYSQPPSVCSSTSFNGPFAGGVVSPQPHSSYYSGMTGPQHPFYNRPFFAPYLYTPRYYPGGSQHLISRPSVKTSLPRDQNNGLEVIKEDAAEGLSSPTDSSRGSGPAPGPVVLLNSLNVDAVCEKLKQIEGLDQSMLPQYCTTIKKANINGRVLAQCNIDELKKEMNMNFGDWHLFRSTVLEMRNAESHVVPEDPRFLSESSSGPAPHGEPARRASHNELPHTELSSQTPYTLNFSFEELNTLGLDEGAPRHSNLSWQSQTRRTPSLSSLNSQDSSIEISKLTDKVQAEYRDAYREYIAQMSQLEGGPGSTTISGRSSPHSTYYMGQSSSGGSIHSNLEQEKGKDSEPKPDDGRKSFLMKRGDVIDYSSSGVSTNDASPLDPITEEDEKSDQSGSKLLPGKKSSERSSLFQTDLKLKGSGLRYQKLPSDEDESGTEESDNTPLLKDDKDRKAEGKVERVPKSPEHSAEPIRTFIKAKEYLSDALLDKKDSSDSGVRSSESSPNHSLHNEVADDSQLEKANLIELEDDSHSGKRGIPHSLSGLQDPIIARMSICSEDKKSPSECSLIASSPEENWPACQKAYNLNRTPSTVTLNNNSAPANRANQNFDEMEGIRETSQVILRPSSSPNPTTIQNENLKSMTHKRSQRSSYTRLSKDPPELHAAASSESTGFGEERESIL

SEQ ID NO: 1210 - protein, 890 aa, Homo sapiens
MNYVGQLAGQVFVTVKELYKGLNPATLSGCIDIIVIRQPNGNLQCSPFHVRFGKMGVLRSREKVVDIEINGESVDLHMKLGDNGEAFFVQETDNDQEVIPMHLATSPILSEGASRMECQLKRGSVDRMRGLDPSTPAQVIAPSETPSSSSVVKKRRKRRRKSQLDSLKRDDNMNTSEDEDMFPIEMSSDEAMELLESSRTLPNDIPPFQDDIPEENLSLAVIYPQSASYPNSDREWSPTPSPSGSRPSTPKSDSELVSKSTERTGQKNPEMLWLWGELPQAAKSSSPHKMKESSPLSSRKICDKSHFQAIHSESSDTFSDQSPTLVGGALLDQNKPQTEMQFVNEEDLETLGAAAPLLPMIEELKPPSASVVQTANKTDSPSRKRDKRSRHLGADGVYLDDLTDMDPEVAALYFPKNGDPSGLAKHASDNGARSANQSPQSVGSSGVDSGVESTSDGLRDLPSIAISLCGGLSDHREITKDAFLEQAVSYQQFVDNPAIIDDPNLVVKIGSKYYNWTTAAPLLLAMQAFQKPLPKATVESIMRDKMPKKGGRWWFSWRGRNTTIKEESKPEQCLAGKAHSTGEQPPQLSLATRVKHESSSSDEERAAAKPSNAGHLPLLPNVSYKKTLRLTSEQLKSLKLKNGPNDVVFSVTTQYQGTCRCEGTIYLWNWDDKVIISDIDGTITRSDTLGHILPTLGKDWTHQGIAKLYHKVSQNGYKFLYCSARAIGMADMTRGYLHWVNERGTVLPQGPLLLSPSSLFSALHREVIEKKPEKFKVQCLTDIKNLFFPNTEPFYAAFGNRPADVYSYKQVGVSLNRIFTVNPKGELVQEHAKTNISSYVRLCEVVDHVFPLLKRSHSSDFPCSDTFSNFTFWREPLPPFENQDIHSASA

SEQ ID NO: 1211 - protein, 981 aa, Homo sapiens
MVHHSGSIQSFKQQKGMNISKSEITKETSLKPSRRSLPCLAQSYAYSKSLSQSTSLFQSTESESQAPTSITLISTDKAEQVNTEENKNDSVLRCSFADLSDFCLALGKDKDYTDESEHATYDRSRLINDFVIKDKSEFKTKLSKNDMNYIASSGPLFKDGKKRIDYILVYRKTNIQYDKRNTFEKNLRAEGLMLEKEPAIASPDIMFIKIHIPWDTLCKYAERLNIRMPFRKKCYYTDGRSKSMGRMQTYFRRIKNWMAQNPMVLDKSAFPDLEESDCYTGPFSRARIHHFIINNKDTFFSNATRSRIVYHMLERTKYENGISKVGIRKLINNGSYIAAFPPHEGAYKSSQPIKTHGPQNNRHLLYERWARWGMWYKHQPLDLIRLYFGEKIGLYFAWLGWYTGMLIPAAIVGLCVFFYGLFTMNNSQVSQEICKATEVFMCPLCDKNCSLQRLNDSCIYAKVTYLFDNGGTVFFAIFMAIWATVFLEFWKRRRSILTYTWDLIEWEEEEETLRPQFEAKYYKMEIVNPITGKPEPHQPSSDKVTRLLVSVSGIFFMISLVITAVFGVVVYRLVVMEQFASFKWNFIKQYWQFATSAAAVCINFIIIMLLNLAYEKIAYLLTNLEYPRTESEWENSFALKMFLFQFVNLNSSIFYIAFFLGRFVGHPGKYNKLFDRWRLEECHPSGCLIDLCLQMGVIMFLKQIWNNFMELGYPLIQNWWSRHKIKRGIHDASIPQWENDWNLQPMNLHGLMDEYLEMVLQFGFTTIFVAAFPLAPLLALLNNIIEIRLDAYKFVTQWRRPLPARATDIGIWLGILEGIGILAVITNAFVIAITSDYIPRFVYEYKYGPCANHVEPSENCLKGYVNNSLSFFDLSELGMGKSGYCRYRDYRGPPWSSKPYEFTLQYWHILAARLAFIIVFEHLVFGIKSFIAYLIPDVPKGLHDRIRREKYLVQEMMYEAELEHLQQQRRKSGQPVHHEWP

SEQ ID NO: 1212 - protein, 344 aa, Homo sapiens
MVRARHQPGGLCLLLLLLCQFMEDRSAQAGNCWLRQAKNGRCQVLYKTELSKEECCSTGRLSTSWTEEDVNDNTLFKWMIFNGGAPNCIPCKETCENVDCGPGKKCRMNKKNKPRCVCAPDCSNITWKGPVCGLDGKTYRNECALLKARCKEQPELEVQYQGRCKKTCRDVFCPGSSTCVVDQTNNAYCVTCNRICPEPASSEQYLCGNDGVTYSSACHLRKATCLLGRSIGLAYEGKCIKAKSCEDIQCTGGKKCLWDFKVGRGRCSLCDELCPDSKSDEPVCASDNATYASECAMKEAACSSGVLLEVKHSGSCNSISEDTEEEEEDEDQDYSFPISSILEW

SEQ ID NO: 1213 - protein, 569 aa, Homo sapiens
MLLLFSVILISWVSTVGGEGTLCDFPKIHHGFLYDEEDYNPFSQVPTGEVFYYSCEYNFVSPSKSFWTRITCTEEGWSPTPKCLRMCSFPFVKNGHSESSGLIHLEGDTVQIICNTGYSLQNNEKNISCVERGWSTPPICSFTKGECHVPILEANVDAQPKKESYKVGDVLKFSCRKNLIRVGSDSVQCYQFGWSPNFPTCKGQVRSCGPPPQLSNGEVKEIRKEEYGHNEVVEYDCNPNFIINGPKKIQCVDGEWTTLPTCVEQVKTCGYIPELEYGYVQPSVPPYQHGVSVEVNCRNEYAMIGNNMITCINGIWTELPMCVATHQLKRCKIAGVNIKTLLKLSGKEFNHNSRIRYRCSDIFRYRHSVCINGKWNPEVDCTEKREQFCPPPPQIPNAQNMTTTVNYQDGEKVAVLCKENYLLPEAKEIVCKDGRWQSLPRCVESTAYCGPPPSINNGDTTSFPLSVYPPGSTVTYRCQSFYKLQGSVTVTCRNKQWSEPPRCLDPCVVSEENMNKNNIQLKWRNDGKLYAKTGDAVEFQCKFPHKAMISSPPFRAICQEGKFEYPICE

SEQ ID NO: 1214 - protein, 926 aa, Homo sapiens
MASAVRGSRPWPRLGLQLQFAALLLGTLSPQVHTLRPENLLLVSTLDGSLHALSKQTGDLKWTLRDDPVIEGPMYVTEMAFLSDPADGSLYILGTQKQQGLMKLPFTIPELVHASPCRSSDGVFYTGRKQDAWFVVDPESGETQMTLTTEGPSTPRLYIGRTQYTVTMHDPRAPALRWNTTYRRYSAPPMDGSPGKYMSHLASCGMGLLLTVDPGSGTVLWTQDLGVPVMGVYTWHQDGLRQLPHLTLARDTLHFLALRWGHIRLPASGPRDTATLFSTLDTQLLMTLYVGKDETGFYVSKALVHTGVALVPRGLTLAPADGPTTDEVTLQVSGEREGSPSTAVRYPSGSVALPSQWLLIGHHELPPVLHTTMLRVHPTLGSGTAETRPPENTQAPAFFLELLSLSREKLWDSELHPEEKTPDSYLGLGPQDLLAASLTAVLLGGWILFVMRQQQPQVVEKQQETPLAPADFAHISQDAQSLHSGASRRSQKRLQSPSKQAQPLDDPEAEQLTVVGKISFNPKDVLGRGAGGTFVFRGQFEGRAVAVKRLLRECFGLVRREVQLLQESDRHPNVLRYFCTERGPQFHYIALELCRASLQEYVENPDLDRGGLEPEVVLQQLMSGLAHLHSLHIVHRDLKPGNILITGPDSQGLGRVVLSDFGLCKKLPAGRCSFSLHSGIPGTEGWMAPELLQLLPPDSPTSAVDIFSAGCVFYYVLSGGSHPFGDSLYRQANILTGAPCLAHLEEEVHDKVVARDLVGAMLSPLPQPRPSAPQVLAHPFFWSRAKQLQFFQDVSDWLEKESEQEPLVRALEAGGCAVVRDNWHEHISMPLQTDLRKFRSYKGTSVRDLLRAVRNKKHHYRELPVEVRQALGQVPDGFVQYFTNRFPRLLLHTHRAMRSCASESLFLPYYPPDSEARRPCPGATGR

SEQ ID NO: 1215 - protein, 1250 aa, Homo sapiens
MAAMAPGGSGSGGGVNPFLSDSDEDDDEVAATEERRAVLRLGAGSGLDPGSAGSLSPQDPVALGSSARPGLPGEASAAAVALGGTGETPARLSIDAIAAQLLRDQYLLTALELHTELLESGRELPRLRDYFSNPGNFERQSGTPPGMGAPGVPGAAGVGGAGGREPSTASGGGQLNRAGSISTLDSLDFARYSDDGNRETDEKVAVLEFELRKAKETIQALRANLTKAAEHEVPLQERKNYKSSPEIQEPIKPLEKRALNFLVNEFLLKNNYKLTSITFSDENDDQDFELWDDVGLNIPKPPDLLQLYRDFGNHQVTGKDLVDVASGVEEDELEALTPIISNLPPTLETPQPAENSMLVQKLEDKISLLNSEKWSLMEQIRRLKSEMDFLKNEHFAIPAVCDSVQPPLDQLPHKDSEDSGQHPDVNSSDKGKNTDIHLSISDEADSTIPKENSPNSFPRREREGMPPSSLSSKKTVHFDKPNRKLSPAFHQALLSFCRMSADSRLGYEVSRIADSEKSVMLMLGRCLPHIVPNVLLAKREELIPLILCTACLHPEPKERDQLLHILFNLIKRPDDEQRQMILTGCVAFARHVGPTRVEAELLPQCWEQINHKYPERRLLVAESCGALAPYLPKEIRSSLVLSMLQQMLMEDKADLVREAVIKSLGIIMGYIDDPDKYHQGFELLLSALGDPSERVVSATHQVFLPAYAAWTTELGNLQSHLILTLLNKIEKLLREGEHGLDEHKLHMYLSALQSLIPSLFALVLQNAPFSSKAKLHGEVPQIEVTRFPRPMSPLQDVSTIIGSREQLAVLLQLYDYQLEQEGTTGWESLLWVVNQLLPQLIEIVGKINVTSTACVHEFSRFFWRLCRTFGKIFTNTKVKPQFQEILRLSEENIDSSAGNGVLTKATVPIYATGVLTCYIQIKEYLHIHNEISWEWDPSLNTKCVSYTHYTHSLKEEDRKLLVGFLEDVMTLLSLSHAPLDSLKASFVELGANPAYHELLLTVLWYGVVHTSALVRCTAARMFELLVKGVNETLVAQRVVPALITLSSDPEISVRIATIPAFGTIMETVIQRELLERVKMQLASFLEDPQYQDQHSLHTEIIKTFGRVGPNAEPRFRDEFVIPHLHKLALVNNLQIVDSKRLDIATHLFEAYSALSCCFISEDLMVNHFLPGLRCLRTDMEHLSPEHEVILSSMIKECEQKVENKTVQEPQGSMSIAASLVSEDTKTKFLNKMGQLTTSGAMLANVFQRKK

SEQ ID NO: 1216 - protein, 691 aa, Homo sapiens
MDQNQHLNKTAEAQPSENKKTRYCNGLKMFLAALSLSFIAKTLGAIIMKSSIIHIERRFEISSSLVGFIDGSFEIGNLLVIVFVSYFGSKLHRPKLIGIGCFIMGIGGVLTALPHFFMGYYRYSKETNINSSENSTSTLSTCLINQILSLNRASPEIVGKGCLKESGSYMWIYVFMGNMLRGIGETPIVPLGLSYIDDFAKEGHSSLYLGILNAIAMIGPIIGFTLGSLFSKMYVDIGYVDLSTIRITPTDSRWVGAWWLNFLVSGLFSIISSIPFFFLPQTPNKPQKERKASLSLHVLETNDEKDQTANLTNQGKNITKNVTGFFQSFKSILTNPLYVMFVLLTLLQVSSYIGAFTYVFKYVEQQYGQPSSKANILLGVITIPIFASGMFLGGYIIKKFKLNTVGIAKFSCFTAVMSLSFYLLYFFILCENKSVAGLTMTYDGNNPVTSHRDVPLSYCNSDCNCDESQWEPVCGNNGITYISPCLAGCKSSSGNKKPIVFYNCSCLEVTGLQNRNYSAHLGECPRDDACTRKFYFFVAIQVLNLFFSALGGTSHVMLIVKIVQPELKSLALGFHSMVIRALGGILAPIYFGALIDTTCIKWSTNNCGTRGSCRTYNSTSFSRVYLGLSSMLRVSSLVLYIILIYAMKKKYQEKDINASENGSVMDEANLESLNKNKHFVPSAGADSETHC

SEQ ID NO: 1217 - protein, 1274 aa, Homo sapiens [sequence omitted]

SEQ ID NO: 1218 - protein, 750 aa, Homo sapiens
MWNLLHETDSAVATARRPRWLCAGALVLAGGFFLLGFLFGWFIKSSNEATNITPKHNMKAFLDELKAENIKKFLYNFTQIPHLAGTEQNFQLAKQIQSQWKEFGLDSVELAHYDVLLSYPNKTHPNYISIINEDGNEIFNTSLFEPPPPGYENVSDIVPPFSAFSPQGMPEGDLVYVNYARTEDFFKLERDMKINCSGKIVIARYGKVFRGNKVKNAQLAGAKGVILYSDPADYFAPGVKSYPDGWNLPGGGVQRGNILNLNGAGDPLTPGYPANEYAYRRGIAEAVGLPSIPVHPIGYYDAQKLLEKMGGSAPPDSSWRGSLKVPYNVGPGFTGNFSTQKVKMHIHSTNEVTRIYNVIGTLRGAVEPDRYVILGGHRDSWVFGGIDPQSGAAVVHEIVRSFGTLKKEGWRPRRTILFASWDAEEFGLLGSTEWAEENSRLLQERGVAYINADSSIEGNYTLRVDCTPLMYSLVHNLTKELKSPDEGFEGKSLYESWTKKSPSPEFSGMPRISKLGSGNDFEVFFQRLGIASGRARYTKNWETNKFSGYPLYHSVYETYELVEKFYDPMFKYHLTVAQVRGGMVFELANSIVLPFDCRDYAVVLRKYADKIYSISMKHPQEMKTYSVSFDSLFSAVKNFTEIASKFSERLQDFDKSNPIVLRMMNDQLMFLERAFIDPLGLPDRPFYRHVIYAPSSHNKYAGESFPGIYDALFDIESKVDPSKAWGEVKRQIYVAAFTVQAAAETLSEVA

SEQ ID NO: 1219 - protein, 362 aa, Homo sapiens
MSENGSFANCCEAGGWAVRPGWSGAGSARPSRTPRPPWVAPALSAVLIVTTAVDVVGNLLVILSVLRNRKLRNAGNLFLVSLALADLVVAFYPYPLILVAIFYDGWALGEEHCKASAFVMGLSVIGSVFNITAIAINRYCYICHSMAYHRIYRRWHTPLHICLIWLLTVVALLPNFFVGSLEYDPRIYSCTFIQTASTQYTAAVVVIHFLLPIAVVSFCYLRIWVLVLQARRKAKPESRLCLKPSDLRSFLTMFVVFVIFAICWAPLNCIGLAVAINPQEMAPQIPEGLFVTSYLLAYFNSCLNAIVYGLLNQNFRREYKRILLALWNPRHCIQDASKGSHAEGLQSPAPPIIGVQHQADAL

SEQ ID NO: 1220 - protein, 1186 aa, Homo sapiens
MSVACVLKRKAVLWQDSFSPHLKHHPQEPANPNMPVVLTSGTGSQAQPQPAANQALAAGTHSSPVPGSIGVAGRSQDDAMVDYFFQRQHGEQLGGGGSGGGGYNNSKHRWPTGDNIHAEHQVRSMDELNHDFQALALEGRAMGEQLLPGKKFWETDESSKDGPKGIFLGDQWRDSAWGTSDHSVSQPIMVQRRPGQSFHVNSEVNSVLSPRSESGGLGVSMVEYVLSSSPGDSCLRKGGFGPRDADSDENDKGEKKNKGTFDGDKLGDLKEEGDVMDKTNGLPVQNGIDADVKDFSRTPGNCQNSANEVDLLGPNQNGSEGLAQLTSTNGAKPVEDFSNMESQSVPLDPMEHVGMEPLQFDYSGTQVPVDSAAATVGLFDYNSQQQLFQRPNALAVQQLTAAQQQQYALAAAHQPHIGLAPAAFVPNPYIISAAPPGTDPYTAGLAAAATLGPAVVPHQYYGVTPWGVYPASLFQQQAAAAAAATNSANQQTTPQAQQGQQQVLRGGASQRPLTPNQNQQGQQTDPLVAAAAVNSALAFGQGLAAGMPGYPVLAPAAYYDQTGALVVNAGARNGLGAPVRLVAPAPVIISSSAAQAAVAAAAASANGAAGGLAGTTNGPFRPLGTQQPQPQPQQQPNNNLASSSFYGNNSLNSNSQSSSLFSQGSAQPANTSLGFGSSSSLGATLGSALGGFGTAVANSNTGSGSRRDSLTGSSDLYKRTSSSLTPIGHSFYNGLSFSSSPGPVGMPLPSQGPGHSQTPPPSLSSHGSSSSLNLGGLTNGSGRYISAAPGAEAKYRSASSASSLFSPSSTLFSSSRLRYGMSDVMPSGRSRLLEDFRNNRYPNLQLREIAGHIMEFSQDQHGSRFIQLKLERATPAERQLVFNEILQAAYQLMVDVFGNYVIQKFFEFGSLEQKLALAERIRGHVLSLALQMYGCRVIQKALEFIPSDQQNEMVRELDGHVLKCVKDQNGNHVVQKCIECVQPQSLQFIIDAFKGQVFALSTHPYGCRVIQRILEHCLPDQTLPILEELHQHTEQLVQDQYGNYVIQHVLEHGRPEDKSKIVAEIRGNVLVLSQHKFASNVVEKCVTHASRTERAVLIDEVCTMNDGPHSALYTMMKDQYANYVVQKMIDVAEPGQRKIVMHKIRPHIATLRKYTYGKHILAKLEKYYMKNGVDLGPICGPPNGII

SEQ ID NO: 1221 - protein, 696 aa, Homo sapiens
MEVSSPSPAQRLRRKKRPMVQGPAGCQVFQPSPSGGTAGDPGGLSDPFYPPRSGSLALGDPSSDPACSQSGPMEAEEDSLPEQPEDSAQLQQEKPSLYIGVRGTVVRSMQEVLWTRLRELPDPVLSEEVVEGIAAGIEAALWDLTQGTNGRYKTKYRSLLFNLRDPRNLDLFLKVVHGDVTPYDLVRMSSMQLAPQELARWRDQEEKRGLNIIEQQQKEPCRLPASKMTHKGEVEIQRDMDQTLTLEDLVGPQMFMDCSPQALPIASEDTTGQHDHHFLDPNCHICKDWEPSNELLGSFEAAKSCGDNIFQKALSQTPMPAPEMPKTRELSPTEPQDRVPPSGLHVPAAPTKALPCLPPWEGVLDMFSIKRFRARAQLVSGHSCRLVQALPTVIRSAGCIPSNIVWDLLASICPAKAKDVCVVRLCPHGARDTQNCRLLYSYLNDRQRHGLASVEHMGMVLLPLPAFQPLPTRLRPLGGPGLEVTHSSLLLAVLLPKEGLPDTAGSSPWLGKVQKMVSFNSKVEKRYYQPDDRRPNVPLKGTPPPGGAWQQSQGRGSIAPRGISAWQRPPRGRGRLWPEPENWQHPGRGQWPPEPGLRQSQHPYSVAPAGHGFGRGQHFHRDSCPHQALLRHLESLATMSHQLQALLCPQTKSSIPRPLQRLSSALAAPEPPGPARDSSLGPTDEAGSECPFPRKA

SEQ ID NO: 1222 - protein, 858 aa, Homo sapiens
MENELPVPHTSSSACATSSTSGASSSSGCNNSSSGGSGRPTGPQISVYSGIPDRQTVQVIQQALHRQPSTAAQYLQQMYAAQQQHLMLQTAALQQQHLSSAQLQSLAAVQQASLVSNRQGSTSGSNVSAQAPAQSSSINLAASPAAAQLLNRAQSVNSAAASGIAQQAVLLGNTSSPALTASQAQMYLRAQMLIFTPTATVATVQPELGTGSPARPPTPAQVQNLTLRTQQTPAAAASGPTPTQPVLPSLALKPTPGGSQPLPTPAQSRNTAQASPAGAKPGIADSVMEPHKKGDGNSSVPGSMEGRAGLSRTVPAVAAHPLIAPAYAQLQPHQLLPQPSSKHLQPQFVIQQQPQPQQQQPPPQQSRPVLQAEPHPQLASVSPSVALQPSSEAHAMPLGPVTPALPLQCPTANLHKPGGSQQCHPPTPDTGPQNGHPEGVPHTPQRRFQHTSAVILQLQPASPPQQCVPDDWKEVAPGEKSVPETRSGPSPHQQAIVTAMPGGLPVPTSPNIQPSPAHETGQGIVHALTDLSSPGMTSGNGNSASSIAGTAPQNGENKPPQAIVKPQILTHVIEGFVIQEGAEPFPVGRSSLLVGNLKKKYAQGFLPEKLPQQDHTTTTDSEMEEPYLQESKEEGAPLKLKCELCGRVDFAYKFKRSKRFCSMACAKRYNVGCTKRVGLFHSDRSKLQKAGAATHNRRRASKASLPPLTKDTKKQPTGTVPLSVTAALQLTHSQEDSSRCSDNSSYEEPLSPISASSSTSRRRQGQRDLELPDMHMRDLVGMGHHFLPSEPTKWNVEDVYEFIRSLPGCQEIAEEFRAQEIDGQALLLLKEDHLMSAMNIKLGPALKIYARISMLKDS

SEQ ID NO: 1223 - protein, 1645 aa, Homo sapiens
MEESKTLKSENHEPKKNVICEESKAVQVIGNQTLKARNDKSVKEIENSSPNRNSSKKNKQNDICIEKTEVKSCKVNAANLPGPKDLGLVLRDQSHCKAKKFPNSPVKAEKATISQAKSEKATSLQAKAEKSPKSPNSVKAEKASSYQMKSEKVPSSPAEAEKGPSLLLKDMRQKTELQQIGKKIPSSFTSVDKVNIEAVGGEKCALQNSPRSQKQQTCTDNTGDSDDSASGIEDVSDDLSKMKNDESNKENSSEMDYLENATVIDESALTPEQRLGLKQAEERLERDHIFRLEKRSPEYTNCRYLCKLCLIHIENIQGAHKHIKEKRHKKNILEKQEESELRSLPPPSPAHLAALSVAVIELAKEHGITDDDLRVRQEIVEEMSKVITTFLPECSLRLYGSSLTRFALKSSDVNIDIKFPPKMNHPDLLIKVLGILKKNVLYVDVESDFHAKVPVVVCRDRKSGLLCRVSAGNDMACLTTDLLTALGKIEPVFIPLVLAFRYWAKLCYIDSQTDGGIPSYCFALMVMFFLQQRKPPLLPCLLGSWIEGFDPKRMDDFQLKGIVEEKFVKWECNSSSATEKNSIAEENKAKADQPKDDTKKTETDNQSNAMKEKHGKSPLALETPNRVSLGQLWLELLKFYTLDFALEEYVICVRIQDILTRENKNWPKRRIAIEDPFSVKRNVARSLNSQLVYEYVVERFRAAYRYFACPQTKGGNKSTVDFKKREKGKISNKKPVKSNNMATNGCILLGETTEKINAEREQPVQCDEMDCTSQRCIIDNNNLLVNELDFADHGQDSSSLSTSKSSEIEPKLDKKQDDLAPSETCLKKELSQCNCIDLSKSPDPDKSTGTDCRSNLETESSHQSVCTDTSATSCNCKATEDASDLNDDDNLPTQELYYVFDKFILTSGKPPTIVCSICKKDGHSKNDCPEDFRKIDLKPLPPMTNRFREILDLVCKRCFDELSPPCSEQHNREQILIGLEKFIQKEYDEKARLCLFGSSKNGFGFRDSDLDICMTLEGHENAEKLNCKEIIENLAKILKRHPGLRNILPITTAKVPIVKFEHRRSGLEGDISLYNTLAQHNTRMLATYAAIDPRVQYLGYTMKVFAKRCDIGDASRGSLSSYAYILMVLYFLQQRKPPVIPVLQEIFDGKQIPQRMVDGWNAFFFDKTEELKKRLPSLGKNTESLGELWLGLLRFYTEEFDFKEYVISIRQKKLLTTFEKQWTSKCIAIEDPFDLNHNLGAGVSRKMTNFIMKAFINGRKLFGTPFYPLIGREAEYFFDSRVLTDGELAPNDRCCRVCGKIGHYMKDCPKRKSSLLFRLKKKDSEEEKEGNEEEKDSRDVLDPRDLHDTRDFRDPRDLRCFICGDAGHVRRECPEVKLARQRNSSVAAAQLVRNLVNAQQVAGSAQQQGDQSIRTRQSSECSESPSYSPQPQPFPQNSSQSAAITQPSSQPGSQPKLGPPQQGAQPPHQVQMPLYNFPQSPPAQYSPMHNMGLLPMHPLQIPAPSWPIHGPVIHSAPGSAPSNIGLNDPSIIFAQPAARPVAIPNTSHDGHWPRTVAPNSLVNSGAVGNSEPGFRGLTPPIPWEHAPRPHFPLVPASWPYGLHQNFMHQGNARFQPNKPFYTQDRCATRRCRERCPHPPRGNVSE

SEQ ID NO: 1224 - protein, 999 aa, Homo sapiens
MMGLFPRTTGALAIFVVVILVHGELRIETKGQYDEEEMTMQQAKRRQKREWVKFAKPCREGEDNSKRNPIAKITSDYQATQKITYRISGVGIDQPPFGIFVVDKNTGDINITAIVDREETPSFLITCRALNAQGLDVEKPLILTVKILDINDNPPVFSQQIFMGEIEENSASNSLVMILNATDADEPNHLNSKIAFKIVSQEPAGTPMFLLSRNTGEVRTLTNSLDREQASSYRLVVSGADKDGEGLSTQCECNIKVKDVNDNFPMFRDSQYSARIEENILSSELLRFQVTDLDEEYTDNWLAVYFFTSGNEGNWFEIQTDPRTNEGILKVVKALDYEQLQSVKLSIAVKNKAEFHQSVISRYRVQSTPVTIQVINVREGIAFRPASKTFTVQKGISSKKLVDYILGTYQAIDEDTNKAASNVKYVMGRNDGGYLMIDSKTAEIKFVKNMNRDSTFIVNKTITAEVLAIDEYTGKTSTGTVYVRVPDFNDNCPTAVLEKDAVCSSSPSVVVSARTLNNRYTGPYTFALEDQPVKLPAVWSITTLNATSALLRAQEQIPPGVYHISLVLTDSQNNRCEMPRSLTLEVCQCDNRGICGTSYPTTSPGTRYGRPHSGRLGPAAIGLLLLGLLLLLLAPLLLLTCDCGAGSTGGVTGGFIPVPDGSEGTIHQWGIEGAHPEDKEITNICVPPVTANGADFMESSEVCTNTYARGTAVEGTSGMEMTTKLGAATESGGAAGFATGTVSGAASGFGAATGVGICSSGQSGTMRTRHSTGGTNKDYADGAISMNFLDSYFSQKAFACAEEDDGQEANDCLLIYDNEGADATGSPVGSVGCCSFIADDLDDSFLDSLGPKFKKLAEISLGVDGEGKEVQPPSKDSGYGIESCGHPIEVQQTGFVKCQTLSGSQGASALSTSGSVQPAVSIPDPLQHGNYLVTETYSASGSLVQPSTAGFDPLLTQNVIVTERVICPISSVPGNLAGPTQLRGSHTMLCTEDPCSRLI

SEQ ID NO: 1225 - protein, 800 aa, Homo sapiens
MVAPVLETSHVFCCPNRVRGVLNWSSGPRGLLAFGTSCSVVLYDPLKRVVVTNLNGHTARVNCIQWICKQDGSPSTELVSGGSDNQVIHWEIEDNQLLKAVHLQGHEGPVYAVHAVYQRRTSDPALCTLIVSAAADSAVRLWSKKGPEVPILACGNDDCRIHIFAQQNDQFQKVLSLCGHEDWIRGVEWAAFGRDLFLASCSQDCLIRIWKLYIKSTSLETQDDDNIRLKENTFTIENESVKIAFAVTLETVLAGHENWVNAVHWQPVFYKDGVLQQPVRLLSASMDKTMILWAPDEESGVWLEQVRVGEVGGNTLGFYDCQFNEDGSMIIAHAFHGALHLWKQNTVNPREWTPEIVISGHFDGVQDLVWDPEGEFIITVGTDQTTRLFAPWKRKDQSQVTWHEIARPQIHGYDLKCLAMINRFQFVSGADEKVLRVFSAPRNFVENFCAITGQSLNHVLCNQDSDLPEGATVPALGLSNKAVFQGDIASQPSDEEELLTSTGFEYQQVAFQPSILTEPPTEDHLLQNTLWPEVQKLYGHGYEIFCVTCNSSKTLLASACKAAKKEHAAIILWNTTSWKQVQNLVFHSLTVTQMAFSPNEKFLLAVSRDRTWSLWKKQDTISPEFEPVFSLFAFTNKITSVHSRIIWSCDWSPDSKYFFTGSRDKKVVVWGECDSTDDCIEHNIGPCSSVLDVGGAVTAVSVCPVLHPSQRYVVAVGLECGKICLYTWKKTDQVPEINDWTHCVETSQSQSHTLAIRKLCWKNCSGKTEQKEAEGAEWLHFASCGEDHTVKIHRVNKCAL

SEQ ID NO: 1226 - protein, 1049 aa, Homo sapiens
MDWSFFRVVAMLFIFLVVVEVNSEFRIQVRDYNTKNGTIKWHSIRRQKREWIKFAAACREGEDNSKRNPIAKIHSDCAANQQVTYRISGVGIDQPPYGIFVINQKTGEINITSIVDREVTPFFIIYCRALNSMGQDLERPLELRVRVLDINDNPPVFSMATFAGQIEENSNANTLVMILNATDADEPNNLNSKIAFKIIRQEPSDSPMFIINRNTGEIRTMNNFLDREQYGQYALAVRGSDRDGGADGMSAECECNIKILDVNDNIPYMEQSSYTIEIQENTLNSNLLEIRVIDLDEEFSANWMAVIFFISGNEGNWFEIEMNERTNVGILKVVKPLDYEAMQSLQLSIGVRNKAEFHHSIMSQYKLKASAISVTVLNVIEGPVFRPGSKTYVVTGNMGSNDKVGDFVATDLDTGRPSTTVRYVMGNNPADLLAVDSRTGKLTLKNKVTKEQYNMLGGKYQGTILSIDDNLQRTCTGTININIQSFGNDDRTNTEPNTKITTNTGRQESTSSTNYDTSTTSTDSSQVYSSEPGNGAKDLLSDNVHFGPAGIGLLIMGFLVLGLVPFLMICCDCGGAPRSAAGFEPVPECSDGAIHSWAVEGPQPEPRDITTVIPQIPPDNANIIECIDNSGVYTNEYGGREMQDLGGGERMTGFELTEGVKTSGMPEICQEYSGTLRRNSMRECREGGLNMNFMESYFCQKAYAYADEDEGRPSNDCLLIYDIEGVGSPAGSVGCCSFIGEDLDDSFLDTLGPKFKKLADISLGKESYPDLDPSWPPQSTEPVCLPQETEPVVSGHPPISPHFGTTTVISESTYPSGPGVLHPKPILDPLGYGNVTVTESYTTSDTLKPSVHVHDNRPASNVVVTERVVGPISGADLHGMLEMPDLRDGSNVIVTERVIAPSSSLPTSLTIHHPRESSNVVVTERVIQPTSGMIGSLSMHPELANAHNVIVTERVVSGAGVTGISGTTGISGGIGSSGLVGTSMGAGSGALSGAGISGGGIGLSSLGGTASIGHMRSSSDHHFNQTIGSASPSTARSRITKYSTVQYSK

SEQ ID NO: 1227 - protein, 840 aa, Homo sapiens
MALASAAPGSIFCKQLLFSLLVLTLLCDACQKVYLRVPSHLQAETLVGKVNLEECLKSASLIRSSDPAFRILEDGSIYTTHDLILSSERKSFSIFLSDGQRREQQEIKVVLSARENKSPKKRHTKDTALKRSKRRWAPIPASLMENSLGPFPQHVQQIQSDAAQNYTIFYSISGPGVDKEPFNLFYIEKDTGDIFCTRSIDREKYEQFALYGYATTADGYAPEYPLPLIIKIEDDNDNAPYFEHRVTIFTVPENCRSGTSVGKVTATDLDEPDTLHTRLKYKILQQIPDHPKHFSIHPDTGVITTTTPFLDREKCDTYQLIMEVRDMGGQPFGLFNTGTITISLEDENDNPPSFTETSYVTEVEENRIDVEILRMKVQDQDLPNTPHSKAVYKILQGNENGNFIISTDPNTNEGVLCVVKPLNYEVNRQVILQVGVINEAQFSKAASSQTPTMCTTTVTVKIIDSDEGPECHPPVKVIQSQDGFPAGQELLGYKALDPEISSGEGLRYQKLGDEDNWFEINQHTGDLRTLKVLDRESKFVKNNQYNISVVAVDAVGRSCTGTLVVHLDDYNDHAPQIDKEVTICQNNEDFAVLKPVDPDGPENGPPFQFFLDNSASKNWNIEEKDGKTAILRQRQNLDYNYYSVPIQIKDRHGLVATHMLTVRVCDCSTPSECRMKDKSTRDVRPNVILGRWAILAMVLGSVLLLCILFTCFCVTAKRTVKKCFPEDIAQQNLIVSNTEGPGEEVTEANIRLPMQTSNICDTSMSVGTVGGQGIKTQQSFEMVKGGYTLDSNKGGGHQTLESVKGVGQGDTGRYAYTDWQSFTQPRLGEESIRGHTLIKN

SEQ ID NO: 1228 - protein, 894 aa, Homo sapiens
MALASAAPGSIFCKQLLFSLLVLTLLCDACQKVYLRVPSHLQAETLVGKVNLEECLKSASLIRSSDPAFRILEDGSIYTTHDLILSSERKSFSIFLSDGQRREQQEIKVVLSARENKSPKKRHTKDTALKRSKRRWAPIPASLMENSLGPFPQHVQQIQSDAAQNYTIFYSISGPGVDKEPFNLFYIEKDTGDIFCTRSIDREKYEQFALYGYATTADGYAPEYPLPLIIKIEDDNDNAPYFEHRVTIFTVPENCRSGTSVGKVTATDLDEPDTLHTRLKYKILQQIPDHPKHFSIHPDTGVITTTTPFLDREKCDTYQLIMEVRDMGGQPFGLFNTGTITISLEDENDNPPSFTETSYVTEVEENRIDVEILRMKVQDQDLPNTPHSKAVYKILQGNENGNFIISTDPNTNEGVLCVVKPLNYEVNRQVILQVGVINEAQFSKAASSQTPTMCTTTVTVKIIDSDEGPECHPPVKVIQSQDGFPAGQELLGYKALDPEISSGEGLRYQKLGDEDNWFEINQHTGDLRTLKVLDRESKFVKNNQYNISVVAVDAVGRSCTGTLVVHLDDYNDHAPQIDKEVTICQNNEDFAVLKPVDPDGPENGPPFQFFLDNSASKNWNIEEKDGKTAILRQRQNLDYNYYSVPIQIKDRHGLVATHMLTVRVCDCSTPSECRMKDKSTRDVRPNVILGRWAILAMVLGSVLLLCILFTCFCVTAKRTVKKCFPEDIAQQNLIVSNTEGPGEEVTEANIRLPMQTSNICDTSMSVGTVGGQGIKTQQSFEMVKGGYTLDSNKGGGHQTLESVKGVGQGDTGRYAYTDWQSFTQPRLGEKVYLCGQDEEHKHCEDYVCSYNYEGKGSLAGSVGCCSDRQEEEGLEFLDHLEPKFRTLAKTCIKK

SEQ ID NO: 1229 - protein, 1439 aa, Homo sapiens
MATLACRVQFLDDTDPFNSTNFPEPSRPPLFTFREDLALGTQLAGVHRLLQAPHKLDDCTLQLSHNGAYLDLEATLAEQRDELEGFQDDAGRGKKHSIILRTQLSVRVHACIEKLYNSSGRDLRRALFSLKQIFQDDKDLVHEFVVAEGLTCLIKVGAEADQNYQNYILRALGQIMLYVDGMNGVINRNETIQWLYTLIGSKFRLVVKTALKLLLVFVEYSESNAPLLIQAVTAVDTKRGVKPWSNIMEILEEKDGVDTELLVYAMTLVNKTLSGLPDQDTFYDVVDCLEELGIAAVSQRHLNKKGTDLDLVEQLNIYEVALRHEDGDETTEPPPSGCRDRRRASVCSSGGGEHRGLDRRRSRRHSVQSIKSTLSAPTSPCSQSAPSFKPNQVRDLREKYSNFGNNSYHSSRPSSGSSVPTTPTSSVSPPQEARLERSSPSGLLTSSFRQHQESLAAERERRRQEREERLQRIEREERNKFSRDYLDKREEQRQAREERYKYLEQLAAEEHEKELRSRSVSRGRADLSLDLTSPAAPACLAPLSHSPSSSDSQEALTVSASSPGTPHHPQASAGDPEPESEAEPEAEAGAGQVADEAGQDIASAHEGAETEVEQALEQEPEERASLSEKERQNEGVNERDNCSASSVSSSSSTLEREEKEDKLSRDRTTGLWPAGVQDAGVNGQCGDILTNKRFMLDMLYAHNRKSPDDEEKGDGEAGRTQQEAEAVASLATRISTLQANSQTQDESVRRVDVGCLDNRGSVKAFAEKFNSGDLGRGSISPDAEPNDKVPETAPVQPKTESDYIWDQLMANPRELRIQDMDFTDLGEEDDIDVLDVDLGHREAPGPPPPPPPTFLGLPPPPPPPLLDSIPPPPVPGNLLVPPPPVFNAPQGLGWSQVPRGQPTFTKKKKTIRLFWNEVRPFDWPCKNNRRCREFLWSKLEPIKVDTSRLEHLFESKSKELSVSKKTAADGKRQEIIVLDSKRSNAINIGLTVLPPPRTIKIAILNFDEYALNKEGIEKILTMIPTDEEKQKIQEAQLANPEIPLGSAEQFLLTLSSISELSARLHLWAFKMDYETTEKEVAEPLLDLKEGIDQLENNKTLGFILSTLLAIGNFLNGTNAKAFELSYLEKVPEVKDTVHKQSLLHHVCTMVVENFPDSSDLYSEIGAITRSAKVDFDQLQDNLCQMERRCKASWDHLKAIAKHEMKPVLKQRMSEFLKDCAERIIILKIVHRRIINRFHSFLLFMGHPPYAIREVNINKFCRIISEFALEYRTTRERVLQQKQKRANHRERNKTRGKMITDSGKFSGSSPAPPSQPQGLSYAEDAAEHENMKAVLKTSSPSVEDATPALGVRTRSRASRGSTSSWTMGTDDSPNVTDDAADEIMDRIVKSATQVPSQRVVPRERKRSRANRKSLRRTLKSGLTPEEARALGLVGTSELQL

SEQ ID NO: 1230 - protein, 1042 aa, Homo sapiens
MPGIVVFRRRWSVGSDDLVLPAIFLFLLHTTWFVILSVVLFGLVYNPHEACSLNLVDHGRGYLGILLSCMIAEMAIIWLSMRGGILYTEPRDSMQYVLYVRLAILVIEFIYAIVGIVWLTQYYTSCNDLTAKNVTLGMVVCNWVVILSVCITVLCVFDPTGRTFVKLRATKRRQRNLRTYNLRHRLEEGQATSWSRRLKVFLCCTRTKDSQSDAYSEIAYLFAEFFRDLDIVPSDIIAGLVLLRQRQRAKRNAVLDEANNDILAFLSGMPVTRNTKYLDLKNSQEMLRYKEVCYYMLFALAAYGWPMYLMRKPACGLCQLARSCSCCLCPARPRFAPGVTIEEDNCCGCNAIAIRRHFLDENMTAVDIVYTSCHDAVYETPFYVAVDHDKKKVVISIRGTLSPKDALTDLTGDAERLPVEGHHGTWLGHKGMVLSAEYIKKKLEQEMVLSQAFGRDLGRGTKHYGLIVVGHSLGAGTAAILSFLLRPQYPTLKCFAYSPPGGLLSEDAMEYSKEFVTAVVLGKDLVPRIGLSQLEGFRRQLLDVLQRSTKPKWRIIVGATKCIPKSELPEEVEVTTLASTRLWTHPSDLTIALSASTPLYPPGRIIHVVHNHPAEQCCCCEQEEPTYFAIWGDNKAFNEVIISPAMLHEHLPYVVMEGLNKVLENYNKGKTALLSAAKVMVSPTEVDLTPELIFQQQPLPTGPPMPTGLALELPTADHRNSSVRSKSQSEMSLEGFSEGRLLSPVVAAAARQDPVELLLLSTQERLAAELQARRAPLATMESLSDTESLYSFDSRRSSGFRSIRGSPSLHAVLERDEGHLFYIDPAIPEENPSLSSRTELLAADSLSKHSQDTQPLEAALGSGGVTPERPPSAAANDEEEEVGGGGGGPASRGELALHNGRLGDSPSPQVLEFAEFIDSLFNLDSKSSSFQDLYCMVVPESPTSDYAEGPKSPSQQEILLRAQFEPNLVPKPPRLFAGSADPSSGISLSPSFPLSSSGELMDLTPTGLSSQECLAADKIRTSTPTGHGASPAKQDELVISAR

SEQ ID NO: 1231 - protein, 380 aa, Homo sapiens
MEEGGDFDNYYGADNQSECEYTDWKSSGALIPAIYMLVFLLGTTGNGLVLWTVFRSSREKRRSADIFIASLAVADLTFVVTLPLWATYTYRDYDWPFGTFFCKLSSYLIFVNMYASVFCLTGLSFDRYLAIVRPVANARLRLRVSGAVATAVLWVLAALLAMPVMVLRTTGDLENTTKVQCYMDYSMVATVSSEWAWEVGLGVSSTTVGFVVPFTIMLTCYFFIAQTIAGHFRKERIEGLRKRRRLLSIIVVLVVTFALCWMPYHLVKTLYMLGSLLHWPCDFDLFLMNIFPYCTCISYVNSCLNPFLYAFFDPRFRQACTSMLCCGQSRCAGTSHSSSGEKSASYSSGHSQGPGPNMGKGGEQMHEKSIPYSQETLVVD

SEQ ID NO: 1232 - protein, 433 aa, Homo sapiens
MRQSHQLPLVGLLLFSFIPSQLCEICEVSEENYIRLKPLLNTMIQSNYNRGTSAVNVVLSLKLVGIQIQTLMQKMIQQIKYNVKSRLSDVSSGELALIILALGVCRNAEENLIYDYHLIDKLENKFQAEIENMEAHNGTPLTNYYQLSLDVLALCLFNGNYSTAEVVNHFTPENKNYYFGSQFSVDTGAMAVLALTCVKKSLINGQIKADEGSLKNISIYTKSLVEKILSEKKENGLIGNTFSTGEAMQALFVSSDYYNENDWNCQQTLNTVLTEISQGAFSNPNAAAQVLPALMGKTFLDINKDSSCVSASGNFNISADEPITVTPPDSQSYISVNYSVRINETYFTNVTVLNGSVFLSVMEKAQKMNDTIFGFTMEERSWGPYITCIQGLCANNNDRTYWELLSGGEPLSQGAGSYVVRNGENLEVRWSKY

SEQ ID NO: 1233 - protein, 1140 aa, Homo sapiens
MTTAVERKYINIRKRLDQLGYRQTLTVECLPLVEKLFSDLVHTTESLRQSKLSAVKAEKESANFDFVLEPYKLENARLSRENNELYLELMKLREHSDQHVKELKTSLKKCARETADLKFLNNQYAHKLKLLEKESKAKNERIQQLQEKNLHAVVQTPGGKKRSIAFRRQRMQIDEPVPPSEVSSYPVPQPDDPYIADLLQVADNRIQELQQEVHQLQEKLAMMESGVRDYSKQIELREREIERLSVALDGGRSPDVLSLESRNKTNEKLIAHLNIQVDFLQQANKDLEKRIRELMETKETVTSEVVNLSNKNEKLCQELTEIDQLAQQLERHKEEVLETADKELGEAKKEIKRKLSEMQDLEETMAKLQLELNLCQKEKERLSDELLVKSDLETVVHQLEQEKQRLSKKVESFAVTERQLTLEVERMRLEHGIKRRDRSPSRLDTFLKGIEEERDYYKKELERLQHIIQRRSCSTSYSAREKSSIFRTPEKGDYNSEIHQITRERDELQRMLERFEKYMEDIQSNVKLLTAERDKLSVLYNEAQEELSALRKESTQTTAPHNIVSLMEKEKELALSDLRRIMAEKEALREKLEHIEEVSLFGKSELEKTIEHLTCVNHQLESEKYELKSKVLIMKETIESLENKLKVQAQKFSHVAGDSSHQKTEVNSLRIVNEQLQRSVDDYQHRLSIKRGELESAQAQIKILEEKIDELNLKMTSQDEEAHVMKKTIGVIDKEKDFLQETVDEKTEKIANLQENLANKEKAVAQMKIMISECESSVNQLKETLVNRDREINSLRRQLDAAHKELDEVGRSREIAFKENRRLQDDLATMARENQEISLELEAAVQEKEEMKSRVHKYITEVSRWESLMAAKEKENQDLLDRFQMLHNRAEDWEVKAHQAEGESSSVRLELLSIDTERRHLRERVELLEKEIQEHINAHHAYESQISSMAKAMSRLEEELRHQEDEKATVLNDLSSLRELCIKLDSGKDIMTQQLNSKNLEFERVVVELENVKSESDLLKKQLSNERHTVKNLESLLATNRDKEFHSHLTSHEKDTEIQLLKEKLTLSESKLTSQSRENTMLRAKVAQLQTDYDALKRQISTERYERERAIQEMRRHGLATPPLSSTLRSPSHSPEHRNV

SEQ ID NO: 1234 - protein, 1089 aa, Homo sapiens
MGTSHPAFLVLGCLLTGLSLILCQLSLPSILPNENEKVVQLNSSFSLRCFGESEVSWQYPMSEEESSDVEIRNEENNSGLFVTVLEVSSASAAHTGLYTCYYNHTQTEENELEGRHIYIYVPDPDVAFVPLGMTDYLVIVEDDDSAIIPCRTTDPETPVTLHNSEGVVPASYDSRQGFNGTFTVGPYICEATVKGKKFQTIPFNVYALKATSELDLEMEALKTVYKSGETIVVTCAVFNNEVVDLQWTYPGEVKGKGITMLEEIKVPSIKLVYTLTVPEATVKDSGDYECAARQATREVKEMKKVTISVHEKGFIEIKPTFSQLEAVNLHEVKHFVVEVRAYPPPRISWLKNNLTLIENLTEITTDVEKIQEIRYRSKLKLIRAKEEDSGHYTIVAQNEDAVKSYTFELLTQVPSSILDLVDDHHGSTGGQTVRCTAEGTPLPDIEWMICKDIKKCNNETSWTILANNVSNIITEIHSRDRSTVEGRVTFAKVEETIAVRCLAKNLLGAENRELKLVAPTLRSELTVAAAVLVLLVIVIISLIVLVVIWKQKPRYEIRWRVIESISPDGHEYIYVDPMQLPYDSRWEFPRDGLVLGRVLGSGAFGKVVEGTAYGLSRSQPVMKVAVKMLKPTARSSEKQALMSELKIMTHLGPHLNIVNLLGACTKSGPIYIITEYCFYGDLVNYLHKNRDSFLSHHPEKPKKELDIFGLNPADESTRSYVILSFENNGDYMDMKQADTTQYVPMLERKEVSKYSDIQRSLYDRPASYKKKSMLDSEVKNLLSDDNSEGLTLLDLLSFTYQVARGMEFLASKNCVHRDLAARNVLLAQGKIVKICDFGLARDIMHDSNYVSKGSTFLPVKWMAPESIFDNLYTTLSDVWSYGILLWEIFSLGGTPYPGMMVDSTFYNKIKSGYRMAKPDHATSEVYEIMVKCWNSEPEKRPSFYHLSEIVENLLPGQYKKSYEKIHLDFLKSDHPAVARMRVDSDNAYIGVTYKNEEDKLKDWEGGLDEQRLSADSGYIIPLPDIDPVPEEEDLGKRNRHSSQTSEESAIETGSSSSTFIKREDETIEDIDMMDDIGIDSSDLVEDSFL

SEQ ID NO: 1235 - protein, 867 aa, Homo sapiens
MQAEAADWFSSMPFQKHVYYPLASGPEGPDVAVAAAAAGAASMACAPPSAASGPLPFFQFRPRLESVDWRRLSAIDVDKVAGAVDVLTLQENIMNITFCKLEDEKCPHCQSGVDPVLLKLIRLAQFTIEYLLHSQEFLTSQLHTLEERLRLSHCDGEQSKKLLTKQAGEIKTLKEECKRRKKMISTQQLMIEAKANYYQCHFCDKAFMNQAFLQSHIQRRHTEENSHFEYQKNAQIEKLRSEIVVLKEELQLTRSELEAAHHASAVRFSKEYEMQKTKEEDFLKLFDRWKEEEKEKLVDEMEKVKEMFMKEFKELTSKNSALEYQLSEIQKSNMQIKSNIGTLKDAHEFKEDRSPYPQDFHNVMQLLDSQESKWTARVQAIHQEHKKEKGRLLSHIEKLRTSMIDDLNASNVFYKKRIEELGQRLQEQNELIITQRQQIKDFTCNPLNSISEPKGNPLAWQAFESQPAAPAVPMNAPALHTLETKSSLPMVHEQAFSSHILEPIEELSEEEKGRENEQKLNNNKMHLRKALKSNSSLTKGLRTMVEQNLMEKLETLGINADIRGISSDQLHRVLKSVESERHKQEREIPNFHQIREFLEHQVSCKIEEKALLSSDQCSVSQMDTLSTGEVPKMIQLPSKNRQLIRQKAVSTDRTSVPKIKKNVMEDPFPRKSSTITTPPFSSEEEQEDDDLIRAYASPGPLPVPPPQNKGSFGKNTVKSDADGTEGSEIEDTDDSPKPAGVAVKTPTEKVEKMFPHRKNVNKPVGGTNVPEMFIKKEELQELKCADVEDEDWDISSLEEEISLGKKSGKEQKEPPPAKNEPHFAHVLNAWGAFNPKGPKGEGLQENESSTLKSSLVTVTDWSDTSDV

SEQ ID NO: 1236 - protein, 503 aa, Homo sapiens
MPNVAETERSNDSGNGEHKSERKSPEENLQGAVKSFCTSASGAPLGPKGDGHYPWSCPVTHTREKIYAICSDYAFLNQATSIYKTPNPSRSPCLPDSTSLSAGNNSSRYIGIPTSTSEIIYNEENSLENLSNSLGKLPLAWEIDKSEFDGVTTNSKHKSGNAKKQVSKRKTSDKKGRYQKECPQHSPLEDIKQRKVLDLRRWYCISRPQYKTSCGISSLISCWNFLYSTMGAGNLPPITQEEALHILGFQPPFEDIRFGPFTGNTTLMRWFRQINDHFHVKGCSYVLYKPHGKNKTAGETASGALSKLTRGLKDESLAYIYHCQNHYFCPIGFEATPVKANKAFSRGPLSPQEVEYWILIGESSRKHPAIHCKKWADIVTDLNTQNPEYLDIRHLERGLQYRKTKKVGGNLHCIIAFQRLNWQRFGLWNFPFGTIRQESQPPTHAQGIAKSESEDNISKKQHGRLGRSFSASFHQDSAWKKMSSIHERRNSGYQGYSDYDGND

SEQ ID NO: 1237 - protein, 889 aa, Homo sapiens
MLPAPAAPRWPPLLLLLLLLLPLARGAPARPAAGGQASELVVPTRLPGSAGELALHLSAFGKGFVLRLAPDDSFLAPEFKIERLGGSGRATGGERGLRGCFFSGTVNGEPESLAAVSLCRGLSGSFLLDGEEFTIQPQGAGGSLAQPHRLQRWGPAGARPLPRGPEWEVETGEGQRQERGDHQEDSEEESQEEEAEGASEPPPPLGATSRTKRFVSEARFVETLLVADASMAAFYGADLQNHILTLMSVAARIYKHPSIKNSINLMVVKVLIVEDEKWGPEVSDNGGLTLRNFCNWQRRFNQPSDRHPEHYDTAILLTRQNFCGQEGLCDTLGVADIGTICDPNKSCSVIEDEGLQAAHTLAHELGHVLSMPHDDSKPCTRLFGPMGKHHVMAPLFVHLNQTLPWSPCSAMYLTELLDGGHGDCLLDAPAAALPLPTGLPGRMALYQLDQQCRQIFGPDFRHCPNTSAQDVCAQLWCHTDGAEPLCHTKNGSLPWADGTPCGPGHLCSEGSCLPEEEVERPKPVADGGWAPWGPWGECSRTCGGGVQFSHRECKDPEPQNGGRYCLGRRAKYQSCHTEECPPDGKSFREQQCEKYNAYNYTDMDGNLLQWVPKYAGVSPRDRCKLFCRARGRSEFKVFEAKVIDGTLCGPETLAICVRGQCVKAGCDHVVDSPRKLDKCGVCGGKGNSCRKVSGSLTPTNYGYNDIVTIPAGATNIDVKQRSHPGVQNDGNYLALKTADGQYLLNGNLAISAIEQDILVKGTILKYSGSIATLERLQSFRPLPEPLTVQLLTVPGEVFPPKVKYTFFVPNDVDFSMQSSKERATTNIIQPLLHAQWVLGDWSECSSTCGAGWQRRTVECRDPSGQASATCNKALKPEDAKPCESQLCPL

SEQ ID NO: 1238 - protein, 1044 aa, Homo sapiens
MKPGCAAGSPGNEWIFFSTDEITTRYRNTMSNGGLQRSVILSALILLRAVTGFSGDGRAIWSKNPNFTPVNESQLFLYDTFPKNFFWGIGTGALQVEGSWKKDGKGPSIWDHFIHTHLKNVSSTNGSSDSYIFLEKDLSALDFIGVSFYQFSISWPRLFPDGIVTVANAKGLQYYSTLLDALVLRNIEPIVTLYHWDLPLALQEKYGGWKNDTIIDIFNDYATYCFQMFGDRVKYWITIHNPYLVAWHGYGTGMHAPGEKGNLAAVYTVGHNLIKAHSKVWHNYNTHFRPHQKGWLSITLGSHWIEPNRSENTMDIFKCQQSMVSVLGWFANPIHGDGDYPEGMRKKLFSVLPIFSEAEKHEMRGTADFFAFSFGPNNFKPLNTMAKMGQNVSLNLREALNWIKLEYNNPRILIAENGWFTDSRVKTEDTTAIYMMKNFLSQVLQAIRLDEIRVFGYTAWSLLDGFEWQDAYTIRRGLFYVDFNSKQKERKPKSSAHYYKQIIRENGFSLKESTPDVQGQFPCDFSWGVTESVLKPESVASSPQFSDPHLYVWNATGNRLLHRVEGVRLKTRPAQCTDFVNIKKQLEMLARMKVTHYRFALDWASVLPTGNLSAVNRQALRYYRCVVSEGLKLGISAMVTLYYPTHAHLGLPEPLLHADGWLNPSTAEAFQAYAGLCFQELGDLVKLWITINEPNRLSDIYNRSGNDTYGAAHNLLVAHALAWRLYDRQFRPSQRGAVSLSLHADWAEPANPYADSHWRAAERFLQFEIAWFAEPLFKTGDYPAAMREYIASKHRRGLSSSALPRLTEAERRLLKGTVDFCALNHFTTRFVMHEQLAGSRYDSDRDIQFLQDITRLSSPTRLAVIPWGVRKLLRWVRRNYGDMDIYITASGIDDQALEDDRLRKYYLGKYLQEVLKAYLIDKVRIKGYYAFKLAEEKSKPRFGFFTSDFKAKSSIQFYNKVISSRGFPFENSSSRCSQTQENTECTVCLFLVQKKPLIFLGCCFFSTLVLLLSIAIFQRQKRRKFWKAKNLQHIPLKKGKRVVS

SEQ ID NO: 1239 - protein, 1047 aa, Homo sapiens
MRSEALLLYFTLLHFAGAGFPEDSEPISISHGNYTKQYPVFVGHKPGRNTTQRHRLDIQMIMIMNGTLYIAARDHIYTVDIDTSHTEEIYCSKKLTWKSRQADVDTCRMKGKHKDECHNFIKVLLKKNDDALFVCGTNAFNPSCRNYKMDTLEPFGDEFSGMARCPYDAKHANVALFADGKLYSATVTDFLAIDAVIYRSLGESPTLRTVKHDSKWLKEPYFVQAVDYGDYIYFFFREIAVEYNTMGKVVFPRVAQVCKNDMGGSQRVLEKQWTSFLKARLNCSVPGDSHFYFNILQAVTDVIRINGRDVVLATFSTPYNSIPGSAVCAYDMLDIASVFTGRFKEQKSPDSTWTPVPDERVPKPRPGCCAGSSSLERYATSNEFPDDTLNFIKTHPLMDEAVPSIFNRPWFLRTMVRYRLTKIAVDTAAGPYQNHTVVFLGSEKGIILKFLARIGNSGFLNDSLFLEEMSVYNSEKCSYDGVEDKRIMGMQLDRASSSLYVAFSTCVIKVPLGRCERHGKCKKTCIASRDPYCGWIKEGGACSHLSPNSRLTFEQDIERGNTDGLGDCHNSFVALNDISTPLPDNEMSYNTVYGHSSSLLPSTTTSDSTAQEGYESRGGMLDWKHLLDSPDSTDPLGAVSSHNHQDKKGVIRESYLKGHDQLVPVTLLAIAVILAFVMGAVFSGITVYCVCDHRRKDVAVVQRKEKELTHSRRGSMSSVTKLSGLFGDTQSKDPKPEAILTPLMHNGKLATPGNTAKMLIKADQHHLDLTALPTPESTPTLQQKRKPSRGSREWERNQNLINACTKDMPPMGSPVIPTDLPLRASPSHIPSVVVLPITQQGYQHEYVDQPKMSEVAQMALEDQAATLEYKTIKEHLSSKSPNHGVNLVENLDSLPPKVPQREASLGPPGASLSQTGLSKRLEMHHSSSYGVDYKRSYPTNSLTRSHQATTLKRNNTNSSNSSHLSRNQSFGRGDNPPPAPQRVDSIQVHSSQPSGQAVTVSRQPSLNAYNSLTRSGLKRTPSLKPDVPPKPSFAPLSTSMKPNDACT

SEQ ID NO: 1240 - protein, 2843 aa, Homo sapiens
MAAASYDQLLKQVEALKMENSNLRQELEDNSNHLTKLETEASNMKEVLKQLQGSIEDEAMASSGQIDLLERLKELNLDSSNFPGVKLRSKMSLRSYGSREGSVSSRSGECSPVPMGSFPRRGFVNGSRESTGYLEELEKERSLLLADLDKEEKEKDWYYAQLQNLTKRIDSLPLTENFSLQTDMTRRQLEYEARQIRVAMEEQLGTCQDMEKRAQRRIARIQQIEKDILRIRQLLQSQATEAERSSQNKHETGSHDAERQNEGQGVGEINMATSGNGQGSTTRMDHETASVLSSSSTHSAPRRLTSHLGTKVEMVYSLLSMLGTHDKDDMSRTLLAMSSSQDSCISMRQSGCLPLLIQLLHGNDKDSVLLGNSRGSKEARARASAALHNIIHSQPDDKRGRREIRVLHLLEQIRAYCETCWEWQEAHEPGMDQDKNPMPAPVEHQICPAVCVLMKLSFDEEHRHAMNELGGLQAIAELLQVDCEMYGLTNDHYSITLRRYAGMALTNLTFGDVANKATLCSMKGCMRALVAQLKSESEDLQQVIASVLRNLSWRADVNSKKTLREVGSVKALMECALEVKKESTLKSVLSALWNLSAHCTENKADICAVDGALAFLVGTLTYRSQTNTLAIIESGGGILRNVSSLIATNEDHRQILRENNCLQTLLQHLKSHSLTIVSNACGTLWNLSARNPKDQEALWDMGAVSMLKNLIHSKHKMIAMGSAAALRNLMANRPAKYKDANIMSPGSSLPSLHVRKQKALEAELDAQHLSETFDNIDNLSPKASHRSKQRHKQSLYGDYVFDTNRHDDNRSDNFNTGNMTVLSPYLNTTVLPSSSSSRGSLDSSRSEKDRSLERERGIGLGNYHPATENPGTSSKRGLQISTTAAQIAKVMEEVSAIHTSQEDRSSGSTTELHCVTDERNALRRSSAAHTHSNTYNFTKSENSNRTCSMPYAKLEYKRSSNDSLNSVSSSDGYGKRGQMKPSIESYSEDDESKFCSYGQYPADLAHKIHSANHMDDNDGELDTPINYSLKYSDEQLNSGRQSPSQNERWARPKHIIEDEIKQSEQRQSRNQSTTYPVYTESTDDKHLKFQPHFGQQECVSPYRSRGANGSETNRVGSNHGINQNVSQSLCQEDDYEDDKPTNYSERYSEEEQHEEEERPTNYSIKYNEEKRHVDQPIDYSLKYATDIPSSQKQSFSFSKSSSGQSSKTEHMSSSSENTSTPSSNAKRQNQLHPSSAQSRSGQPQKAATCKVSSINQETIQTYCVEDTPICFSRCSSLSSLSSAEDEIGCNQTTQEADSANTLQIAEIKEKIGTRSAEDPVSEVPAVSQHPRTKSSRLQGSSLSSESARHKAVEFSSGAKSPSKSGAQTPKSPPEHYVQETPLMFSRCTSVSSLDSFESRSIASSVQSEPCSGMVSGIISPSDLPDSPGQTMPPSRSKTPPPPPQTAQTKREVPKNKAPTAEKRESGPKQAAVNAAVQRVQVLPDADTLLHFATESTPDGFSCSSSLSALSLDEPFIQKDVELRIMPPVQENDNGNETESEQPKESNENQEKEAEKTIDSEKDLLDDSDDDDIEILEECIISAMPTKSSRKAKKPAQTASKLPPPVARKPSQLPVYKLLPSQNRLQPQKHVSFTPGDDMPRVYCVEGTPINFSTATSLSDLTIESPPNELAAGEGVRGGAQSGEFEKRDTIPTEGRSTDEAQGGKTSSVTIPELDDNKAEEGDILAECINSAMPKGKSHKPFRVKKIMDQVQQASASSSAPNKNQLDGKKKKPTSPVKPIPQNTEYRTRVRKNADSKNNLNAERVFSDNKDSKKQNLKNNSKVFNDKLPNNEDRVRGSFAFDSPHHYTPIEGTPYCFSRNDSLSSLDFDDDDVDLSREKAELRKAKENKESEAKVTSHTELTSNQQSANKTQAIAKQPINRGQPKPILQKQSTFPQSSKDIPDRGAATDEKLQNFAIENTPVCFSHNSSLSSLSDIDQENNNKENEPIKETEPPDSQGEPSKPQASGYAPKSFHVEDTPVCFSRNSSLSSLSIDSEDDLLQECISSAMPKKKKPSRLKGDNEKHSPRNMGGILGEDLTLDLKDIQRPDSEHGLSPDSENFDWKAIQEGANSIVSSLHQAAAAACLSRQASSDSDSILSLKSGISLGSPFHLTPDQEEKPFTSNKGPRILKPGEKSTLETKKIESESKGIKGGKKVYKSLITGKVRSNSEISGQMKQPLQANMPSISRGRTMIHIPGVRNSSSSTSPVSKKGPPLKTPASKSPSEGQTATTSPRGAKPSVKSELSPVARQTSQIGGSSKAPSRSGSRDSTPSRPAQQPLSRPIQSPGRNSISPGRNGISPPNKLSQLPRTSSPSTASTKSSGSGKMSYTSPGRQMSQQNLTKQTGLSKNASSIPRSESASKGLNQMNNGNGANKKVELSRMSSTKSSGSESDRSERPVLVRQSTFIKEAPSPTLRRKLEESASFESLSPSSRPASPTRSQAQTPVLSPSLPDMSLSTHSSVQAGGWRKLPPNLSPTIEYNDGRPAKRHDIARSHSESPSRLPINRSGTWKREHSKHSSSLPRVSTWRRTGSSSSILSASSESSEKAKSEDEKHVNSISGTKQSKENQVSAKGTWRKIKENEFSPTNSTSQTVSSGATNGAESKTLIYQMAPAVSKTEDVWVRIEDCPINNPRSGRSPTGNTPPVIDSVSEKANPNIKDSKDNQAKQNVGNGSVPMRTVGLENRLNSFIQVDAPDQKGTEIKPGQNNPVPVSETNESSIVERTPFSSSSSSKHSSPSGTVAARVTPFNYNPSPRKSSADSTSARPSQIPTPVNNNTKKRDSKTDSTESSGTQSPKRHSGSYLVTSV

SEQ ID NO: 1241 - protein, 346 aa, Homo sapiens
MAMVSEFLKQAWFIENEEQEYVQTVKSSKGGPGSAVSPYPTFNPSSDVAALHKAIMVKGVDEATIIDILTKRNNAQRQQIKAAYLQETGKPLDETLKKALTGHLEEVVLALLKTPAQFDADELRAAMKGLGTDEDTLIEILASRTNKEIRDINRVYREELKRDLAKDITSDTSGDFRNALLSLAKGDRSEDFGVNEDLADSDARALYEAGERRKGTDVNVFNTILTTRSYPQLRRVFQKYTKYSKHDMNKVLDLELKGDIEKCLTAIVKCATSKPAFFAEKLHQAMKGVGTRHKALIRIMVSRSEIDMNDIKAFYQKMYGISLCQAILDETKGDYEKILVALCGGN

SEQ ID NO: 1242 - protein, 918 aa, Homo sapiens
MPGGAGAARLCLLAFALQPLRPRAAREPGWTRGSEEGSPKLQHELIIPQWKTSESPVREKHPLKAELRVMAEGRELILDLEKNEQLFAPSYTETHYTSSGNPQTTTRKLEDHCFYHGTVRETELSSVTLSTCRGIRGLITVSSNLSYVIEPLPDSKGQHLIYRSEHLKPPPGNCGFEHSKPTTRDWALQFTQQTKKRPRRMKREDLNSMKYVELYLVADYLEFQKNRRDQDATKHKLIEIANYVDKFYRSLNIRIALVGLEVWTHGNMCEVSENPYSTLWSFLSWRRKLLAQKYHDNAQLITGMSFHGTTIGLAPLMAMCSVYQSGGVNMDHSENAIGVAATMAHEMGHNFGMTHDSADCCSASAADGGCIMAAATGHPFPKVFNGCNRRELDRYLQSGGGMCLSNMPDTRMLYGGRRCGNGYLEDGEECDCGEEEECNNPCCNASNCTLRPGAECAHGSCCHQCKLLAPGTLCREQARQCDLPEFCTGKSPHCPTNFYQMDGTPCEGGQAYCYNGMCLTYQEQCQQLWGPGARPAPDLCFEKVNVAGDTFGNCGKDMNGEHRKCNMRDAKCGKIQCQSSEARPLESNAVPIDTTIIMNGRQIQCRGTHVYRGPEEEGDMLDPGLVMTGTKCGYNHICFEGQCRNTSFFETEGCGKKCNGHGVCNNNQNCHCLPGWAPPFCNTPGHGGSIDSGPMPPESVGPVVAGVLVAILVLAVLMLMYYCCRQNNKLGQLKPSALPSKLRQQFSCPFRVSQNSGTGHANPTFKLQTPQGKRKVINTPEILRKPSQPPPRPPPDYLRGGSPPAPLPAHLSRAARNSPGPGSQIERTESSRRPPPSRPIPPAPNCIVSQDFSRPRPPQKALPANPVPGRRSLPRPGGASPLRPPGAGPQQSRPLAALAPKFPEYRSQRAGGMISSKI

SEQ ID NO: 1243 - protein, 362 aa, Homo sapiens
METDAPQPGLASPDSPHDPCKMFIGGLSWQTTQEGLREYFGQFGEVKECLVMRDPLTKRSRGFGFVTFMDQAGVDKVLAQSRHELDSKTIDPKVAFPRRAQPKMVTRTKKIFVGGLSVNTTVEDVKQYFEQFGKVDDAMLMFDKTTNRHRGFGFVTFESEDIVEKVCEIHFHEINNKMVECKKAQPKEVMSPTGSARGRSRVMPYGMDAFMLGIGMLGYPGFQATTYASRSYTGLAPGYTYQFPEFRVERTPLPSAPVLPELTAIPLTAYGPMAAAAAAAAVVRGTGSHPWTMAPPPGSTPSRTGGFLGTTSPGPMAELYGAANQDSGVSSYISAASPAPSTGFGHSLGGPLIATAFTNGYH

SEQ ID NO: 1244 - protein, 631 aa, Homo sapiens
MVSKLSQLQTELLAALLESGLSKEALIQALGEPGPYLLAGEGPLDKGESCGGGRGELAELPNGLGETRGSEDETDDDGEDFTPPILKELENLSPEEAAHQKAVVETLLQEDPWRVAKMVKSYLQQHNIPQREVVDTTGLNQSHLSQHLNKGTPMKTQKRAALYTWYVRKQREVAQQFTHAGQGGLIEEPTGDELPTKKGRRNRFKWGPASQQILFQAYERQKNPSKEERETLVEECNRAECIQRGVSPSQAQGLGSNLVTEVRVYNWFANRRKEEAFRHKLAMDTYSGPPPGPGPGPALPAHSSPGLPPPALSPSKVHGVRYGQPATSETAEVPSSSGGPLVTVSTPLHQVSPTGLEPSHSLLSTEAKLVSAAGGPLPPVSTLTALHSLEQTSPGLNQQPQNLIMASLPGVMTIGPGEPASLGPTFTNTGASTLVIGLASTQAQSVPVINSMGSSLTTLQPVQFSQPLHPSYQQPLMPPVQSHVTQSPFMATMAQLQSPHALYSHKPEVAQYTHTGLLPQTMLITDTTNLSALASLTPTKQVFTSDTEASSESGLHTPASQATTLHVPSQDPASIQHLQPAHRLSASPTVSSSSLVLYQSSDSSNGQSHLLPSNHSVIETFISTQMASSSQ

SEQ ID NO: 1245 - protein, 743 aa, Homo sapiens
MSLSMRDPVIPGTSMAYHPFLPHRAPDFAMSAVLGHQPPFFPALTLPPNGAAALSLPGALAKPIMDQLVGAAETGIPFSSLGPQAHLRPLKTMEPEEEVEDDPKVHLEAKELWDQFHKRGTEMVITKSGRRMFPPFKVRCSGLDKKAKYILLMDIIAADDCRYKFHNSRWMVAGKADPEMPKRMYIHPDSPATGEQWMSKVVTFHKLKLTNNISDKHGFTLAFPSDHATWQGNYSFGTQTILNSMHKYQPRFHIVRANDILKLPYSTFRTYLFPETEFIAVTAYQNDKITQLKIDNNPFAKGFRDTGNGRREKRKQLTLQSMRVFDERHKKENGTSDESSSEQAAFNCFAQASSPAASTVGTSNLKDLCPSEGESDAEAESKEEHGPEACDAAKISTTTSEEPCRDKGSPAVKAHLFAAERPRDSGRLDKASPDSRHSPATISSSTRGLGAEERRSPVREGTAPAKVEEARALPGKEAFAPLTVQTDAAAAHLAQGPLPGLGFAPGLAGQQFFNGHPLFLHPSQFAMGGAFSSMAAAGMGPLLATVSGASTGVSGLDSTAMASAAAAQGLSGASAATLPFHLQQHVLASQGLAMSPFGSLFPYPYTYMAAAAAASSAAASSSVHRHPFLNLNTMRPRLRYSPYSIPVPVPDGSSLLTTALPSMAAAAGPLDGKVAALAASPASVAVDSGSELNSRSSTLSSSSMSLSPKLCAEKEAATSELQSIQRLVSGLEAKPDRSRSASP

SEQ ID NO: 1246 - protein, 723 aa, Homo sapiens
MSLSMRDPVIPGTSMAYHPFLPHRAPDFAMSAVLGHQPPFFPALTLPPNGAAALSLPGALAKPIMDQLVGAAETGIPFSSLGPQAHLRPLKTMEPEEEVEDDPKVHLEAKELWDQFHKRGTEMVITKSGRRMFPPFKVRCSGLDKKAKYILLMDIIAADDCRYKFHNSRWMVAGKADPEMPKRMYIHPDSPATGEQWMSKVVTFHKLKLTNNISDKHGFTILNSMHKYQPRFHIVRANDILKLPYSTFRTYLFPETEFIAVTAYQNDKITQLKIDNNPFAKGFRDTGNGRREKRKQLTLQSMRVFDERHKKENGTSDESSSEQAAFNCFAQASSPAASTVGTSNLKDLCPSEGESDAEAESKEEHGPEACDAAKISTTTSEEPCRDKGSPAVKAHLFAAERPRDSGRLDKASPDSRHSPATISSSTRGLGAEERRSPVREGTAPAKVEEARALPGKEAFAPLTVQTDAAAAHLAQGPLPGLGFAPGLAGQQFFNGHPLFLHPSQFAMGGAFSSMAAAGMGPLLATVSGASTGVSGLDSTAMASAAAAQGLSGASAATLPFHLQQHVLASQGLAMSPFGSLFPYPYTYMAAAAAASSAAASSSVHRHPFLNLNTMRPRLRYSPYSIPVPVPDGSSLLTTALPSMAAAAGPLDGKVAALAASPASVAVDSGSELNSRSSTLSSSSMSLSPKLCAEKEAATSELQSIQRLVSGLEAKPDRSRSASP

SEQ ID NO: 1247 - protein, 620 aa, Homo sapiens
MSRPGHGGLMPVNGLGFPPQNVARVVVWEWLNEHSRWRPYTATVCHHIENVLKEDARGSVVLGQVDAQLVPYIIDLQSMHQFRQDTGTMRPVRRNFYDPSSAPGKGIVWEWENDGGAWTAYDMDICITIQNAYEKQHPWLDLSSLGFCYLIYFNSMSQMNRQTRRRRRLRRRLDLAYPLTVGSIPKSQSWPVGASSGQPCSCQQCLLVNSTRAASNAILASQRRKAPPAPPLPPPPPPGGPPGALAVRPSATFTGAALWAAPAAGPAEPAPPPGAPPRSPGAPGGARTPGQNNLNRPGPQRTTSVSARASIPPGVPALPVKNLNGTGPVHPALAGMTGILLCAAGLPVCLTRAPKPILHPPPVSKSDVKPVPGVPGVCRKTKKKHLKKSKNPEDVVRRYMQKVKNPPDEDCTICMERLVTASGYEGVLRHKGVRPELVGRLGRCGHMYHLLCLVAMYSNGNKDGSLQCPTCKAIYGEKTGTQPPGKMEFHLIPHSLPGFPDTQTIRIVYDIPTGIQGPEHPNPGKKFTARGFPRHCYLPNNEKGRKVLRLLITAWERRLIFTIGTSNTTGESDTVVWNEIHHKTEFGSNLTGHGYPDASYLDNVLAELTAQGVSEAAAKA

SEQ ID NO: 1248 - protein, 854 aa, Homo sapiens
MALRLVADFDLGKDVLPWLRAQRAVSEASGAGSGGADVLENDYESLHVLNVERNGNIIYTYKDDKGNVVFGLYDCQTRQNELLYTFEKDLQVFSCSVNSERTLLAASLVQSTKEGKRNELQPGSKCLTLLVEIHPVNNVKVLKAVDSYIWVQFLYPHIESHPLPENHLLLISEEKYIEQFRIHVAQEDGNRVVIKNSGHLPRDRIAEDFVWAQWDMSEQRLYYIDLKKSRSILKCIQFYADESYNLMFEVPLDISLSNSGFKLVNFGCDYHQYRDKFSKHLTLCVFTNHTGSLCVCYSPKCASWGQITYSVFYIHKGHSKTFTTSLENVGSHMTKGITFLNLDYYVAVYLPGHFFHLLNVQHPDLICHNLFLTGNNEMIDMLPHCPLQSLSGSLVLDCCSGKLYRALLSQSSLLQLLQNTCLDCEKMAALHCALYCGQGAQFLEAQIIQWISENVSACHSFDLIQEFIIASSYWSVYSETSNMDKLLPHSSVLTWNTEIPGITLVTEDIALPLMKVLSFKGYWEKLNSNLEYVKYAKPHFHYNNSVVRREWHNLISEEKTGKRRSAAYVRNILDNAVKVISNLEARNLGPRLTPLLQEEDSHQRLLMGLMVSELKDHFLRHLQGVEKKKIEQMVLDYISKLLDLICHIVETNWRKHNLHSWVLHFNSRGSAAEFAVFHIMTRILEATNSLFLPLPPGFHTLHTILGVQCLPLHNLLHCIDSGVLLLTETAVIRLMKDLDNTEKNEKLKFSIIVRLPPLIGQKICRLWDHPMSSNIISRNHVTRLLQNYKKQPRNSMINKSSFSVEFLPLNYFIEILTDIESSNQALYPFEGHDNVDAEFVEEAALKHTAMLLGL

SEQ ID NO: 1249 - protein, 133 aa, Homo sapiens
MRMSLAQRVLLTWLFTLLFLIMLVLKLDEKAPWNWFLIFIPVWIFDTILLVLLIVKMAGRCKSGFDPRHGSHNIKKKAWYLIAMLLKLAFCLALCAKLEQFTTMNLSYVFIPLWALLAGALTELGYNVFFVRD

SEQ ID NO: 1250 - protein, 782 aa, Homo sapiens
MSINLTVDIYIYLLSNARSVCGKQRSKQLYFLFSPKHYWRISHISLQRGFHTNIIRCKWTKSEAHSCSKHCYSPSNHGLHIGILKLSTSAPKGLTKVNICMSRIKSTLNSVSKAVFGNQNEMISRLAQFKPSSQILRKVSDSGWLKQKNIKQAIKSLKKYSDKSAEKSPFPEEKSHIIDKEEDIGKRSLFHYTSSITTKFGDSFYFLSNHINSYFKRKEKMSQQKENEHFRDKSELEDKKVEEGKLRSPDPGILAYKPGSESVHTVDKPTSPSAIPDVLQVSTKQSIANFLSRPTEGVQALVGGYIGGLVPKLKYDSKSQSEEQEEPAKTDQAVSKDRNAEEKKRLSLQREKIIARVSIDNRTRALVQALRRTTDPKLCITRVEELTFHLLEFPEGKGVAVKERIIPYLLRLRQIKDETLQAAVREILALIGYVDPVKGRGIRILSIDGGGTRGVVALQTLRKLVELTQKPVHQLFDYICGVSTGAILAFMLGLFHMPLDECEELYRKLGSDVFSQNVIVGTVKMSWSHAFYDSQTWENILKDRMGSALMIETARNPTCPKVAAVSTIVNRGITPKAFVFRNYGHFPGINSHYLGGCQYKMWQAIRASSAAPGYFAEYALGNDLHQDGGLLLNNPSALAMHECKCLWPDVPLECIVSLGTGRYESDVRNTVTYTSLKTKLSNVINSATDTEEVHIMLDGLLPPDTYFRFNPVMCENIPLDESRNEKLDQLQLEGLKYIERNEQKMKKVAKILSQEKTTLQKINDWIKLKTDMYEGLPFFSKL

SEQ ID NO: 1251 - protein, 1858 aa, Homo sapiens
MSIVIPLGVDTAETSYLEMAAGSEPESVEASPVVVEKSNSYPHQLYTSSSHHSHSYIGLPYADHNYGARPPPTPPASPPPSVLISKNEVGIFTTPNFDETSSATTISTSEDGSYGTDVTRCICGFTHDDGYMICCDKCSVWQHIDCMGIDRQHIPDTYLCERCQPRNLDKERAVLLQRRKRENMSDGDTSATESGDEVPVELYTAFQHTPTSITLTASRVSKVNDKRRKKSGEKEQHISKCKKAFREGSRKSSRVKGSAPEIDPSSDGSNFGWETKIKAWMDRYEEANNNQYSEGVQREAQRIALRLGNGNDKKEMNKSDLNTNNLLFKPPVESHIQKNKKILKSAKDLPPDALIIEYRGKFMLREQFEANGYFFKRPYPFVLFYSKFHGLEMCVDARTFGNEARFIRRSCTPNAEVRHEIQDGTIHLYIYSIHSIPKGTEITIAFDFDYGNCKYKVDCACLKENPECPVLKRSSESMENINSGYETRRKKGKKDKDISKEKDTQNQNITLDCEGTTNKMKSPETKQRKLSPLRLSVSNNQEPDFIDDIEEKTPISNEVEMESEEQIAERKRKMTREERKMEAILQAFARLEKREKRREQALERISTAKTEVKTECKDTQIVSDAEVIQEQAKEENASKPTPAKVNRTKQRKSFSRSRTHIGQQRRRHRTVSMCSDIQPSSPDIEVTSQQNDIENTVLTIEPETETALAEIITETEVPALNKCPTKYPKTKKHLVNEWLSEKNEKTGKPSDGLSERPLRITTDPEVLATQLNSLPGLTYSPHVYSTPKHYIRFTSPFLSEKRRRKEPTENISGSCKKRWLKQALEEENSAILHRFNSPCQERSRSPAVNGENKSPLLLNDSCSLPDLTTPLKKRRFYQLLDSVYSETSTPTPSPYATPTHTDITPMDPSFATPPRIKSDDETCRNGYKPIYSPVTPVTPGTPGNTMHFENISSPESSPEIKRRTYSQEGYDRSSTMLTLGPFRNSNLTELGLQEIKTIGYTSPRSRTEVNRQCPGEKEPVSDLQLGLDAVEPTALHKTLETPAHDRAEPNSQLDSTHSGRGTMYSSWVKSPDRTGVNFSVNSNLRDLTPSHQLEVGGGFRISESKCLMQDDTRGMFMETTVFCTSEDGLVSGFGRTVNDNLIDGNCTPQNPPQKKKVSLLEYRKRQREARKSGSKTENFPLISVSPHASGSLSNNGDGCASSNDNGEQVDHTASLPLPTPATVYNATSEETSNNCPVKDATASEKNEPEVQWTASTSVEQVRERSYQRALLLSDHRKDKDSGGESPCVSCSPSHVQSSPSSHSNHIPQLQAKGPVPSFSELMEDPDPENPEPTTTNECPSPDTSQNTCKSPPKMSKPGSPGSVIPAQAHGKIFTKPDPQWDSTVSASEAENGVHLKTELQQKQLSNNNQALSKNHPPQTHVRNSSEQLSQKLPSVPTKLHCPPSPHLENPPKSSTPHTPVQHGYLSPKPPSQQLGSPYRPHHSQSPQVGTPQREPQRNFYPAAQNLPANTQQATSGTLFTQTPSGQSSATYSQFNQQSLNSTAPPPPPPPPPSSSYYQNQQPSANFQNYNQLKGSLSQQTVFTSGPNQALPGTTSQQTVPGHHVTPGHFLPSQNPTIHHQTAAAVVPPPPPPPPAPGPHLVQQPNSHQQHSVAHVVGPVHAVTPGSHIHSQTAGHHLPPPPPPPGPAPHHHPPPHPSTGLQGLQAQHQHVVNSAPPPPPPPPPSSVLASGHHTTSAQALHHPPHQGPPLFPSSAHPTVPPYPSQATHHTTLGPGPQHQPSGTGPHCPLPVTGPHLQPQGPNSIPTPTASGFCPHPGSVALPHGVQGPQQASPVPGQIPIHRAQVPPTFQNNYHGSGWH

SEQ ID NO: 1252 - protein, 841 aa, Homo sapiens
MSVDEKPDSPMYVYESTVHCTNILLGLNDQRKKDILCDVTLIVERKEFRAHRAVLAACSEYFWQALVGQTKNDLVVSLPEEVTARGFGPLLQFAYTAKLLLSRENIREVIRCAEFLRMHNLEDSCFSFLQTQLLNSEDGLFVCRKDAACQRPHEDCENSAGEEEDEEEETMDSETAKMACPRDQMLPEPISFEAAAIPVAEKEEALLPEPDVPTDTKESSEKDALTQYPRYKKYQLACTKNVYNASSHSTSGFASTFREDNSSNSLKPGLARGQIKSEPPSEENEEESITLCLSGDEPDAKDRAGDVEMDRKQPSPAPTPTAPAGAACLERSRSVASPSCLRSLFSITKSVELSGLPSTSQQHFARSPACPFDKGITQGDLKTDYTPFTGNYGQPHVGQKEVSNFTMGSPLRGPGLEALCKQEGELDRRSVIFSSSACDQVSTSVHSYSGVSSLDKDLSEPVPKGLWVGAGQSLPSSQAYSHGGLMADHLPGRMRPNTSCPVPIKVCPRSPPLETRTRTSSSCSSYSYAEDGSGGSPCSLPLCEFSSSPCSQGARFLATEHQEPGLMGDGMYNQVRPQIKCEQSYGTNSSDESGSFSEADSESCPVQDRGQEVKLPFPVDQITDLPRNDFQMMIKMHKLTSEQLEFIHDVRRRSKNRIAAQRCRKRKLDCIQNLECEIRKLVCEKEKLLSERNQLKACMGELLDNFSCLSQEVCRDIQSPEQIQALHRYCPVLRPMDLPTASSINPAPLGAEQNIAASQCAVGENVPCCLEPGAAPPGPPWAPSNTSENCTSGRRLEGTDPGTFSERGPPLEPRSQTVTVDFCQEMTDKCTTDEQPRKDYT

SEQ ID NO: 1253 - protein, 1327 aa, Homo sapiens
MEIEEESAEKIQFLKSSGTSLLSTDSLETNELVVSELNHSSLGVGLDTLEEQEEKEQFFARLEKGLTSSIDYSRLNKELDSNDSTHFKALHSNQANAELTDDEHENESKHEELAENYSDDFEDEYVGAPLTTKDEEMPSKENSKSEKISVPKQEEEKTGMLANVVLLDSLDSVAEVNLDEQDKITPKPRCLPEMTENEMTGTGVSYGQSSSDVEALHQAYCHIAHSLGDEDKQKIESNTVEDIKSSVKGHPQENEENSKNISTMESDLPTVEELMKPIRIDSFGISGFDLQPVSSEKVAERKETEFFSSLPLKMNPNILSQDSQHVNLFFDKNDENVILQKTTNESMENSCPQVTEVTATEEHVDKMYLNILRKKITVNSSSLSQDDKINKTYRSQLSSEEEGAVMGKQVPYKKARSAPPLLKRKPQSGLYASVRSSGYGKPSSPLKMFSTLEKKTSEDIIKSKNLRSISTSNQPRKKEILSGTKLIKPAALDKPAHKTESCLSTRKKSENPTETDSCIQFQTDSLGYCGENKEKKLLMFKRVQEAEDKWRGAQALIEQIKATFSEKEKELENKLEELKKQQEKELFKLNQDNYILQAKLSSFEETNKKQRWLHFGEAADPVTGEKLKQIQKEIQEQETLLQGYQQENERLYNQVKDLQEQNKKNEERMFKENQSLFSEVASLKEQMHKSRFLSQVVEDSEPTRNQNFTDLLAELRMAQKEKDSLLEDIKRLKQDKQALEVDFEKMKKERDQAKDQIAYVTGEKLYEIKILEETHKQEISRLQKRLQWYAENQELLDKDALRLREANEEIEKLKLEIEKLKAESGNPSIRQKIRLKDKAADAKKIQDLERQVKEMEGILKRRYPNSLPALILAASAAGDTVDKNTVEFMEKRIKKLEADLEGKDEDAKKSLRTMEQQFQKMKIQYEQRLEQQEQLLACKLNQHDSPRIKALEKELDDIKEAHQITVRNLEAEIDVLKHQNAELDVKKNDKDDEDFQSIEFQVEQAHAKAKLVRLNEELAAKKREIQDLSKTVERLQKDRRMMLSNQNSKGREEMSAKRAKKDVLHSSKGNANSFPGTLDSKLYQPHTFTDSHVSEVLQENYRLKNELEGLISEKNELKMKSEAVMNQFENSMRRVKEDTAAHIASLKASHQREIEKLLCQNAVENSSSKVAELNRKIATQEVLIRHFQSQVNELQSKQESLVVSEVREEILQKEITKLLEELREAKENHTPEMKHFVGLEKKIKQMEMRHAQREQELQQIIQQTHQVVETEQNKEVEKWKRLAQLKNRELEKFRTELDSILDVLRELHRQGVVVPVAFADEMNAPEY

SEQ ID NO: 1254 - protein, 893 aa, Homo sapiens
MVPWVRTMGQKLKQRLRLDVGREICRQYPLFCFLLLCLSAASLLLNRYIHILMIFWSFVAGVVTFYCSLGPDSLLPNIFFTIKYKPKQLGLQELFPQGHSCAVCGKVKCKRHRPSLLLENYQPWLDLKISSKVDASLSEVDIPSIITKKLLKAAMKHIEVIVKARQKVKNTEFLQQAALEEYGPELHVALRSRRDELHYLRKLTELLFPYILPPKATDCRSLTLLIREILSGSVFLPSLDFLADPDTVNHLLIIFIDDSPPEKATEPASPLVPFLQKFAEPRNKKPSVLKLELKQIREQQDLLFRFMNFLKQEGAVHVLQFCLTVEEFNDRILRPELSNDEMLSLHEELQKIYKTYCLDESIDKIRFDPFIVEEIQRIAEGPYIDVVKLQTMRCLFEAYEHVLSLLENVFTPMFCHSDEYFRQLLRGAESPTRNSKLNRNTQKRGESFGISRIGSKIKGVFKSTTMEGAMLPNYGVAEGEDDFIEEGIVVMEDDSPVEAVSTPNTPRNLAAWKISIPYVDFFEDPSSERKEKKERIPVFCIDVERNDRRAVGHEPEHWSVYRRYLEFYVLESKLTEFHGAFPDAQLPSKRIIGPKNYEFLKSKREEFQEYLQKLLQHPELSNSQLLADFLSPNGGETQFLDKILPDVNLGKIIKSVPGKLMKEKGQHLEPFIMNFINSCESPKPKPSRPELTILSPTSENNKKLFNDLFKNNANRAENTERKQNQNYFMEVMTVEGVYDYLMYVGRVVFQVPDWLHHLLMGTRILFKNTLEMYTDYYLQCKLEQLFQEHRLVSLITLLRDAIFCENTEPRSLQDKQKGAKQTFEEMMNYIPDLLVKCIGEETKYESIRLLFDGLQQPVLNKQLTYVLLDIVIQELFPELNKVQKEVTSVTSWM

SEQ ID NO: 1255 - protein, 712 aa, Homo sapiens
MATSSMSKGCFVFKPNSKKRKISLPIEDYFNKGKNEPEDSKLRFETYQLIWQQMKSENERLQEELNKNLFDNLIEFLQKSHSGFQKNSRDLGGQIKLREIPTAALVLGVNVTDHDLTFGSLTEALQNNVTPYVVSLQAKDCPDMKHFLQKLISQLMDCCVDIKSKEEESVHVTQRKTHYSMDSLSSWYMTVTQKTDPKMLSKKRTTSSQWQSPPVVVILKDMESFATKVLQDFIIISSQHLHEFPLILIFGIATSPIIIHRLLPHAVSSLLCIELFQSLSCKEHLTTVLDKLLLTTQFPFKINEKVLQVLTNIFLYHDFSVQNFIKGLQLSLLEHFYSQPLSVLCCNLPEAKRRINFLSNNQCENIRRLPSFRRYVEKQASEKQVALLTNERYLKEETQLLLENLHVYHMNYFLVLRCLHKFTSSLPKYPLGRQIRELYCTCLEKNIWDSEEYASVLQLLRMLAKDELMTILEKCFKVFKSYCENHLGSTAKRIEEFLAQFQSLDAETKEEEDASGSQPKGLQKTDLYHLQKSLLEMKELRRSKKQTKFEVLRENVVNFIDCLVREYLLPPETQPLHEVVYFSAAHALREHLNAAPRIALHTALNNPYYYLKNEALKSEEGCIPNIAPDICIAYKLHLECSRLINLVDWSEAFATVVTAAEKMDANSATSEEMNEIIHARFIRAVSELELLGFIKPTKQKTDHVARLTWGGC

SEQ ID NO: 1256 - protein, 227 aa, Homo sapiens
MEGSAVTVLERGGASSPAERRSKRRRRSGGDGGGGGGARAPEGVRAPAAGQPRATKGAPPPPGTPPPSPMSSAIERKSLDPSEEPVDEVLQIPPSLLTCGGCQQNIGDRYFLKAIDQYWHEDCLSCDLCGCRLGEVGRRLYYKLGRKLCRRDYLRLFGQDGLCASCDKRIRAYEMTMRVKDKVYHLECFKCAACQKHFCVGDRYLLINSDIVCEQDIYEWTKINGMI

SEQ ID NO: 1257 - protein, 1025 aa, Homo sapiens
MHRKKVDNRIRILIENGVAERQRSLFVVVGDRGKDQVVILHHMLSKATVKARPSVLWCYKKELGFSSHRKKRMRQLQKKIKNGTLNIKQDDPFELFIAATNIRYCYYNETHKILGNTFGMCVLQDFEALTPNLLARTVETVEGGGLVVILLRTMNSLKQLYTVTMDVHSRYRTEAHQDVVGRFNERFILSLASCKKCLVIDDQLNILPISSHVATMEALPPQTPDESLGPSDLELRELKESLQDTQPVGVLVDCCKTLDQAKAVLKFIEGISEKTLRSTVALTAARGRGKSAALGLAIAGAVAFGYSNIFVTSPSPDNLHTLFEFVFKGFDALQYQEHLDYEIIQSLNPEFNKAVIRVNVFREHRQTIQYIHPADAVKLGQAELVVIDEAAAIPLPLVKSLLGPYLVFMASTINGYEGTGRSLSLKLIQQLRQQSAQSQVSTTAENKTTTTARLASARTLYEVSLQESIRYAPGDAVEKWLNDLLCLDCLNITRIVSGCPLPEACELYYVNRDTLFCYHKASEVFLQRLMALYVASHYKNSPNDLQMLSDAPAHHLFCLLPPVPPTQNALPEVLAVIQVCLEGEISRQSILNSLSRGKKASGDLIPWTVSEQFQDPDFGGLSGGRVVRIAVHPDYQGMGYGSRALQLLQMYYEGRFPCLEEKVLETPQEIHTVSSEAVSLLEEVITPRKDLPPLLLKLNERPAERLDYLGVSYGLTPRLLKFWKRAGFVPVYLRQTPNDLTGEHSCIMLKTLTDEDEADQGGWLAAFWKDFRRRFLALLSYQFSTFSPSLALNIIQNRNMGKPAQPALSREELEALFLPYDLKRLEMYSRNMVDYHLIMDMIPAISRIYFLNQLGDLALSAAQSALLLGIGLQHKSVDQLEKEIELPSGQLMGLFNRIIRKVVKLFNEVQEKAIEEQMVAAKDVVMEPTMKTLSDDLDEAAKEFQEKHKKEVGKLKSMDLSEYIIRGDDEEWNEVLNKAGPNASIISLKSDKKRKLEAKQEPKQSKKLKNRETKNKKDMKLKRKK

SEQ ID NO: 1258 - protein, 155 aa, Homo sapiens
MAAETRNVAGAEAPPPQKRYYRQRAHSNPMADHTLRYPVKPEEMDWSELYPEFFAPLTQNQSHDDPKDKKEKRAQAQVEFADIGCGYGGLLADKDVLPLPRPTFQADKAQVANHQSHPASRICLRAKSWGAGVYHNRCAGATRLDVHSFRRAPTV

SEQ ID NO: 1259 - protein, 1137 aa, Homo sapiens
MAGARSRDPWGASGICYLFGSLLVELLFSRAVAFNLDVMGALRKEGEPGSLFGFSVALHRQLQPRPQSWLLVGAPQALALPGQQANRTGGLFACPLSLEETDCYRVDIDQGADMQKESKENQWLGVSVRSQGPGGKIVTCAHRYEARQRVDQILETRDMIGRCFVLSQDLAIRDELDGGEWKFCEGRPQGHEQFGFCQQGTAAAFSPDSHYLLFGAPGTYNWKGLLFVTNIDSSDPDQLVYKTLDPADRLPGPAGDLALNSYLGFSIDSGKGLVRAEELSFVAGAPRANHKGAVVILRKDSASRLVPEVMLSGERLTSGFGYSLAVADLNSDGWPDLIVGAPYFFERQEELGGAVYVYLNQGGHWAGISPLRLCGSPDSMFGISLAVLGDLNQDGFPDIAVGAPFDGDGKVFIYHGSSLGVVAKPSQVLEGEAVGIKSFGYSLSGSLDMDGNQYPDLLVGSLADTAVLFRARPILHVSHEVSIAPRSIDLEQPNCAGGHSVCVDLRVCFSYIAVPSSYSPTVALDYVLDADTDRRLRGQVPRVTFLSRNLEEPKHQASGTVWLKHQHDRVCGDAMFQLQENVKDKLRAIVVTLSYSLQTPRLRRQAPGQGLPPVAPILNAHQPSTQRAEIHFLKQGCGEDKICQSNLQLVRARFCTRVSDTEFQPLPMDVDGTTALFALSGQPVIGLELMVTNLPSDPAQPQADGDDAHEAQLLVMLPDSLHYSGVRALDPAEKPLCLSNENASHVECELGNPMKRGAQVTFYLILSTSGISIETTELEVELLLATISEQELHPVSARARVFIELPLSIAGMAIPQQLFFSGVVRGERAMQSERDVGSKVKYEVTVSNQGQSLRTLGSAFLNIMWPHEIANGKWLLYPMQVELEGGQGPGQKGLCSPRPNILHLDVDSRDRRRRELEPPEQQEPGERQEPSMSWWPVSSAEKKKNITLDCARGTANCVVFSCPLYSFDRAAVLHVWGRLWNSTFLEEYSAVKSLEVIVRANITVKSSIKNLMLRDASTVIPVMVYLDPMAVVAEGVPWWVILLAVLAGLLVLALLVLLLWKMGFFKRAKHPEATVPQYHAVKIPREDRQQFKEEKTGTILRNNWGSPRREGPDAHPILAADGHPELGPDGHPGPGTA

SEQ ID NO: 1260 - protein, 318 aa, Homo sapiens
MWLPLLLGALLWAVLWLLRDRQSLPASNAFVFITGCDSGFGRLLALQLDQRGFRVLASCLTPSGAEDLQRVASSRLHTTLLDITDPQSVQQAAKWVEMHVKEAGLFGLVNNAGVAGIIGPTPWLTRDDFQRVLNVNTMGPIGVTLALLPLLQQARGRVINITSVLGRLAANGGGYCVSKFGLEAFSDSLRRDVAHFGIRVSIVEPGFFRTPVTNLESLEKTLQACWARLPPATQAHYGGAFLTKYLKMQQRIMNLICDPDLTKVSRCLEHALTARHPRTRYSPGWDAKLLWLPASYLPASLVDAVLTWVLPKPAQAVY

SEQ ID NO: 1261 - protein, 836 aa, Homo sapiens
MHAQRQFVVAAVRAEVRRHEVAKQALNRLRKLAERVDDPELQDSIQASLDSIREAVINSQEWTLSRSIPELRLGVLGDARSGKSSLIHRFLTGSYQVLEKTESEQYKKEMLVDGQTHLVLIREEAGAPDAKFSGWADAVIFVFSLEDENSFQAVSRLHGQLSSLRGEGRGGLALALVGTQDRISASSPRVVGDARARALCADMKRCSYYETCATYGLNVDRVFQEVAQKVVTLRKQQQLLAACKSLPSSPSHSAASTPVAGQASNGGHTSDYSSSLPSSPNVGHRELRAEAAAVAGLSTPGSLHRAAKRRTSLFANRRGSDSEKRSLDSRGETTGSGRAIPIKQSFLLKRSGNSLNKEWKKKYVTLSSNGFLLYHPSINDYIHSTHGKEMDLLRTTVKVPGKRPPRAISAFGPSASINGLVKDMSTVQMGEGLEATTPMPSPSPSPSSLQPPPDQTSKHLLKPDRNLARALSTDCTPSGDLSPLSREPPPSPMVKKQRRKKLTTPSKTEGSAGQAEEENFEFLIVSSTGQTWHFEAASFEERDAWVQAIESQILASLQCCESSKVKLRTDSQSEAVAIQAIRNAKGNSICVDCGAPNPTWASLNLGALICIECSGIHRNLGTHLSRVRSLDLDDWPRELTLVLTAIGNDTANRVWESDTRGRAKPSRDSSREERESWIRAKYEQLLFLAPLSTSEEPLGRQLWAAVQAQDVATVLLLLAHARHGPLDTSVEDPQLRSPLHLAAELAHVVITQLLLWYGADVAARDAQGRTALFYARQAGSQLCADILLQHGCPGEGGSAATTPSAATTPSITATPSPRRRSSAASVGRADAPVALV

SEQ ID NO: 1262 - protein, 303 aa, Homo sapiens
MATSRYEPVAEIGVGAYGTVYKARDPHSGHFVALKSVRVPNGGGGGGGLPISTVREVALLRRLEAFEHPNVVRLMDVCATSRTDREIKVTLVFEHVDQDLRTYLDKAPPPGLPAETIKDLMRQFLRGLDFLHANCIVHRDLKPENILVTSGGTVKLADFGLARIYSYQMALTPVVVTLWYRAPEVLLQSTYATPVDMWSVGCIFAEMFRRKPLFCGNSEADQLGKIFDLIGLPPEDDWPRDVSLPRGAFPPRGPRPVQSVVPEMEESGAQLLLEMLTFNPHKRISAFRALQHSYLHKDEGNPE

SEQ ID NO: 1263 - protein, 778 aa, Homo sapiens
MTTRQATKDPLLRGVSPTPSKIPVRSQKRTPFPTVTSCAVDQENQDPRRWVQKPPLNIQRPLVDSAGPRPKARHQAETSQRLVGISQPRNPLEELRPSPRGQNVGPGPPAQTEAPGTIEFVADPAALATILSGEGVKSCHLGRQPSLAKRVLVRGSQGGTTQRVQGVRASAYLAPRTPTHRLDPARASCFSRLEGPGPRGRTLCPQRLQALISPSGPSFHPSTRPSFQELRRETAGSSRTSVSQASGLLLETPVQPAFSLPKGEREVVTHSDEGGVASLGLAQRVPLRENREMSHTRDSHDSHLMPSPAPVAQPLPGHVVPCPSPFGRAQRVPSPGPPTLTSYSVLRRLTVQPKTRFTPMPSTPRVQQAQWLRGVSPQSCSEDPALPWEQVAVRLFDQESCIRSLEGSGKPPVATPSGPHSNRTPSLQEVKIQRIGILQQLLRQEVEGLVGGQCVPLNGGSSLDMVELQPLLTEISRTLNATEHNSGTSHLPGLLKHSGLPKPCLPEECGEPQPCPPAEPGPPEAFCRSEPEIPEPSLQEQLEVPEPYPPAEPRPLESCCRSEPEIPESSRQEQLEVPEPCPPAEPRPLESYCRIEPEIPESSRQEQLEVPEPCPPAEPGPLQPSTQGQSGPPGPCPRVELGASEPCTLEHRSLESSLPPCCSQWAPATTSLIFSSQHPLCASPPICSLQSLRPPAGQAGLSNLAPRTLALRERLKSCLTAIHCFHEARLDDECAFYTSRAPPSGPTRVCTNPVATLLEWQDALCFIPVGSAAPQGSP

SEQ ID NO: 1264 - protein, 1201 aa, Homo sapiens
MNFEGLDPGLAEYAPAMHSALDPVLDAHLNPSLLQNVELDPEGVALEALPVQESVHIMEGVYSELHSVVAEVGVPVSVSHFDLHEEMLWVGSHGGHATSFFGPALERYSSFQVNGSDDIRQIQSLENGILFLTKNNLKYMARGGLIIFDYLLDENEDMHSLLLTDSSTLLVGGLQNHIIEIDLNTVQETQKYAVETPGVTIMRQTNRFFFCGHTSGKVSLRDLRTFKVEHEFDAFSGSLSDFDVHGNLLAACGFSSRLTGLACDRFLKVYDLRMMRAITPLQVHVDPAFLRFIPTYTSRLAIISQSGQCQFCEPTGLANPADIFHVNPVGPLLMTFDVSASKQALAFGDSEGCVHLWTDSPEPSFNPYSRETEFALPCLVDSLPPLDWSQDLLPLSLIPVPLTTDTLLSDWPAANSAPAPRRAPPVDAEILRTMKKVGFIGYAPNPRTRLRNQIPYRLKESDSEFDSFSQVTESPVGREEEPHLHMVSKKYRKVTIKYSKLGLEDFDFKHYNKTLFAGLEPHIPNAYCNCMIQVLYFLEPVRCLIQNHLCQKEFCLACELGFLFHMLDLSRGDPCQGNNFLRAFRTIPEASALGLILADSDEASGKGNLARLIQRWNRFILTQLHQDMQELEIPQAYRGAGGSFCSSGDSVIGQLFSCEMENCSLCRCGSETVRASSTLLFTLSYPDGSKSDKTGKNYDFAQVLKRSICLDQNTQAWCDTCEKYQPTIQTRNIRHLPDILVINCEVNSSKEADFWRMQAEVAFKMAVKKHGGEISKNKEFALADWKELGSPEGVLVCPSIEELKNVWLPFSIRMKMTKNKGLDVCNWTDGDEMQWGPARAEEEHGVYVYDLMATVVHILDSRTGGSLVAHIKVGETYHQRKEGVTHQQWYLFNDFLIEPIDKHEAVQFDMNWKVPAILYYVKRNLNSRYNLNIKNPIEASVLLAEASLARKQRKTHTTFIPLMLNEMPQIGDLVGLDAEFVTLNEEEAELRSDGTKSTIKPSQMSVARITCVRGQGPNEGIPFIDDYISTQEQVVDYLTQYSGIKPGDLDAKISSKHLTTLKSTYLKLRFLIDIGVKFVGHGLQKDFRVINLMVPKDQVLDTVYLFHMPRKRMISLRFLAWYFLDLKIQGETHDSIEDARTALQLYRKYLELSKNGTEPESFHKVLKGLYEKGRKMDWKVPEPEGQTSPKNAAVFSSVLAL

SEQ ID NO: 1265 - protein, 2120 aa, Homo sapiens
MRSFKRVNFGTLLSSQKEAEELLPALKEFLSNPPAGFPSSRSDAERRQACDAILRACNQQLTAKLACPRHLGSLLELAELACDGYLVSTPQRPPLYLERILFVLLRNAAAQGSPEATLRLAQPLHACLVQCSREAAPQDYEAVARGSFSLLWKGAEALLERRAAFAARLKALSFLVLLEDESTPCEVPHFASPTACRAVAAHQLFDASGHGLNEADADFLDDLLSRHVIRALVGERGSSSGLLSPQRALCLLELTLEHCRRFCWSRHHDKAISAVEKAHSYLRNTNLAPSLQLCQLGVKLLQVGEEGPQAVAKLLIKASAVLSKSMEAPSPPLRALYESCQFFLSGLERGTKRRYRLDAILSLFAFLGGYCSLLQQLRDDGVYGGSSKQQQSFLQMYFQGLHLYTVVVYDFAQGCQIVDLADLTQLVDSCKSTVVWMLEALEGLSGQELTDHMGMTASYTSNLAYSFYSHKLYAEACAISEPLCQHLGLVKPGTYPEVPPEKLHRCFRLQVESLKKLGKQAQGCKMVILWLAALQPCSPEHMAEPVTFWVRVKMDAARAGDKELQLKTLRDSLSGWDPETLALLLREELQAYKAVRADTGQERFNIICDLLELSPEETPAGAWARATHLVELAQVLCYHDFTQQTNCSALDAIREALQLLDSVRPEAQARDQLLDDKAQALLWLYICTLEAKMQEGIERDRRAQAPGNLEEFEVNDLNYEDKLQEDRFLYSNIAFNLAADAAQSKCLDQALALWKELLTKGQAPAVRCLQQTAASLQILAALYQLVAKPMQALEVLLLLRIVSERLKDHSKAAGSSCHITQLLLTLGCPSYAQLHLEEAASSLKHLDQTTDTYLLLSLTCDLLRSQLYWTHQKVTKGVSLLLSVLRDPALQKSSKAWYLLRVQVLQLVAAYLSLPSNNLSHSLWEQLCAQGWQTPEIALIDSHKLLRSIILLLMGSDILSTQKAAVETSFLDYGENLVQKWQVLSEVLSCSEKLVCHLGRLGSVSEAKAFCLEALKLTTKLQIPRQCALFLVLKGELELARNDIDLCQSDLQQVLFLLESCTEFGGVTQHLDSVKKVHLQKGKQQAQVPCPPQLPEEELFLRGPALELVATVAKEPGPIAPSTNSSPVLKTKPQPIPNFLSHSPTCDCSLCASPVLTAVCLRWVLVTAGVRLAMGHQAQGLDLLQVVLKGCPEAAERLTQALQASLNHKTPPSLVPSLLDEILAQAYTLLALEGLNQPSNESLQKVLQSGLKFVAARIPHLEPWRASLLLIWALTKLGGLSCCTTQLFASSWGWQPPLIKSVPGSEPSKTQGQKRSGRGRQKLASAPLRLNNTSQKGLEGRGLPCTPKPPDRIRQAGPHVPFTVFEEVCPTESKPEVPQAPRVQQRVQTRLKVNFSDDSDLEDPVSAEAWLAEEPKRRGTASRGRGRARKGLSLKTDAVVAPGSAPGNPGLNGRSRRAKKVASRHCEERRPQRASDQARPGPEIMRTIPEEELTDNWRKMSFEILRGSDGEDSASGGKTPAPGPEAASGEWELLRLDSSKKKLPSPCPDKESDKDLGPRLRLPSAPVATGLSTLDSICDSLSVAFRGISHCPPSGLYAHLCRFLALCLGHRDPYATAFLVTESVSITCRHQLLTHLHRQLSKAQKHRGSLEIADQLQGLSLQEMPGDVPLARIQRLFSFRALESGHFPQPEKESFQERLALIPSGVTVCVLALATLQPGTVGNTLLLTRLEKDSPPVSVQIPTGQNKLHLRSVLNEFDAIQKAQKENSSCTDKREWWTGRLALDHRMEVLIASLEKSVLGCWKGLLLPSSEEPGPAQEASRLQELLQDCGWKYPDRTLLKIMLSGAGALTPQDIQALAYGLCPTQPERAQELLNEAVGRLQGLTVPSNSHLVLVLDKDLQKLPWESMPSLQALPVTRLPSFRFLLSYSIIKEYGASPVLSQGVDPRSTFYVLNPHNNLSSTEEQFRANFSSEAGWRGVVGEVPRPEQVQEALTKHDLYIYAGHGAGARFLDGQAVLRLSCRAVALLFGCSSAALAVRGNLEGAGIVLKYIMAGCPLFLGNLWDVTDRDIDRYTEALLQGWLGAGPGAPLLYYVNQARQAPRLKYLIGAAPIAYGLPVSLR

SEQ ID NO: 1266 - protein, 600 aa, Homo sapiens
MSCRSYRVSSGHRVGNFSSCSAMTPQNLNRFRANSVSCWSGPGFRGLGSFGSRSVITFGSYSPRIAAVGSRPIHCGVRFGAGCGMGFGDGRGVGLGPRADSCVGLGFGAGSGIGYGFGGPGFGYRVGGVGVPAAPSITAVTVNKSLLTPLNLEIDPNAQRVKKDEKEQIKTLNNKFASFIDKVRFLEQQNKLLETKWSFLQEQKCIRSNLEPLFESYITNLRRQLEVLVSDQARLQAERNHLQDVLEGFKKKYEEEVVCRANAENEFVALKKDVDAAFMNKSDLEANVDTLTQEIDFLKTLYMEEIQLLQSHISETSVIVKMDNSRDLNLDGIIAEVKAQYEEVARRSRADAEAWYQTKYEEMQVTAGQHCDNLRNIRNEINELTRLIQRLKAEIEHAKAQRAKLEAAVAEAEQQGEATLSDAKCKLADLECALQQAKQDMARQLCEYQELMNAKLGLDIEIATYRRLLEGEESRLCEGVGPVNISVSSSRGGLVCGPEPLVAGSTLSRGGVTFSGSSSVCATSGVLASCGPSLGGARVAPATGDLLSTGTRSGSMLISEACVPSVPCPLPTQGGFSSCSGGRSSSVRFVSTTTSCRTKY

SEQ ID NO: 1267 - protein, 505 aa, Homo sapiens
MAESAGASSFFPLVVLLLAGSGGSGPRGVQALLCACTSCLQANYTCETDGACMVSIFNLDGMEHHVRTCIPKVELVPAGKPFYCLSSEDLRNTHCCYTDYCNRIDLRVPSGHLKEPEHPSMWGPVELVGIIAGPVFLLFLIIIIVFLVINYHQRVYHNRQRLDMEDPSCEMCLSKDKTLQDLVYDLSTSGSGSGLPLFVQRTVARTIVLQEIIGKGRFGEVWRGRWRGGDVAVKIFSSREERSWFREAEIYQTVMLRHENILGFIAADNKDNGTWTQLWLVSDYHEHGSLFDYLNRYTVTIEGMIKLALSAASGLAHLHMEIVGTQGKPGIAHRDLKSKNILVKKNGMCAIADLGLAVRHDAVTDTIDIAPNQRVGTKRYMAPEVLDETINMKHFDSFKCADIYALGLVYWEIARRCNSGGVHEEYQLPYYDLVPSDPSIEEMRKVVCDQKLRPNIPNWWQSYEALRVMGKMMRECWYANGAARLTALRIKKTLSQLSVQEDVKI

SEQ ID NO: 1268 - protein, 613 aa, Homo sapiens
MAAETLLSSLLGLLLLGLLLPASLTGGVGSLNLEELSEMRYGIEILPLPVMGGQSQSSDVVIVSSKYKQRYECRLPAGAIHFQREREEETPAYQGPGIPELLSPMRDAPCLLKTKDWWTYEFCYGRHIQQYHMEDSEIKGEVLYLGYYQSAFDWDDETAKASKQHRLKRYHSQTYGNGSKCDLNGRPREAEVRFLCDEGAGISGDYIDRVDEPLSCSYVLTIRTPRLCPHPLLRPPPSAAPQAILCHPSLQPEEYMAYVQRQAVDSKQYGDKIIEELQDLGPQVWSETKSGVAPQKMAGASPTKDDSKDSDFWKMLNEPEDQAPGGEEVPAEEQDPSPEAADSASGAPNDFQNNVQVKVIRSPADLIRFIEELKGGTKKGKPNIGQEQPVDDAAEVPQREPEKERGDPERQREMEEEEDEDEDEDEDEDERQLLGEFEKELEGILLPSDRDRLRSEVKAGMERELENIIQETEKELDPDGLKKESERDRAMLALTSTLNKLIKRLEEKQSPELVKKHKKKRVVPKKPPPSPQPTGKIEIKIVRPWAEGTEEGARWLTDEDTRNLKEIFFNILVPGAEEAQKERQRQKELESNYRRVWGSPGGEGTGDLDEFDF

SEQ ID NO: 1269 - protein, 513 aa, Homo sapiens
MSYHSFQPGSRCGSQSFSSYSAVMPRMVTHYAVSKGPCRPGGGRGLRALGCLGSRSLCNVGFGRPRVASRCGGTLPGFGYRLGATCGPSACITPVTINESLLVPLALEIDPTVQRVKRDEKEQIKCLNNRFASFINKVRFLEQKNKLLETKWNFMQQQRCCQTNIEPIFEGYISALRRQLDCVSGDRVRLESELCSLQAALEGYKKKYEEELSLRPCVENEFVALKKDVDTAFLMKADLETNAEALVQEIDFLKSLYEEEICLLQSQISETSVIVKMDNSRELDVDGIIAEIKAQYDDIASRSKAEAEAWYQCRYEELRVTAGNHCDNLRNRKNEILEMNKLIQRLQQETENVKAQRCKLEGAIAEAEQQGEAALNDAKCKLAGLEEALQKAKQDMACLLKEYQEVMNSKLGLDIEIATYRRLLEGEEHRLCEGIGPVNISVSSSKGAFLYEPCGVSTPVLSTGVLRSNGGCSIVGTGELYVPCEPQGLLSCGSGRKSSMTLGAGGSSPSHKH

SEQ ID NO: 1270 - protein, 1083 aa, Homo sapiens
MPAMRGLLAPQNTFLDTIATRFDGTHSNFVLGNAQVAGLFPVVYCSDGFCDLTGFSRAEVMQRGCACSFLYGPDTSELVRQQIRKALDEHKEFKAELILYRKSGLPFWCLLDVIPIKNEKGEVALFLVSHKDISETKNRGGPDRWKETGGGRRRYGRARSKGFNANRRRSRAVLYHLSGHLQKQPKGKHKLNKGVFGEKPNLPEYKVAAIRKSPFILLHCGALRATWDGFILLATLYVAVTVPYSVCVSTAREPSAARGPPSVCDLAVEVLFILDIVLNFRTTFVSKSGQVVFAPKSICLHYVTTWFLLDVIAALPFDLLHAFKVNVYFGAHLLKTVRLLRLLRLLPRLDRYSQYSAVVLTLLMAVFALLAHWVACVWFYIGQREIESSESELPEIGWLQELARRLETPYYLVGRRPAGGNSSGQSDNCSSSSEANGTGLELLGGPSLRSAYITSLYFALSSLTSVGFGNVSANTDTEKIFSICTMLIGALMHAVVFGNVTAIIQRMYARRFLYHSRTRDLRDYIRIHRIPKPLKQRMLEYFQATWAVNNGIDTTELLQSLPDELRADIAMHLHKEVLQLPLFEAASRGCLRALSLALRPAFCTPGEYLIHQGDALQALYFVCSGSMEVLKGGTVLAILGKGDLIGCELPRREQVVKANADVKGLTYCVLQCLQLAGLHDSLALYPEFAPRFSRGLRGELSYNLGAGGGSAEVDTSSLSGDNTLMSTLEEKETDGEQGPTVSPAPADEPSSPLLSPGCTSSSSAAKLLSPRRTAPRPRLGGRGRPGRAGALKAEAGPSAPPRALEGLRLPPMPWNVPPDLSPRVVDGIEDGCGSDQPKFSFRVGQSGPECSSSPSPGPESGLLTVPHGPSEARNTDTLDKLRQAVTELSEQVLQMREGLQSLRQAVQLVLAPHREGPCPRASGEGPCPASTSGLLQPLCVDTGASSYCLQPPAGSVLSGTWPHPRPGPPPLMAPWPWGPPASQSSPWPRATAFWTSTSDSEPPASGDLCSEPSTPASPPPSEEGARTGPAEPVSQAEATSTGEPPPGSGGLALPWDPHSLEMVLIGCHGSGTVQWTQEEGTGV

SEQ ID NO: 1271 - protein, 337 aa, Homo sapiens
MRAVFIQGAEEHPAAFCYQVNGSCPRTVHTLGIQLVIYLACAAGMLIIVLGNVFVAFAVSYFKALHTPTNFLLLSLALADMFLGLLVLPLSTIRSVESCWFFGDFLCRLHTYLDTLFCLTSIFHLCFISIDRHCAICDPLLYPSKFTVRVALRYILAGWGVPAAYTSLFLYTDVVETRLSQWLEEMPCVGSCQLLLNKFWGWLNFPLFFVPCLIMISLYVKIFVVATRQAQQITTLSKSLAGAAKHERKAAKTLGIAVGIYLLCWLPFTIDTMVDSLLHFITPPLVFDIFIWFAYFNSACNPIIYVFSYQWFRKALKLTLSQKVFSPQTRTVDLYQE

SEQ ID NO: 1272 - protein, 423 aa, Homo sapiens
MKPNFSLRLRIFNLNCWGIPYLSKHRADRMRRLGDFLNQESFDLALLEEVWSEQDFQYLRQKLSPTYPAAHHFRSGIIGSGLCVFSKHPIQELTQHIYTLNGYPYMIHHGDWFSGKAVGLLVLHLSGMVLNAYVTHLHAEYNRQKDIYLAHRVAQAWELAQFIHHTSKKADVVLLCGDLNMHPEDLGCCLLKEWTGLHDAYLETRDFKGSEEGNTMVPKNCYVSQQELKPFPFGVRIDYVLYKAVSGFYISCKSFETTTGFDPHRGTPLSDHEALMATLFVRHSPPQQNPSSTHGPAERSPLMCVLKEAWTELGLGMAQARWWATFASYVIGLGLLLLALLCVLAAGGGAGEAAILLWTPSVGLVLWAGAFYLFHVQEVNGLYRAQAELQHVLGRAREAQDLGPEPQPALLLGQQEGDRTKEQ

SEQ ID NO: 1273 - protein, 795 aa, Homo sapiens
MEGLTLSDAEQKYYSDLFSYCDIESTKKVVVNGRVLELFRAAQLPNDVVLQIMELCGATRLGYFGRSQFYIALKLVAVAQSGFPLRVESINTVKDLPLPRFVASKNEQESRHAASYSSDSENQGSYSGVIPPPPGRGQVKKGSVSHDTVQPRTSADAQEPASPVVSPQQSPPTSPHTWRKHSRHPSGGNSERPLAGPGPFWSPFGEAQSGSSAGDAVWSGHSPPPPQENWVSFADTPPTSTLLTMHPASVQDQTTVRTVASATTAIEIRRQSSSYDDPWKITDEQRQYYVNQFKTIQPDLNGFIPGSAAKEFFTKSKLPILELSHIWELSDFDKDGALTLDEFCAAFHLVVARKNGYDLPEKLPESLMPKLIDLEDSADVGDQPGEVGYSGSPAEAPPSKSPSMPSLNQTWPELNQSSEQWETFSERSSSSQTLTQFDSNIAPADPDTAIVHPVPIRMTPSKIHMQEMELKRTGSDHTNPTSPLLVKPSDLLEENKINSSVKFASGNTVDGYSSSDSFTSDPEQIGSNVTRQRSHSGTSPDNTAPPPPPPRPQPSHSRSSSLDMNRTFTVTTGQQQAGVVAHPPAVPPRPQPSQAPGPAVHRPVDADGLITHTSTSPQQIPEQPNFADFSQFEVFAASNVNDEQDDEAEKHPEVLPAEKASDPASSLRVAKTDSKTEEKTAASAPANVSKGTTPLAPPPKPVRRRLKSEDELRPEVDEHTQKTGVLAAVLASQPSIPRSVGKDKKAIQASIRRNKETNTVLARLNSELQQQLKDVLEERISLEVQLEQLRPFSHL

SEQ ID NO: 1274 - protein, 458 aa, Homo sapiens
MAAPRAGRGAGWSLRAWRALGGIRWGRRPRLTPDLRALLTSGTSDPRARVTYGTPSLWARLSVGVTEPRACLTSGTPGPRAQLTAVTPDTRTREASENSGTRSRAWLAVALGAGGAVLLLLWGGGRGPPAVLAAVPSPPPASPRSQYNFIADVVEKTAPAVVYIEILDRHPFLGREVPISNGSGFVVAADGLIVTNAHVVADRRRVRVRLLSGDTYEAVVTAVDPVADIATLRIQTKEPLPTLPLGRSADVRQGEFVVAMGSPFALQNTITSGIVSSAQRPARDLGLPQTNVEYIQTDAAIDFGNSGGPLVNLDGEVIGVNTMKVTAGISFAIPSDRLREFLHRGEKKNSSSGISGSQRRYIGVMMLTLSPSILAELQLREPSFPDVQHGVLIHKVILGSPAHRAGLRPGDVILAIGEQMVQNAEDVYEAVRTQSQLAVQIRRGRETLTLYVTPEVTE

SEQ ID NO: 1275 - protein, 653 aa, Homo sapiens
MALVRGAEPAAGPSRWLPTHVQVTVLRARGLRGKSSGAGSTSDAYTVIQVGREKYSTSVVEKTHGCPEWREECSFELPPGALDGLLRAQEADAGPAPWAASSAAACELVLTTMHRSLIGVDKFLGQATVALDEVFGAGRAQHTQWYKLHSKPGKKEKERGEIEVTIQFTRNNLSASMFDLSMKDKPRSPFSKIRDKMKGKKKYDLESASAILPSSAIEDPDLGSLGKMGKAKGFFLRNKLRKSSLTQSNTSLGSDSTLSSASGSLAYQGPGAELLTRSPSRSSWLSTEGGRDSAQSPKLFTHKRTYSDEANQMRVAPPRALLDLQGHLDAASRSSLCVNGSHIYNEEPQGPVRHRSSISGSLPSSGSLQAVSSRFSEEGPRSTDDTWPRGSRSNSSSEAVLGQEELSAQAKVLAPGASHPGEEEGARLPEGKPVQVATPIVASSEAVAEKEGARKEERKPRMGLFHHHHQGLSRSELGRRSSLGEKGGPILGASPHHSSSGEEKAKSSWFGLREAKDPTQKPSPHPVKPLSAAPVEGSPDRKQSRSSLSIALSSGLEKLKTVTSGSIQPVTQAPQAGQMVDTKRLKDSAVLDQSAKYYHLTHDELISLLLQRERELSQRDEHVQELESYIDRLLVRIMETSPTLLQIPPGPPK

SEQ ID NO: 1276 - protein, 2080 aa, Homo sapiens
MLRVFILYAENVHTPDTDISDAYCSAVFAGVKKRTKVIKNSVNPVWNEGFEWDLKGIPLDQGSELHVVVKDHETMGRNRFLGEAKVPLREVLATPSLSASFNAPLLDTKKQPTGASLVLQVSYTPLPGAVPLFPPPTPLEPSPTLPDLDVVADTGGEEDTEDQGLTGDEAEPFLDQSGGPGAPTTPRKLPSRPPPHYPGIKRKRSAPTSRKLLSDKPQDFQIRVQVIEGRQLPGVNIKPVVKVTAAGQTKRTRIHKGNSPLFNETLFFNLFDSPGELFDEPIFITVVDSRSLRTDALLGEFRMDVGTIYREPRHAYLRKWLLLSDPDDFSAGARGYLKTSLCVLGPGDEAPLERKDPSEDKEDIESNLLRPTGVALRGAHFCLKVFRAEDLPQMDDAVMDNVKQIFGFESNKKNLVDPFVEVSFAGKMLCSKILEKTANPQWNQNITLPAMFPSMCEKMRIRIIDWDRLTHNDIVATTYLSMSKISAPGGEIEEEPAGAVKPSKASDLDDYLGFLPTFGPCYINLYGSPREFTGFPDPYTELNTGKGEGVAYRGRLLLSLETKLVEHSEQKVEDLPADDILRVEKYLRRRKYSLFAAFYSATMLQDVDDAIQFEVSIGNYGNKFDMTCLPLASTTQYSRAVFDGCHYYYLPWGNVKPVVVLSSYWEDISHRIETQNQLLGIADRLEAGLEQVHLALKAQCSTEDVDSLVAQLTDELIAGCSQPLGDIHETPSATHLDQYLYQLRTHHLSQITEAALALKLGHSELPAALEQAEDWLLRLRALAEEPQNSLPDIVIWMLQGDKRVAYQRVPAHQVLFSRRGANYCGKNCGKLQTIFLKYPMEKVPGARMPVQIRVKLWFGLSVDEKEFNQFAEGKLSVFAETYENETKLALVGNWGTTGLTYPKFSDVTGKIKLPKDSFRPSAGWTWAGDWFVCPEKTLLHDMDAGHLSFVEEVFENQTRLPGGQWIYMSDNYTDVNGEKVLPKDDIECPLGWKWEDEEWSTDLNRAVDEQGWEYSITIPPERKPKHWVPAEKMYYTHRRRRWVRLRRRDLSQMEALKRHRQAEAEGEGWEYASLFGWKFHLEYRKTDAFRRRRWRRRMEPLEKTGPAAVFALEGALGGVMDDKSEDSMSVSTLSFGVNRPTISCIFDYGNRYHLRCYMYQARDLAAMDKDSFSDPYAIVSFLHQSQKTVVVKNTLNPTWDQTLIFYEIEIFGEPATVAEQPPSIVVELYDHDTYGADEFMGRCICQPSLERMPRLAWFPLTRGSQPSGELLASFELIQREKPAIHHIPGFEVQETSRILDESEDTDLPYPPPQREANIYMVPQNIKPALQRTAIEILAWGLRNMKSYQLANISSPSLVVECGGQTVQSCVIRNLRKNPNFDICTLFMEVMLPREELYCPPITVKVIDNRQFGRRPVVGQCTIRSLESFLCDPYSAESPSPQGGPDDVSLLSPGEDVLIDIDDKEPLIPIQEEEFIDWWSKFFASIGEREKCGSYLEKDFDTLKVYDTQLENVEAFEGLSDFCNTFKLYRGKTQEETEDPSVIGEFKGLFKIYPLPEDPAIPMPPRQFHQLAAQGPQECLVRIYIVRAFGLQPKDPNGKCDPYIKISIGKKSVSDQDNYIPCTLEPVFGKMFELTCTLPLEKDLKITLYDYDLLSKDEKIGETVVDLENRLLSKFGARCGLPQTYCVSGPNQWRDQLRPSQLLHLFCQQHRVKAPVYRTDRVMFQDKEYSIEEIEAGRIPNPHLGPVEERLALHVLQQQGLVPEHVESRPLYSPLQPDIEQGKLQMWVDLFPKALGRPGPPFNITPRRARRFFLRCIIWNTRDVILDDLSLTGEKMSDIYVKGWMIGFEEHKQKTDVHYRSLGGEGNFNWRFIFPFDYLPAEQVCTIAKKDAFWRLDKTESKIPARVVFQIWDNDKFSFDDFLGSLQLDLNRMPKPAKTAKKCSLDQLDDAFHPEWFVSLFEQKTVKGWWPCVAEEGEKKILAGKLEMTLEIVAESEHEERPAGQGRDEPNMNPKLEDPRRPDTSFLWFTSPYKTMKFILWRRFRWAIILFIILFILLLFLAIFIYAFPNYAAMKLVKPFS

SEQ ID NO: 1277 - protein, 952 aa, Homo sapiens
MAEGGAADLDTQRSDIATLLKTSLRKGDTWYLVDSRWFKQWKKYVGFDSWDKYQMGDQNVYPGPIDNSGLLKDGDAQSLKEHLIDELDYILLPTEGWNKLVSWYTLMEGQEPIARKVVEQGMFVKHCKVEVYLTELKLCENGNMNNVVTRRFSKADTIDTIEKEIRKIFSIPDEKETRLWNKYMSNTFEPLNKPDSTIQDAGLYQGQVLVIEQKNEDGTWPRGPSTPNVKNSNYCLPSYTAYKNYDYSEPGRNNEQPGLCGLSNLGNTCFMNSAIQCLSNTPPLTEYFLNDKYQEELNFDNPLGMRGEIAKSYAELIKQMWSGKFSYVTPRAFKTQVGRFAPQFSGYQQQDCQELLAFLLDGLHEDLNRIRKKPYIQLKDADGRPDKVVAEEAWENHLKRNDSIIVDIFHGLFKSTLVCPECAKISVTFDPFCYLTLPLPMKKERTLEVYLVRMDPLTKPMQYKVVVPKIGNILDLCTALSALSGIPADKMIVTDIYNHRFHRIFAMDENLSSIMERDDIYVFEININRTEDTEHVIIPVCLREKFRHSSYTHHTGSSLFGQPFLMAVPRNNTEDKLYNLLLLRMCRYVKISTETEETEGSLHCCKDQNINGNGPNGIHEEGSPSEMETDEPDDESSQDQELPSENENSQSEDSVGGDNDSENGLCTEDTCKGQLTGHKKRLFTFQFNNLGNTDINYIKDDTRHIRFDDRQLRLDERSFLALDWDPDLKKRYFDENAAEDFEKHESVEYKPPKKPFVKLKDCIELFTTKEKLGAEDPWYCPNCKEHQQATKKLDLWSLPPVLVVHLKRFSYSRYMRDKLDTLVDFPINDLDMSEFLINPNAGPCRYNLIAVSNHYGGMGGGHYTAFAKNKDDGKWYYFDDSSVSTASEDQIVSKAAYVLFYQRQDTFSGTGFFPLDRETKGASAATGIPLESDEDSNDNDNDIENENCMHTN

SEQ ID NO: 1278 - protein, 442 aa, Homo sapiens
MVRSRQMCNTNMSVPTDGAVTTSQIPASEQETLVRPKPLLLKLLKSVGAQKDTYTMKEVLFYLGQYIMTKRLYDEKQQHIVYCSNDLLGDLFGVPSFSVKEHRKIYTMIYRNLVVVNQQEENSDELSGERQRKRHKSDSISLSFDESLALCVIREICCERSSSSESTGTPSNPDLDAGVSEHSGDWLDQDSVSDQFSVEFEVESLDSEDYSLSEEGQELSDEDDEVYQVTVYQAGESDTDSFEEDPEISLADYWKCTSCNEMNPPLPSHCNRCWALRENWLPEDKGKDKGEISEKAKLENSTQAEEGFDVPDCKKTIVNDSRESCVEENDDKITQASQSQESEDYSQPSTSSSIIYSSQEDVKEFEREETQDKEESVESSLPLNAIEPCVICQGRPKNGCIVHGKTGHLMACFTCAKKLKKRNKPCPVCRQPIQMIVLTYFP

SEQ ID NO: 1279 - protein, 497 aa, Homo sapiens
MVRSRQMCNTNMSVPTDGAVTTSQIPASEQETLVRPKPLLLKLLKSVGAQKDTYTMKEVLFYLGQYIMTKRLYDEKQQHIVYCSNDLLGDLFGVPSFSVKEHRKIYTMIYRNLVVVNQQESSDSGTSVSENRCHLEGGSDQKDLVQELQEEKPSSSHLVSRPSTSSRRRAISETEENSDELSGERQRKRHKSDSISLSFDESLALCVIREICCERSSSSESTGTPSNPDLDAGVSEHSGDWLDQDSVSDQFSVEFEVESLDSEDYSLSEEGQELSDEDDEVYQVTVYQAGESDTDSFEEDPEISLADYWKCTSCNEMNPPLPSHCNRCWALRENWLPEDKGKDKGEISEKAKLENSTQAEEGFDVPDCKKTIVNDSRESCVEENDDKITQASQSQESEDYSQPSTSSSIIYSSQEDVKEFEREETQDKEESVESSLPLNAIEPCVICQGRPKNGCIVHGKTGHLMACFTCAKKLKKRNKPCPVCRQPIQMIVLTYFP

SEQ ID NO: 1280 - protein, 1164 aa, Homo sapiens
MAGGEDRGDGEPVSVVTVRVQYLEDTDPFACANFPEPRRAPTCSLDGALPLGAQIPAVHRLLGAPLKLEDCALQVSPSGYYLDTELSLEEQREMLEGFYEEISKGRKPTLILRTQLSVRVNAILEKLYSSSGPELRRSLFSLKQIFQEDKDLVPEFVHSEGLSCLIRVGAAADHNYQSYILRALGQLMLFVDGMLGVVAHSDTIQWLYTLCASLSRLVVKTALKLLLVFVEYSENNAPLFIRAVNSVASTTGAPPWANLVSILEEKNGADPELLVYTVTLINKTLAALPDQDSFYDVTDALEQQGMEALVQRHLGTAGTDVDLRTQLVLYENALKLEDGDIEEAPGAGGRRERRKPSSEEGKRSRRSLEGGGCPARAPEPGPTGPASPVGPTSSTGPALLTGPASSPVGPPSGLQASVNLFPTISVAPSADTSSERSIYKARFLENVAAAETEKQVALAQGRAETLAGAMPNEAGGHPDARQLWDSPETAPAARTPQSPAPCVLLRAQRSLAPEPKEPLIPASPKAEPIWELPTRAPRLSIGDLDFSDLGEDEDQDMLNVESVEAGKDIPAPSPPLPLLSGVPPPPPLPPPPPIKGPFPPPPPLPLAAPLPHSVPDSSALPTKRKTVKLFWRELKLAGGHGVSASRFGPCATLWASLDPVSVDTARLEHLFESRAKEVLPSKKAGEGRRTMTTVLDPKRSNAINIGLTTLPPVHVIKAALLNFDEFAVSKDGIEKLLTMMPTEEERQKIEEAQLANPDIPLGPAENFLMTLASIGGLAARLQLWAFKLDYDSMEREIAEPLFDLKVGMEQLVQNATFRCILATLLAVGNFLNGSQSSGFELSYLEKVSEVKDTVRRQSLLHHLCSLVLQTRPESSDLYSEIPALTRCAKVDFEQLTENLGQLERRSRAAEESLRSLAKHELAPALRARLTHFLDQCARRVAMLRIVHRRVCNRFHAFLLYLGYTPQAAREVRIMQFCHTLREFALEYRTCRERVLQQQQKQATYRERNKTRGRMITETEKFSGVAGEAPSNPSVPVAVSSGPGRGDADSHASMKSLLTSRPEDTTHNRRSRGMVQSSSPIMPTVGPSTASPEEPPGSSLPSDTSDEIMDLLVQSVTKSSPRALAARERKRSRGNRKSLRRTLKSGLGDDLVQALGLSKGPGLEV

SEQ ID NO: 1281 - protein, 2137 aa, Homo sapiens
MVSQVLQLLRQGVWAALTGGWYHDPEQSKFTNSCHLYLWLFLLLLPLALHLAFPPNAIIVFFYCSAVTIFFTIIKLVSYRLHLMFDKGEVIQQKPSRKEEKPNKDKEAKGEHITNHRNPSNNRQIHNGKKEEASRNLSTPPLRCSSRGQSITSHHSSGPLELSAQETVEDLKGVILLEDHPIAPVSSTSPGIKVESLPASQAHMLETTTKSVIPVKPVATETLINGKGKERGGKGQPPLRHRSEGGLVDKGPLKKLPHLSLSQYDLLETDVSFQPWGSENSVLIPEPVSCPRGSIRERVQSKSPQDSLSSSCPQCDTIVAKPVEEPADTSCQVDTSCQGDLPLHQEVDSSDSEVAVTLIDTSQPGDPLSLHEPIKIVITMSSTPNSMTDLESSLHLRVVGTEKTSVKSDAEPTNPGAAGSPNAEQISIPVITLDLPEGGGGGVPCPEGNGSERTPERLKTRVSTNQCSGYGSGEGGNAIKDHSSSSREPWESVSRLTPDTGSESKVGKEGQTNLDPSSCKSSHEKRHARVLSVDSGTDVFLSKSSAEIVNDTEKTMPTSKSDLEAKEGQMPNESNFLEFVSLLESINTSKMTASSQLNGSAEQNEESGLLRDNCSQEKKEEILENEKPSGHSSKQGKPDLQSQDHTSTGPACTQPAKTTAFFQGNRQRQIIYRVTSQQDSSVLQVISGPETSVQEEISVDAMHVFIDEHGEIRSCYLKSGNQKEGPLQPLPSNNDCLSQAREMQVSSSSTTTSESQDPSSGDPAVSALQQQLLLMVARRTQSETPRHVSQDLEASSCSSTQGKFNREQFYKFIIFPGKWIKVWYDRLTLLALLDRTEDIKENVLAILLIVLVSLLGFLTLSQGFCKDMWVLLFCLVMASCQYSLLKSVQPDPASPIHGHNQIITYSRPIYFCVLCGLILLLDTGAKARHPPSYVVYGLKLFSPVFLQSARDYLIVFLYCFPAISLLGLFPQINTFCTYLLEQIDMLFFGGSAVSGITSAVYSVARSVLAAALLHAVCFSAVKEPWSMQHIPALFSAFCGLLVALSYHLSRQSSDPSVLMSFIQCRLFPKFLHQNLAESAADPLPKKMKDSVTDVLKWDLIVCAVVAVLSFAVSASTVFLSLRPFLSIVLFALAGAVGFVTHYVLPQLRKHHPWMWISHPILKNKEYHQREVRDVAHLMWFERLYVWLQCFEKYILYPALILNALTIDAFLISNHRRLGTHWDIFLMIIAGMKLLRTSFCNPVYQFINLSFTVIFFHFDYKDISESFLLDFFMVSILFSKLGDLLHKLQFVLTYVAPWQMAWGSSFHVFAQLFAIPHSAMLFFQTIATSIFSTPLSPFLGSVIFITSYVRPVKFWEKNYNTRRVDNSNTRLAVQIERDPGNDDNNLNSIFYEHLTRTLQESLCGDLVLGRWGNYSSGDCFILASDDLNAFVHLIEIGNGLVTFQLRGLEFRGTYCQQREVEAIMEGDEEDRGCCCCKPGHLPHLLSCNAAFHLRWLTWEITQTQYILEGYSILDNNAATMLQVFDLRRILIRYYIKSIIYYMVTSPKLLSWIKNESLLKSLQPFAKWHYIERDLAMFNINIDDDYVPCLQGITRASFCNVYLEWIQHCARKRQEPSTTLDSDEDSPLVTLSFALCTLGRRALGTAAHNMAISLDSFLYGLHVLFKGDFRITARDEWVFADMDLLHKVVAPAIRMSLKLHQDQFTCPDEYEDPAVLYEAIQSFEKKVVICHEGDPAWRGAVLSNKEELLTLRHVVDEGADEYKVIMLHRSFLSFKVIKVNKECVRGLWAGQQQELIFLRNRNPERGSIQNNKQVLRNLINSSCDQPLGYPMYVSPLTTSYLGTHRQLKNIWGGPITLDRIRTWFWTKWVRMRKDCNARQHSGGNIEDVDGGGAPTTGGNNAPSGGSQESSAEQPRKGGAQHGVSSCEGTQRTGRRKGRSQSVQAHSALSQRPPMLSSSGPILESRQTFLQTSTSVHELAQRLSGSRLSLHASATSLHSQPPPVTTTGHLSVRERAEALIRSSLGSSTSSTLSFLFGKRSFSSALVISGLSAAEGGNTSDTQSSSSVNIVMGPSARAASQATRHLSEPCEPPDATEQGQLHDRCLAEAVADTLGVVCRRASQEDMGLDDTASQQSVSDEQ

SEQ ID NO: 1282 - protein, 1524 aa, Homo sapiens
MAAVYSGISLKLKSKTTSWEDKLKLAHFAWISHQCFLPNKEQVLLDWARQSLVAFYKKKLELKEDIVERLWIYIDNILHSRKLQNLLKNGKTINLQISLVKIINERVAEFSLSGSQRNICAVLRCCQGILSTPALAVIYTAKQELMVALLSQLCWSACRQPEGAVVAQLFEVIHLALGHYLLILQQQVNPRRAFGDVTAHLLQPCLVLRHLLSGGTWTQAGQGQLRQVLSRDIRSQIEAMFRGGIFQPELLSSYKEGLLDQQQGDVKTGAMKNLLAPMDTVLNRLVDAGYCAASLHTSVVANSVALLYKLFLDSYFKEGNQLLCFQVLPRLFGCLKISHLQEEQSKALSTSDWTTELLVVEQLLNSVANNNIYNIAADRIRHEEAQFRFYRHVAELLINHAQAPIPAWFRCLKTLISLNHLILEPDLDDLLASAWIDAEVTEFRTKKAQEALIRTVFQTYAKLRQVPRLFEEVLGVICRPAAEALRQPVLASGPSTVLSACLLELPPSQILDTWSLVLEKFQSLVLPYLQSDADMALKSLSLSLLLHCIMFNMRSLDSSTPLPIVRRTQCMMERMMRELVQPLLALLPDTPGPEPELWLQKVSDSVLLLSYTWAQVDAMFSLNCSQYHSMSGPLIGVALEISNLPSLLPGVKTQHWKKIEKFTAQFSSLGTYCLEQLYLQKMKRTLMQTSFRSEGAIQSLRCDAAFIIGSGRKSLNQRTTASWDGQVGMVSGLTYPVAHWHLIVSNLTILISYLCPDDVGYLASVLLRTLPMGKAQEVSIDEEAYITLEKISKAFLHSPLFPEMQSLHSAFLTCVTTSCSSILCSGAQRDSGLVSQQLPWLFEKDHMVVGHWENRFAKAGPEGIEPRGEIAQNLLSLVKSDFPIQLEGEQLESILGLLEVISALQLDSLLPPYHVHYFLVLLSMAVTKLGCSCSSSLALKFLTTCYQLLGYLQKGKSARSVFKIMYGSDIFEVVLTSLFRASSRFLIEMDDPAWLEFLQVIGTFLEELMQMLIQMKLSLVLNFRKITAFLSSSKPYTEAASSKQLENQNPQGRQLLLVSLTRLCHVLGPFLKEQKLGQEAPAALSELLQQVVLQTGAVLQLCSVPGARGWRLPSVLISSVSTLLEADLGQHCRDGGADISQGSDRTLLSHVALYQGVYSQILLELPALAGHDQSFQAALQFLTLFFLAPELHPKKDSVFTSMFHSVRRVLADPEIPVQVTQDIEPHLGALFTQMLEVGTTEDLRLVMQCILQGLDVSNMWKADVQAVVSAVTLLRLLLNCPLSGEKASLLWRACPQIVTALTLLNREASQEQPVSLTVVGPVLDVLAALLRQGEEAIGNPHHVSLAFSILLTVPLDHLKPLEYGSVFPRLHNVLFSILQCHPKVMLKAIPSFLNSFNRLVFSVMREGRQKDKGSIDDLPTVLKCARLVERMYSHIAARAEEFAVFSPFMVAQYVLEVQKVTLYPAVKSLLQEGIYLILDLCIEPDVQFLRASLQPGMRDIFKELYNDYLKYHKAKHEGEKRYTA

SEQ ID NO: 1283 - protein, 589 aa, Homo sapiens
MKRVRTEQIQMAVSCYLKRRQYVDSDGPLKQGLRLSQTAEEMAANLTVQSESGCANIVSAAPCQAEPQQYEVQFGRLRNFLTDSDSQHSHEVMPLLYPLFVYLHLNLVQNSPKSTVESFYSRFHGMFLQNASQKDVIEQLQTTQTIQDILSNFKLRAFLDNKYVVRLQEDSYNYLIRYLQSDNNTALCKVLTLHIHLDVQPAKRTDYQLYASGSSSRSENNGLEPPDMPSPILQNEAALEVLQESIKRVKDGPPSLTTICFYAFYNTEQLLNTAEISPDSKLLAAGFDNSCIKLWSLRSKKLKSEPHQVDVSRIHLACDILEEEDDEDDNAGTEMKILRGHCGPVYSTRFLADSSGLLSCSEDMSIRYWDLGSFTNTVLYQGHAYPVWDLDISPYSLYFASGSHDRTARLWSFDRTYPLRIYAGHLADVDCVKFHPNSNYLATGSTDKTVRLWSAQQGNSVRLFTGHRGPVLSLAFSPNGKYLASAGEDQRLKLWDLASGTLYKELRGHTDNITSLTFSPDSGLIASASMDNSVRVWDIRNTYCSAPADGSSSELVGVYTGQMSNVLSVQFMACNLLLVTGITQENQEH

SEQ ID NO: 1284 - protein, 198 aa, Homo sapiens
MWNTLTRSLSDHPVGKDPQAMRTGQRQNKGMRTRLGCLSHKSDSCSDFTAILPDKPNRALKRLSTEEATRWADSFDVLLSHKYGVAAFRAFLKTEFSEENLEFWLACEEFKKTRSTAKLVSKAHRIFEEFVDVQAPREVNIDFQTREATRKNLQEPSLTCFDQAQGKVHSLMEKDSYPRFLRSKMYLDLLSQSQRRLS

SEQ ID NO: 1285 - protein, 1609 aa, Homo sapiens
MRGSHRAAPALRPRGRLWPVLAVLAAAAAAGCAQAAMDECTDEGGRPQRCMPEFVNAAFNVTVVATNTCGTPPEEYCVQTGVTGVTKSCHLCDAGQPHLQHGAAFLTDYNNQADTTWWQSQTMLAGVQYPSSINLTLHLGKAFDITYVRLKFHTSRPESFAIYKRTREDGPWIPYQYYSGSCENTYSKANRGFIRTGGDEQQALCTDEFSDISPLTGGNVAFSTLEGRPSAYNFDNSPVLQEWVTATDIRVTLNRLNTFGDEVFNDPKVLKSYYYAISDFAVGGRCKCNGHASECMKNEFDKLVCNCKHNTYGVDCEKCLPFFNDRPWRRATAESASECLPCDCNGRSQECYFDPELYRSTGHGGHCTNCQDNTDGAHCERCRENFFRLGNNEACSSCHCSPVGSLSTQCDSYGRCSCKPGVMGDKCDRCQPGFHSLTEAGCRPCSCDPSGSIDECNIETGRCVCKDNVEGFNCERCKPGFFNLESSNPRGCTPCFCFGHSSVCTNAVGYSVYSISSTFQIDEDGWRAEQRDGSEASLEWSSERQDIAVISDSYFPRYFIAPAKFLGKQVLSYGQNLSFSFRVDRRDTRLSAEDLVLEGAGLRVSVPLIAQGNSYPSETTVKYVFRLHEATDYPWRPALTPFEFQKLLNNLTSIKIRGTYSERSAGYLDDVTLASARPGPGVPATWVESCTCPVGYGGQFCEMCLSGYRRETPNLGPYSPCVLCACNGHSETCDPETGVCNCRDNTAGPHCEKCSDGYYGDSTAGTSSDCQPCPCPGGSSCAVVPKTKEVVCTNCPTGTTGKRCELCDDGYFGDPLGRNGPVRLCRLCQCSDNIDPNAVGNCNRLTGECLKCIYNTAGFYCDRCKDGFFGNPLAPNPADKCKACNCNLYGTMKQQSSCNPVTGQCECLPHVTGQDCGACDPGFYNLQSGQGCERCDCHALGSTNGQCDIRTGQCECQPGITGQHCERCEVNHFGFGPEGCKPCDCHPEGSLSLQCKDDGRCECREGFVGNRCDQCEENYFYNRSWPGCQECPACYRLVKDKVADHRVKLQELESLIANLGTGDEMVTDQAFEDRLKEAEREVMDLLREAQDVKDVDQNLMDRLQRVNNTLSSQISRLQNIRNTIEETGNLAEQARAHVENTERLIEIASRELEKAKVAAANVSVTQPESTGDPNNMTLLAEEARKLAERHKQEADDIVRVAKTANDTSTEAYNLLLRTLAGENQTAFEIEELNRKYEQAKNISQDLEKQAARVHEEAKRAGDKAVEIYASVAQLSPLDSETLENEANNIKMEAENLEQLIDQKLKDYEDLREDMRGKELEVKNLLEKGKTEQQTADQLLARADAAKALAEEAAKKGRDTLQEANDILNNLKDFDRRVNDNKTAAEEALRKIPAINQTITEANEKTREAQQALGSAAADATEAKNKAHEAERIASAVQKNATSTKAEAERTFAEVTDLDNEVNNMLKQLQEAEKELKRKQDDADQDMMMAGMASQAAQEAEINARKAKNSVTSLLSIINDLLEQLGQLDTVDLNKLNEIEGTLNKAKDEMKVSDLDRKVSDLENEAKKQEAAIMDYNRDIEEIMKDIRNLEDIRKTLPSGCFNTPSIEKP

SEQ ID NO: 1286 - protein, 1133 aa, Homo sapiens
MPVQAPQWTDFLSCPICTQTFDETIRKPISLGCGHTVCKMCLNKLHRKACPFDQTTINTDIELLPVNSALLQLVGAQVPEQQPITLCSGVEDTKHYEEAKKCVEELALYLKPLSSARGVGLNSTTQSVLSRPMQRKLVTLVHCQLVEEEGRIRAMRAARSLGERTVTELILQHQNPQQLSSNLWAAVRARGCQFLGPAMQEEALKLVLLALEDGSALSRKVLVLFVVQRLEPRFPQASKTSIGHVVQLLYRASCFKVTKRDEDSSLMQLKEEFRTYEALRREHDSQIVQIAMEAGLRIAPDQWSSLLYGDQSHKSHMQSIIDKLQTPASFAQSVQELTIALQRTGDPANLNRLRPHLELLANIDPSPDAPPPTWEQLENGLVAVRTVVHGLVDYIQNHSKKGADQQQPPQHSKYKTYMCRDMKQRGGCPRGASCTFAHSQEELEKFRKMNKRLVPRRPLSASLGQLNEVGLPSAAILPDEGAVDLPSRKPPALPNGIVSTGNTVTQLIPRGTDPSYDSSLKPGKIDHLSSSAPGSPPDLLESVPKSISALPVNPHSIPPRGPADLPPMPVTKPLQMVPRGSQLYPAQQTDVYYQDPRGAAPPFEPAPYQQGMYYTPPPQCVSRFVRPPPSAPEPAPPYLDHYPPYLQERVVNSQYGTQPQQYPPIYPSHYDGRRVYPAPSYTREEIFRESPIPIEIPPAAVPSYVPESRERYQQIESYYPVAPHPTQIRPSYLREPPYSRLPPPPQPHPSLDELHRRRKEIMAQLEERKVISPPPFAPSPTLPPTFHPEEFLDEDLKVAGKYKGNDYSQYSPWSCDTIGSYIGTKDAKPKDVVAAGSVEMMNVESKGMRDQRLDLQRRAAETSDDDLIPFGDRPTVSRFGAISRTSKTIYQGAGPMQAMAPQGAPTKSINISDYSPYGTHGGWGASPYSPHQNIPSQGHFSERERISMSEVASHGKPLPSAEREQLRLELQQLNHQISQQTQLRGLEAVSNRLVLQREANTLAGQSQPPPPPPPKWPGMISSEQLSLELHQVEREIGKRTRELSMENQCSLDMKSKLNTSKQAENGQPEPQNKVPAEDLTLTFSDVPNGSALTQENISLLSNKTSSLNLSEDPEGGGDNNDSQRSGVTPSSAP

SEQ ID NO: 1287 - protein, 206 aa, Homo sapiens
MTTLAGAVPRMMRPGPGQNYPRSGFPLEVSTPLGQGRVNQLGGVFINGRPLPNHIRHKIVEMAHHGIRPCVISRQLRVSHGCVSKILCRYQETGSIRPGAIGGSKPKQVTTPDVEKKIEEYKRENPGMFSWEIRDKLLKDAVCDRNTVPSVSSISRILRSKFGKGEEEEADLERKEAEESEKKAKHSIDGILSERGKALVSGVSSH

SEQ ID NO: 1288 - protein, 2186 aa, Homo sapiens
MAGERTRRFTRSLLRPGQAAELRHSAASAAAVAVSSRQQQRQEKPRLLEPLDYETVIEELEKTYRNDPLQDLLFFPSDDFSAATVSWDIRTLYSTVPEDAEHKAENLLVKEACKFYSSQWHVVNYKYEQYSGDIRQLPRAEYKPEKLPSHSFEIDHEDADKDEDTTSHSSSKGGGGAGGTGVFKSGWLYKGNFNSTVNNTVTVRSFKKRYFQLTQLPDNSYIMNFYKDEKISKEPKGCIFLDSCTGVVQNNRLRKYAFELKMNDLTYFVLAAETESDMDEWIHTLNRILQISPEGPLQGRRSTELTDLGLDSLDNSVTCECTPEETDSSENNLHADFAKYLTETEDTVKTTRNMERLNLFSLDPDIDTLKLQKKDLLEPESVIKPFEEKAAKRIMIICKALNSNLQGCVTENENDPITNIEPFFVSVALYDLRDSRKISADFHVDLNHAAVRQMLLGASVALENGNIDTITPRQSEEPHIKGLPEEWLKFPKQAVFSVSNPHSEIVLVAKIEKVLMGNIASGAEPYIKNPDSNKYAQKILKSNRQFCSKLGKYRMPFAWAVRSVFKDNQGNVDRDSRFSPLFRQESSKISTEDLVKLVSDYRRADRISKMQTIPGSLDIAVDNVPLEHPNCVTSSFIPVKPFNMMAQTEPTVEVEEFVYDSTKYCRPYRVYKNQIYIYPKHLKYDSQKCFNKARNITVCIEFKNSDEESAKPLKCIYGKPGGPLFTSAAYTAVLHHSQNPDFSDEVKIELPTQLHEKHHILFSFYHVTCDINAKANAKKKEALETSVGYAWLPLMKHDQIASQEYNIPIATSLPPNYLSFQDSASGKHGGSDIKWVDGGKPLFKVSTFVVSTVNTQDPHVNAFFQECQKREKDMSQSPTSNFIRSCKNLLNVEKIHAIMSFLPIILNQLFKVLVQNEEDEITTTVTRVLTDIVAKCHEEQLDHSVQSYIKFVFKTRACKERTVHEELAKNVTGLLKSNDSTTVKHVLKHSWFFFAIILKSMAQHLIDTNKIQLPRPQRFPESYQNELDNLVMVLSDHVIWKYKDALEETRRANHSVARFLKRCFTFMDRGYVFKMVNNYISMFSSGDLKTLCQYKFDFLQEVCQHEHFIPLCLPIRSANIPDPLTPSESTQELHASDMPEYSVTNEFCRKHFLIGILLREVGFALQEDQDVRHLALAVLKNLMAKHSFDDRYREPRKQAQIASLYMPLYGMLLDNMPRIYLKDLYPFTVNTSNQGSRDDLSTNGGFQSQTAIKHANSVDTSFSKDVLNSIAAFSSIAISTVNHADSRASLASLDSNPSTNEKSSEKTDNCEKIPRPLSLIGSTLRFDKLDQAETRSLLMCFLHIMKTISYETLIAYWQRAPSPEVSDFFSILDVCLQNFRYLGKRNIIRKIAAAFKFVQSTQNNGTLKGSNPSCQTSGLLSQWMHSTSSHEGHKQHRSQTLPIIRGKNALSNPKLLQMLDNTMTSNSNEIDIVHHVDTEANIATEVCLTILDLLSLFTQTHQRQLQQCDCQNSLMKRVFDTYMLFFQVNQSATALKHVFASLRLFVCKFPSAFFQGPADLCGSFCYEVLKCCNHRSRSTQTEASALLYFFMRKNFEFNKQKSIVRSHLQLIKAVSQLIADAGIGGSRFQHSLAITNNFANGDKQMKNSNFPAEVKDLTKRIRTVLMATAQMKEHEKDPEMLVDLQYSLANSYASTPELRRTWLESMAKIHARNGDLSEAAMCYIHIAALIAEYLKRKGYWKVEKICTASLLSEDTHPCDSNSLLTTPSGGSMFSMGWPAFLSITPNIKEEGAMKEDSGMQDTPYNENILVEQLYMCVEFLWKSERYELIADVNKPIIAVFEKQRDFKKLSDLYYDIHRSYLKVAEVVNSEKRLFGRYYRVAFYGQGFFEEEEGKEYIYKEPKLTGLSEISQRLLKLYADKFGADNVKIIQDSNKVNPKDLDPKYAYIQVTYVTPFFEEKEIEDRKTDFEMHHNINRFVFETPFTLSGKKHGGVAEQCKRRTILTTSHLFPYVKKRIQVISQSSTELNPIEVAIDEMSKKVSELNQLCTMEEVDMIRLQLKLQGSVSVKVNAGPMAYARAFLEETNAKKYPDNQVKLLKEIFRQFADACGQALDVNERLIKEDQLEYQEELRSHYKDMLSELSTVMNEQITGRDDLSKRGVDQTCTRVISKATPALPTVSISSSAEV

SEQ ID NO: 1289 - protein, 1199 aa, Homo sapiens
MASAGTQHYSIGLRQKNSFKQSGPSGTVPATPPEKPSEGRVWPQAHQQVKPIWKLEKKQVETLSAGLGPGLLGVPPQPAYFFCPSTLCSSGTTAVIAGHSSSCYLHSLPDLFNSTLLYRRSSYRQKPYQQLESFCLRSSPSEKSPFSLPQKSLPVSLTANKATSSMVFSMAQPMASSSTEPYLCLAAAGENPSGKSLASAISGKIPSPLSSSYKPMLNNNSFMWPNSTPVPLLQTTQGLKPVSPPKIQPVSWHHSGGTGDCAPQPVDHKVPKSIGTVPADASAHIALSTASSHDTSTTSVASSWYNRNNLAMRAEPLSCALDDSSDSQDPTKEIRFTEAVRKLTARGFEKMPRQGCQLEQSSFLNPSFQWNVLNRSRRWKPPAVNQQFPQEDAGSVRRVLPGASDTLGLDNTVFCTKRISIHLLASHASGLNHNPACESVIDSSAFGEGKAPGPPFPQTLGIANVATRLSSIQLGQSEKERPEEARELDSSDRDISSATDLQPDQAETEDTEEELVDGLEDCCSRDENEEEEGDSECSSLSAVSPSESVAMISRSCMEILTKPLSNHEKVVRPALIYSLFPNVPPTIYFGTRDERVEKLPWEQRKLLRWKMSTVTPNIVKQTIGRSHFKISKRNDDWLGCWGHHMKSPSFRSIREHQKLNHFPGSFQIGRKDRLWRNLSRMQSRFGKKEFSFFPQSFILPQDAKLLRKAWESSSRQKWIVKPPASARGIGIQVIHKWSQLPKRRPLLVQRYLHKPYLISGSKFDLRIYVYVTSYDPLRIYLFSDGLVRFASCKYSPSMKSLGNKFMHLTNYSVNKKNAEYQANADEMACQGHKWALKALWNYLSQKGVNSDAIWEKIKDVVVKTIISSEPYVTSLLKMYVRRPYSCHELFGFDIMLDENLKPWVLEVNISPSLHSSSPLDISIKGQMIRDLLNLAGFVLPNAEDIISSPSSCSSSTTSLPTSPGDKCRMAPEHVTAQKMKKAYYLTQKIPDQDFYASVLDVLTPDDVRILVEMEDEFSRRGQFERIFPSHISSRYLRFFEQPRYFNILTTQWEQKYHGNKLKGVDLLRSWCYKGFHMGVVSDSAPVWSLPTSLLTISKDDVILNAFSKSETSKLGKQSSCEVSLLLSEDGTTPKSKKTQAGLSPYPQKPSSSKDSEDTSKEPSLSTQTLPVIKCSGQTSRLSASSTFQSISDSLLAVSP

SEQ ID NO: 1290 - protein, 481 aa, Homo sapiens
MALSYRVSELQSTIPEHILQSTFVHVISSNWSGLQTESIPEEMKQIVEEQGNKLHWAALLILMVIIPTIGGNTLVILAVSLEKKLQYATNYFLMSLAVADLLVGLFVMPIALLTIMFEAMWPLPLVLCPAWLFLDVLFSTASIMHLCAISVDRYIAIKKPIQANQYNSRATAFIKITVVWLISIGIAIPVPIKGIETDVDNPNNITCVLTKERFGDFMLFGSLAAFFTPLAIMIVTYFLTIHALQKKAYLVKNKPPQRLTWLTVSTVFQRDETPCSSPEKVAMLDGSRKDKALPNSGDETLMRRTSTIGKKSVQTISNEQRASKVLGIVFFLFLLMWCPFFITNITLVLCDSCNQTTLQMLLEIFVWIGYVSSGVNPLVYTLFNKTFRDAFGRYITCNYRATKSVKTLRKRSSKIYFRNPMAENSKFFKKHGIRNGINPAMYQSPMRLRSSTIQSSSIILLDTLLLTENEGDKTEEQVSYV

SEQ ID NO: 1291 - protein, 417 aa, Homo sapiens
MGSAHPRPWLRLRPQPQPRPALWVLLFFLLLLAAAMPRSAPNDILDLRLPPEPVLNANTVCLTLPGLSRRQMEVCVRHPDVAASAIQGIQIAIHECQHQFRDQRWNCSSLETRNKIPYESPIFSRGFRESAFAYAIAAAGVVHAVSNACALGKLKACGCDASRRGDEEAFRRKLHRLQLDALQRGKGLSHGVPEHPALPTASPGLQDSWEWGGCSPDMGFGERFSKDFLDSREPHRDIHARMRLHNNRVGRQAVMENMRRKCKCHGTSGSCQLKTCWQVTPEFRTVGALLRSRFHRATLIRPHNRNGGQLEPGPAGAPSPAPGAPGPRRRASPADLVYFEKSPDFCEREPRLDSAGTVGRLCNKSSAGSDGCGSMCCGRGHNILRQTRSERCHCRFHWCCFVVCEECRITEWVSVCK

SEQ ID NO: 1292 - protein, 311 aa, Homo sapiens
MSNPSAPPPYEDRNPLYPGPPPPGGYGQPSVLPGGYPAYPGYPQPGYGHPAGYPQPMPPTHPMPMNYGPGHGYDGEERAVSDSFGPGEWDDRKVRHTFIRKVYSIISVQLLITVAIIAIFTFVEPVSAFVRRNVAVYYVSYAVFVVTYLILACCQGPRRRFPWNIILLTLFTFAMGFMTGTISSMYQTKAVIIAMIITAVVSISVTIFCFQTKVDFTSCTGLFCVLGIVLLVTGIVTSIVLYFQYVYWLHMLYAALGAICFTLFLAYDTQLVLGNRKHTISPEDYITGALQIYTDIIYIFTFVLQLMGDRN

SEQ ID NO: 1293 - protein, 665 aa, Homo sapiens
MGDILAHESELLGLVKEYLDFAEFEDTLKTFSKECKIKGKPLCKTVGGSFRDSKSLTIQKDLVAAFDNGDQKVFFDLWEEHISSSIRDGDSFAQKLEFYLHIHFAIYLLKYSVGRPDKEELDEKISYFKTYLETKGAALSQTTEFLPFYALPFVPNPMVHPSFKELFQDSWTPELKLKLIKFLALISKASNTPKLLTIYKENGQSNKEILQQLHQQLVEAERRSVTYLKRYNKIQADYHNLIGVTAELVDSLEATVSGKMITPEYLQSVCVRLFSNQMRQSLAHSVDFTRPGTASTMLRASLAPVKLKDVPLLPSLDYEKLKKDLILGSDRLKAFLLQALRWRLTTSHPGEQRETVLQAYISNDLLDCYSHNQRSVLQLLHSTSDVVRQYMARLINAFASLAEGRLYLAQNTKVLQMLEGRLKEEDKDIITRENVLGALQKFSLRRPLQTAMIQDGLIFWLVDVLKDPDCLSDYTLEYSVALLMNLCLRSTGKNMCAKVAGLVLKVLSDLLGHENHEIQPYVNGALYSILSVPSIREEARAMGMEDILRCFIKEGNAEMIRQIEFIIKQLNSEELPDGVLESDDDEDEDDEEDHDIMEADLDKDELIQPQLGELSGEKLLTTEYLGIMTNTGKTRRKGLANVQWSGDEPLQRPVTPGGHRNGYPV

SEQ ID NO: 1294 - protein, 1251 aa, Homo sapiens
MRRGGWRKRAENDGWETWGGYMAAKVQKLEEQFRSDAAMQKDGTSSTIFSGVAIYVNGYTDPSAEELRKLMMLHGGQYHVYYSRSKTTHIIATNLPNAKIKELKGEKVIRPEWIVESIKAGRLLSYIPYQLYTKQSSVQKGLSFNPVCRPEDPLPGPSNIAKQLNNRVNHIVKKIETENEVKVNGMNSWNEEDENNDFSFVDLEQTSPGRKQNGIPHPRGSTAIFNGHTPSSNGALKTQDCLVPMVNSVASRLSPAFSQEEDKAEKSSTDFRDCTLQQLQQSTRNTDALRNPHRTNSFSLSPLHSNTKINGAHHSTVQGPSSTKSTSSVSTFSKAAPSVPSKPSDCNFISNFYSHSRLHHISMWKCELTEFVNTLQRQSNGIFPGREKLKKMKTGRSALVVTDTGDMSVLNSPRHQSCIMHVDMDCFFVSVGIRNRPDLKGKPVAVTSNRGTGRAPLRPGANPQLEWQYYQNKILKGKAADIPDSSLWENPDSAQANGIDSVLSRAEIASCSYEARQLGIKNGMFFGHAKQLCPNLQAVPYDFHAYKEVAQTLYETLASYTHNIEAVSCDEALVDITEILAETKLTPDEFANAVRMEIKDQTKCAASVGIGSNILLARMATRKAKPDGQYHLKPEEVDDFIRGQLVTNLPGVGHSMESKLASLGIKTCGDLQYMTMAKLQKEFGPKTGQMLYRFCRGLDDRPVRTEKERKSVSAEINYGIRFTQPKEAEAFLLSLSEEIQRRLEATGMKGKRLTLKIMVRKPGAPVETAKFGGHGICDNIARTVTLDQATDNAKIIGKAMLNMFHTMKLNISDMRGVGIHVNQLVPTNLNPSTCPSRPSVQSSHFPSGSYSVRDVFQVQKAKKSTEEEHKEVFRAAVDLEISSASRTCTFLPPFPAHLPTSPDTNKAESSGKWNGLHTPVSVQSRLNLSIEVPSPSQLDQSVLEALPPDLREQVEQVCAVQQAESHGDKKKEPVNGCNTGILPQPVGTVLLQIPEPQESNSDAGINLIALPAFSQVDPEVFAALPAELQRELKAAYDQRQRQGENSTHQQSASASVPKNPLLHLKAAVKEKKRNKKKKTIGSPKRIQSPLNNKLLNSPAKTLPGACGSPQKLIDGFLKHEGPPAEKPLEELSASTSGVPGLSSLQSDPAGCVRPPAPNLAGAVEFNDVKTLLREWITTISDPMEEDILQVVKYCTDLIEEKDLEKLDLVIKYMKRLMQQSVESVWNMAFDFILDNVQVVLQQTYGSTLKVT

SEQ ID NO: 1295 - protein, 474 aa, Homo sapiens
MELGGHWDMNSAPRLVSETAERKQEQKTGTEAEAADSGAVGARRFLLCLYLVGFLDLFGVSMVVPLLSLHVKSLGASPTVAGIVGSSYGILQLFSSTLVGCWSDVVGRRSSLLACILLSALGYLLLGAATNVFLFVLARVPAGIFKHTLSISRALLSDVVPEKERPLVIGHFNTASGVGFILGPVVGGYLTELEDGFYLTAFICFLVFILNAGLVWFFPWREAKPGSTEKGLPLRKTHVLLGRSHDTVQEAATSRRARASKKTAQPWVEVVLALRNMKNLLFSEMWDIFLVRLLMAMAVMLYYSNFVLALEERFGVRPKVTGYLISYSSMLGAVAGLALGPILRLYKHNSQALLLHSSILTCTLLLLYSLAPTMGAVVLSSTLLSFSTAIGRTCITDLQLTVGGAQASGTLIGVGQSVTAVGRIIAPLLSGVAQEVSPCGPPSLGAVLALVAIFIMSLNKRHSSGDGNSKLKSE

SEQ ID NO: 1296 - protein, 448 aa, Homo sapiens
MAHVGDCTQTPWLPVLVVSLMCSARAEYSNCGENEYYNQTTGLCQECPPCGPGEEPYLSCGYGTKDEDYGCVPCPAEKFSKGGYQICRRHKDCEGFFRATVLTPGDMENDAECGPCLPGYYMLENRPRNIYGMVCYSCLLAPPNTKECVGATSGASANFPGTSGSSTLSPFQHAHKELSGQGHLATALIIAMSTIFIMAIAIVLIIMFYILKTKPSAPACCTSHPGKSVEAQVSKDEEKKEAPDNVVMFSEKDEFEKLTATPAKPTKSENDASSENEQLLSRSVDSDEEPAPDKQGSPELCLLSLVHLAREKSATSNKSAGIQSRRKKILDVYANVCGVVEGLSPTELPFDCLEKTSRMLSSTYNSEKAVVKTWRHLAESFGLKRDEIGGMTDGMQLFDRISTAGYSIPELLTKLVQIERLDAVESLCADILEWAGVVPPASQPHAAS

SEQ ID NO: 1297 - protein, 860 aa, Homo sapiens
MMSIKAFTLVSAVERELLMGDKERVNIECVECCGRDLYVGTNDCFVYHFLLEERPVPAGPATFTATKQLQRHLGFKKPVNELRAASALNRLLVLCDNSISLVNMLNLEPVPSGARIKGAATFALNENPVSGDPFCVEVCIISVKRRTIQMFLVYEDRVQIVKEVSTAEQPLAVAVDGHFLCLALTTQYIIHNYSTGVSQDLFPYCSEERPPIVKRIGRQEFLLAGPGGLGMFATVAGISQRAPVHWSENVIGAAVSFPYVIALDDEFITVHSMLDQQQKQTLPFKEGHILQDFEGRVIVATSKGVYILVPLPLEKQIQDLLASRRVEEALVLAKGARRNIPKEKFQVMYRRILQQAGFIQFAQLQFLEAKELFRSGQLDVRELISLYPFLLPTSSSFTRSHPPLHEYADLNQLTQGDQEKMAKCKRFLMSYLNEVRSTEVANGYKEDIDTALLKLYAEADHDSLLDLLVTENFCLLTDSAAWLEKHKKYFALGLLYHYNNQDAAAVQLWVNIVNGDVQDSTRSDLYEYIVDFLTYCLDEELVWAYADWVLQKSEEVGVQVFTKRPLDEQQKNSFNPDDIINCLKKYPKALVKYLEHLVIDKRLQKEEYHTHLAVLYLEEVLLQRASASGKGAEATETQAKLRRLLQKSDLYRVHFLLERLQGAGLPMESAILHGKLGEHEKALHILVHELQDFAAAEDYCLWCSEGRDPPHRQQLFHTLLAIYLHAGPTAHELAVAAVDLLNRHATEFDAAQVLQMLPDTWSVQLLCPFLMGAMRDSIHARRTMQVALGLARSENLIYTYDKMKLKGSSIQLSDKKLCQICQNPFCEPVFVRYPNGGLVHTHCAASRHTNPSSSSPGTRT

SEQ ID NO: 1298 - protein, 372 aa, Homo sapiens
MACNSTSLEAYTYLLLNTSNASDSGSTQLPAPLRISLAIVMLLMTVVGFLGNTVVCIIVYQRPAMRSAINLLLATLAFSDIMLSLCCMPFTAVTLITVRWHFGDHFCRLSATLYWFFVLEGVAILLIISVDRFLIIVQRQDKLNPRRAKVIIAVSWVLSFCIAGPSLTGWTLVEVPARAPQCVLGYTELPADRAYVVTLVVAVFFAPFGVMLCAYMCILNTVRKNAVRVHNQSDSLDLRQLTRAGLRRLQRQQQVSVDLSFKTKAFTTILILFVGFSLCWLPHSVYSLLSVFSQRFYCGSSFYATSTCVLWLSYLKSVFNPIVYCWRIKKFREACIELLPQTFQILPKVPERIRRRIQPSTVYVCNENQSAV

SEQ ID NO: 1299 - protein, 807 aa, Homo sapiens
MSKLSFRARALDAAKPLPIYRGKDMPDLNDCVSINRAVPQMPTGMEKEEESEHHLQRAISAQQVFREKKESMVIPVPEAESNVNYYNRLYKGEFKQPKQFIHIQPFNLDNEQPDYDMDSEDETLLNRLNRKMEIKPLQFEIMIDRLEKASSNQLVTLQEAKLLLNEDDYLIKAVYDYWVRKRKNCRGPSLIPQIKQEKRDGSTNNDPYVAFRRRTEKMQTRKNRKNDEASYEKMLKLRREFSRAITILEMIKRREKTKRELLHLTLEVVEKRYHLGDYGGEILNEVKISRSEKELYATPATLHNGNHHKVQECKTKHPHHLSLKEEASDVVRQKKKYPKKPKAEALITSQQPTPETLPVINKSDIKQYDFHSSDEDEFPQVLSPVSEPEEENDPDGPCAFRRRAGCQYYAPRLDQANHSCENSELADLDKLRYRHCLTTLTVPRRCIGFARRRIGRGGRVIMDRISTEHDPVLKQIDPEMLNSFSSSSQTIDFSSNFSRTNASSKHCENRLSLSEILSNIRSCRLQCFQPRLLNLQDSDSEECTSRKPGQTVNNKRVSAASVALLNTSKNGISVTGGITEEQFQTHQQQLVQMQRQQLAQLQQKQQSQHSSQQTHPKAQGSSTSDCMSKTLDSASAHFAASAVVSAPVPSRSEVAKEQNTGHNNINGVVQPSGTSKTLYSTNMALSSSPGISAVQLVRTVGHTTTNHLIPALCTSSPQTLPMNNSCLTNAVHLNNVSVVSPVNVHINTRTSAPSPTALKLATVAASMDRVPKVTPSSAISSIARENHEPERLGLNGIAETTVAMEVT

SEQ ID NO: 1300 - protein, 712 aa, Homo sapiens
MLAMDTCKHVGQLQLAQDHSSLNPQKWHCVDCNTTESIWACLSCSHVACGRYIEEHALKHFQESSHPVALEVNEMYVFCYLCDDYVLNDNTTGDLKLLRRTLSAIKSQNYHCTTRSGRFLRSMGTGDDSYFLHDGAQSLLQSEDQLYTALWHRRRILMGKIFRTWFEQSPIGRKKQEEPFQEKIVVKREVKKRRQELEYQVKAELESMPPRKSLRLQGLAQSTIIEIVSVQVPAQTPASPAKDKVLSTSENEISQKVSDSSVKRRPIVTPGVTGLRNLGNTCYMNSVLQVLSHLLIFRQCFLKLDLNQWLAMTASEKTRSCKHPPVTDTVVYQMNECQEKDTGFVCSRQSSLSSGLSGGASKGRKMELIQPKEPTSQYISLCHELHTLFQVMWSGKWALVSPFAMLHSVWRLIPAFRGYAQQDAQEFLCELLDKIQRELETTGTSLPALIPTSQRKLIKQVLNVVNNIFHGQLLSQVTCLACDNKSNTIEPFWDLSLEFPERYQCSGKDIASQPCLVTEMLAKFTETEALEGKIYVCDQCNSKRRRFSSKPVVLTEAQKQLMICHLPQVLRLHLKRFRWSGRNNREKIGVHVGFEEILNMEPYCCRETLKSLRPECFIYDLSAVVMHHGKGFGSGHYTAYCYNSEGGFWVHCNDSKLSMCTMDEVCKAQAYILFYTQRVTENGHSKLLPPELLLGSQHPNEDADTSSNEILS

SEQ ID NO: 1301 - protein, 1568 aa, Homo sapiens
MEVSRRKAPPRPPRPAAPLPLLAYLLALAAPGRGADEPVWRSEQAIGAIAASQEDGVFVASGSCLDQLDYSLEHSLSRLYRDQAGNCTEPVSLAPPARPRPGSSFSKLLLPYREGAAGLGGLLLTGWTFDRGACEVRPLGNLSRNSLRNGTEVVSCHPQGSTAGVVYRAGRNNRWYLAVAATYVLPEPETASRCNPAASDHDTAIALKDTEGRSLATQELGRLKLCEGAGSLHFVDAFLWNGSIYFPYYPYNYTSGAATGWPSMARIAQSTEVLFQGQASLDCGHGHPDGRRLLLSSSLVEALDVWAGVFSAAAGEGQERRSPTTTALCLFRMSEIQARAKRVSWDFKTAESHCKEGDQPERVQPIASSTLIHSDLTSVYGTVVMNRTVLFLGTGDGQLLKVILGENLTSNCPEVIYEIKEETPVFYKLVPDPVKNIYIYLTAGKEVRRIRVANCNKHKSCSECLTATDPHCGWCHSLQRCTFQGDCVHSENLENWLDISSGAKKCPKIQIIRSSKEKTTVTMVGSFSPRHSKCMVKNVDSSRELCQNKSQPNRTCTCSIPTRATYKDVSVVNVMFSFGSWNLSDRFNFTNCSSLKECPACVETGCAWCKSARRCIHPFTACDPSDYERNQEQCPVAVEKTSGGGRPKENKGNRTNQALQVFYIKSIEPQKVSTLGKSNVIVTGANFTRASNITMILKGTSTCDKDVIQVSHVLNDTHMKFSLPSSRKEMKDVCIQFDGGNCSSVGSLSYIALPHCSLIFPATTWISGGQNITMMGRNFDVIDNLIISHELKGNINVSEYCVATYCGFLAPSLKSSKVRTNVTVKLRVQDTYLDCGTLQYREDPRFTGYRVESEVDTELEVKIQKENDNFNISKKDIEITLFHGENGQLNCSFENITRNQDLTTILCKIKGIKTASTIANSSKKVRVKLGNLELYVEQESVPSTWYFLIVLPVLLVIVIFAAVGVTRHKSKELSRKQSQQLELLESELRKEIRDGFAELQMDKLDVVDSFGTVPFLDYKHFALRTFFPESGGFTHIFTEDMHNRDANDKNESLTALDALICNKSFLVTVIHTLEKQKNFSVKDRCLFASFLTIALQTKLVYLTSILEVLTRDLMEQCSNMQPKLMLRRTESVVEKLLTNWMSVCLSGFLRETVGEPFYLLVTTLNQKINKGPVDVITCKALYTLNEDWLLWQVPEFSTVALNVVFEKIPENESADVCRNISVNVLDCDTIGQAKEKIFQAFLSKNGSPYGLQLNEIGLELQMGTRQKELLDIDSSSVILEDGITKLNTIGHYEISNGSTIKVFKKIANFTSDVEYSDDHCHLILPDSEAFQDVQGKRHRGKHKFKVKEMYLTKLLSTKVAIHSVLEKLFRSIWSLPNSRAPFAIKYFFDFLDAQAENKKITDPDVVHIWKTNSLPLRFWVNILKNPQFVFDIKKTPHIDGCLSVIAQAFMDAFSLTEQQLGKEAPTNKLLYAKDIPTYKEEVKSYYKAIRDLPPLSSSEMEEFLTQESKKHENEFNEEVALTEIYKYIVKYFDEILNKLERERGLEEAQKQLLHVKVLFDEKKKCKWM

SEQ ID NO: 1302 - protein, 664 aa, Homo sapiens
MPAVDKLLLEEALQDSPQTRSLLSVFEEDAGTLTDYTNQLLQAMQRVYGAQNEMCLATQQLSKQLLAYEKQNFALGKGDEEVISTLHYFSKVVDELNLLHTELAKQLADTMVLPIIQFREKDLTEVSTLKDLFGLASNEHDLSMAKYSRLPKKKENEKVKTEVGKEVAAARRKQHLSSLQYYCALNALQYRKQMAMMEPMIGFAHGQINFFKKGAEMFSKRMDSFLSSVADMVQSIQVELEAEAEKMRVSQQELLSVDESVYTPDSDVAAPQINRNLIQKAGYLNLRNKTGLVTTTWERLYFFTQGGNLMCQPRGAVAGGLIQDLDNCSVMAVDCEDRRYCFQITTPNGKSGIILQAESRKENEEWICAINNISRQIYLTDNPEAVAIKLNQTALQAVTPITSFGKKQESSCPSQNLKNSEMENENDKIVPKATASLPEAEELIAPGTPIQFDIVLPATEFLDQNRGSRRTNPFGETEDESFPEAEDSLLQQMFIVRFLGSMAVKTDSTTEVIYEAMRQVLAARAIHNIFRMTESHLMVTSQSLRLIDPQTQVSRANFELTSVTQFAAHQENKRLVGFVIRVPESTGEESLSTYIFESNSEGEKICYAINLGKEIIEVQKDPEALAQLMLSIPLTNDGKYVLLNDQPDDDDGNPNEHRGAESEA

SEQ ID NO: 1303 - protein, 682 aa, Homo sapiens
MSTPAVPQDLQLPPSQRAQSAFKEQRRQKLKEHLLRRKTLFAYKQENEMLSSRDQRVVTSEDQVQEGTKVLKLKTKMADKENMKRPAESKNNTVVGKHCIPLKPSNELTNSTVVIDTHKPKDSNQTPHLLLTEDDPQSQHMTLSQAFHLKNNSKKKQMTTEKQKQDANMPKKPVLGSYRGQIVQSKINSFRKPLQVKDESSAATKKLSATIPKATKPQPVNTSSVTVKSNRSSNMTATTKFVSTTSQNTQLVRPPIRSHHSNTRDTVKQGISRTSANVTIRKGPHEKELLQSKTALSSVKTSSSQGIIRNKTLSRSIASEVIARPASLSNDKLMEKSEPVDQRRHTAGKAIVDSRSAQPKETSEERKARLSEWKAGKGRVLKRPPNSVVTQHEPAGQNEKPVGSFWTTMAEEDEQRLFTEKVNNTFSECLNLINEGCPKEDILVTLNDLIKNIPDAKKLVKYWICLALIEPITSPIENIIAIYEKAILAGAQPIEEMRHTIVDILTMKSQEKANLGENMEKSCASKEEVKEVSIEDTGVDVDPEKLEMESKLHRNLLFQDCEKEQDNKTKDPTHDVKTPNTETRTSCLIKYNVSTTPYLQSVKKKVQFDGTNSAFKELKFLTPVRRSRRLQEKTSKLPDMLKDHYPCVSSLEQLTELGRETDAFVCRPNAALCRVYYEADTT

SEQ ID NO: 1304 - protein, 852 aa, Homo sapiens
MKPMLKDFSNLLLVVLCDYVLGEAEYLLLREPGHVALSNDTVYVDFQYFDGANGTLRNVSVLLLEANTNQTVTTKYLLTNQSQGTLKFECFYFKEAGDYWFTMTPEATDNSTPFPWWEKSAFLKVEWPVFHVDLNRSAKAAEGTFQVGLFTSQPLCPFPVDKPNIVVDVIFTNSLPEARRNSRQPLEIRTSKRTELAQGQWVEFGCAPLGPEAYVTVVLKLLGRDSVITSTGPIDLAQKFGYKLVMVPELTCESGVEVTVLPPPCTFVQGVVTVFKEAPRYPGKRTIHLAENSLPLGERRTIFNCTLFDMGKNKYCFDFGISSRSHFSAKEECMLIQRNTETWGLWQPWSQCSATCGDGVRERRRVCLTSFPSSPVCPGMSLEASLCSLEECAAFQPSSPSPLQPQGPVKSNNIVTVTGISLCLFIIIATVLITLWRRFGRPAKCSTPARHNSIHSPSFRKNSDEENICELSEQRGSFSDGGDGPTGSPGDTGIPLTYRRSGPVPPEDDASGSESFQSNAQKIIPPLFSYRLAQQQLKEMKKKGLTETTKVYHVSQSPLTDTAIDAAPSAPLDLESPEEAAANKFRIKSPFPEQPAVSAGERPPSRLDLNVTQASCAISPSQTLIRKSQARHVGSRGGPSERSHARNAHFRRTASFHEARQARPFRERSMSTLTPRQAPAYSSRTRTCEQAEDRFRPQSRGAHLFPEKLEHFQEASGTRGPLNPLPKSYTLGQPLRKPDLGDHQAGLVAGIERTEPHRARRGPSPSHKSVSRKQSSPISPKDNYQRVSSLSPSQCRKDKCQSFPTHPEFAFYDNTSFGLTEAEQRMLDLPGYFGSNEEDETTSTLSVEKLVI

SEQ ID NO: 1305 - protein, 828 aa, Homo sapiens
MAEAALLLLPEAAAERDAREKLALWDRRPDTTAPLTDRQTDSVLELKAAAENLPVPAELPIEDLCSLTSQSLPIELTSVVPESTEDILLKGFTSLGMEEERIETAQQFFSWFAKLQTQMDQDEGTKYRQMRDYLSGFQEQCDAILNDVNSALQHLESLQKQYLFVSNKTGTLHEACEQLLKEQSELVDLAENIQQKLSYFNELETINTKLNSPTLSVNSDGFIPMLAKLDDCITYISSHPNFKDYPIYLLKFKQCLSKALHLMKTYTVNTLQTLTSQLLKRDPSSVPNADNAFTLFYVKFRAAAPKVRTLIEQIELRSEKIPEYQQLLNDIHQCYLDQRELLLGPSIACTVAELTSQNNRDHCALVRSGCAFMVHVCQDEHQLYNEFFTKPTSKLDELLEKLCVSLYDVFRPLIIHVIHLETLSELCGILKNEVLEDHVQNNAEQLGAFAAGVKQMLEDVQERLVYRTHIYIQTDITGYKPAPGDLAYPDKLVMMEQIAQSLKDEQKKVPSEASFSDVHLEEGESNSLTKSGSTESLNPRPQTTISPADLHGMWYPTVRRTLVCLSKLYRCIDRAVFQGLSQEALSACIQSLLGASESISKNKTQIDGQLFLIKHLLILREQIAPFHTEFTIKEISLDLKKTRDAAFKILNPMTVPRFFRLNSNNALIEFLLEGTPEIREHYLDSKKDVDRHLKSACEQFIQQQTKLFVEQLEEFMTKVSALKTMASQGGPKYTLSQQPWAQPAKVNDLAATAYKTIKTKLPVTLRSMSLYLSNKDTEFILFKPVRNNIQQVFQKFHALLKEEFSPEDIQIIACPSMEQLSLLLLVSK

SEQ ID NO: 1306 - protein, 164 aa, Homo sapiens [sequence omitted]

SEQ ID NO: 1307 - protein, 548 aa, Homo sapiens
MGEKNGDAKTFWMELEDDGKVDFIFEQVQNVLQSLKQKIKDGSATNKEYIQAMILVNEATIINSSTSIKDPMPVTQKEQENKSNAFPSTSCENSFPEDCTFLTTENKEILSLEDKVVDFREKDSSSNLSYQSHDCSGACLMKMPLNLKGENPLQLPIKCHFQRRHAKTNSHSSALHVSYKTPCGRSLRNVEEVFRYLLETECNFLFTDNFSFNTYVQLARNYPKQKEVVSDVDISNGVESVPISFCNEIDSRKLPQFKYRKTVWPRAYNLTNFSSMFTDSCDCSEGCIDITKCACLQLTARNAKTSPLSSDKITTGYKYKRLQRQIPTGIYECSLLCKCNRQLCQNRVVQHGPQVRLQVFKTEQKGWGVRCLDDIDRGTFVCIYSGRLLSRANTEKSYGIDENGRDENTMKNIFSKKRKLEVACSDCEVEVLPLGLETHPRTAKTEKCPPKFSNNPKELTVETKYDNISRIQYHSVIRDPESKTAIFQHNGKKMEFVSSESVTPEDNDGFKPPREHLNSKTKGAQSRLCFFCECLPLLPVSLSLAQYL

SEQ ID NO: 1308 - protein, 440 aa, Homo sapiens
MEGVLYKWTNYLSGWQPRWFLLCGGILSYYDSPEDAWKGCKGSIQMAVCEIQVHSVDNTRMDLIIPGEQYFYLKARSVAERQRWLVALGSAKACLTDSRTQKEKEFAENTENLKTKMSELRLYCDLLVQQVDKTKEVTTTGVSNSEEGIDVGTLLKSTCNTFLKTLEECMQIANAAFTSELLYRTPPGSPQLAMLKSSKMKHPIIPIHNSLERQMELSTCENGSLNMEINGEEEILMKNKNSLYLKSAEIDCSISSEENTDDNITVQGEIRKEDGMENLKNHDNNLTQSGSDSSCSPECLWEEGKEVIPTFFSTMNTSFSDIELLEDSGIPTEAFLASCYAVVPVLDKLGPTVFAPVKMDLVGNIKKVNQKYITNKEEFTTLQKIVLHEVEADVAQVRNSATEALLWLKRGLKFLKGFLTEVKNGEKDIQTALRNPTENT

SEQ ID NO: 1309 - protein, 517 aa, Homo sapiens
MATTVTCTRFTDEYQLYEDIGKGAFSVVRRCVKLCTGHEYAAKIINTKKLSARDHQKLEREARICRLLKHSNIVRLHDSISEEGFHYLVFDLVTGGELFEDIVAREYYSEADASHCIQQILEAVLHCHQMGVVHRDLKPENLLLASKCKGAAVKLADFGLAIEVQGDQQAWFGFAGTPGYLSPEVLRKEAYGKPVDIWACGVILYILLVGYPPFWDEDQHKLYQQIKAGAYDFPSPEWDTVTPEAKNLINQMLTINPAKRITAHEALKHPWVCQRSTVASMMHRQETVECLKKFNARRKLKGAILTTMLATRNFSAKSLLNKKADGVKPQTNSTKNSAAATSPKGTLPPAALEPQTTVIHNPVDGIKESSDSANTTIEDEDAKARKQEIIKTTEQLIEAVNNGDFEAYAKICDPGLTSFEPEALGNLVEGMDFHRFYFENLLAKNSKPIHTTILNPHVHVIGEDAACIAYIRLTQYIDGQGRPRTSQSEETRVWHRRDGKWQNVHFHCSGAPVAPLQ

SEQ ID NO: 1310 - protein, 579 aa, Homo sapiens
MNKLYIGNLSENAAPSDLESIFKDAKIPVSGPFLVKTGYAFVDCPDESWALKAIEALSGKIELHGKPIEVEHSVPKRQRIRKLQIRNIPPHLQWEVLDSLLVQYGVVESCEQVNTDSETAVVNVTYSSKDQARQALDKLNGFQLENFTLKVAYIPDEMAAQQNPLQQPRGRRGLGQRGSSRQGSPGSVSKQKPCDLPLRLLVPTQFVGAIIGKEGATIRNITKQTQSKIDVHRKENAGAAEKSITILSTPEGTSAACKSILEIMHKEAQDIKFTEEIPLKILAHNNFVGRLIGKEGRNLKKIEQDTDTKITISPLQELTLYNPERTITVKGNVETCAKAEEEIMKKIRESYENDIASMNLQAHLIPGLNLNALGLFPPTSGMPPPTSGPPSAMTPPYPQFEQSETETVHLFIPALSVGAIIGKQGQHIKQLSRFAGASIKIAPAEAPDAKVRMVIITGPPEAQFKAQGRIYGKIKEENFVSPKEEVKLEAHIRVPSFAAGRVIGKGGKTVNELQNLSSAEVVVPRDQTPDENDQVVVKITGHFYACQVAQRKIQEILTQVKQHQQQKALQSGPPQSRRK

SEQ ID NO: 1311 - protein, 560 aa, Homo sapiens
MECLYYFLGFLLLAARLPLDAAKRFHDVLGNERPSAYMREHNQLNGWSSDENDWNEKLYPVWKRGDMRWKNSWKGGRVQAVLTSDSPALVGSNITFAVNLIFPRCQKEDANGNIVYEKNCRNEAGLSADPYVYNWTAWSEDSDGENGTGQSHHNVFPDGKPFPHHPGWRRWNFIYVFHTLGQYFQKLGRCSVRVSVNTANVTLGPQLMEVTVYRRHGRAYVPIAQVKDVYVVTDQIPVFVTMFQKNDRNSSDETFLKDLPIMFDVLIHDPSHFLNYSTINYKWSFGDNTGLFVSTNHTVNHTYVLNGTFSLNLTVKAAAPGPCPPPPPPPRPSKPTPSLGPAGDNPLELSRIPDENCQINRYGHFQATITIVEGILEVNIIQMTDVLMPVPWPESSLIDFVVTCQGSIPTEVCTIISDPTCEITQNTVCSPVDVDEMCLLTVRRTFNGSGTYCVNLTLGDDTSLALTSTLISVPDRDPASPLRMANSALISVGCLAIFVTVISLLVYKKHKEYNPIENSPGNVVRSKGLSVFLNRAKAVFFPGNQEKDPLLKNQEFKGVS

SEQ ID NO: 1312 - protein, 192 aa, Homo sapiens
MQAIKCVVVGDGAVGKTCLLISYTTNAFPGEYIPTVFDNYSANVMVDGKPVNLGLWDTAGQEDYDRLRPLSYPQTDVFLICFSLVSPASFENVRAKWYPEVRHHCPNTPIILVGTKLDLRDDKDTIEKLKEKKLTPITYPQGLAMAKEIGAVKYLECSALTQRGLKTVFDEAIRAVLCPPPVKKRKRKCLLL

SEQ ID NO: 1313 - protein, 812 aa, Homo sapiens
MVDENDIRALNVRHYRDHIGVVSQEPVLFGTTISNNIKYGRDDVTDEEMERAAREANAYDFIMEFPNKFNTLVGEKGAQMSGGQKQRIAIARALVRNPKILILDEATSALDSESKSAVQAALEKASKGRTTIVVAHRLSTIRSADLIVTLKDGMLAEKGAHAELMAKRGLYYSLVMSQDIKKADEQMESMTYSTERKTNSLPLHSVKSIKSDFIDKAEESTQSKEISLPEVSLLKILKLNKPEWPFVVLGTLASVLNGTVHPVFSIIFAKIITMFGNNDKTTLKHDAEIYSMIFVILGVICFVSYFMQGLFYGRAGEILTMRLRHLAFKAMLYQDIAWFDEKENSTGGLTTILAIDIAQIQGATGSRIGVLTQNATNMGLSVIISFIYGWEMTFLILSIAPVLAVTGMIETAAMTGFANKDKQELKHAGKIATEALENIRTIVSLTREKAFEQMYEEMLQTQHRNTSKKAQIIGSCYAFSHAFIYFAYAAGFRFGAYLIQAGRMTPEGMFIVFTAIAYGAMAIGETLVLAPEYSKAKSGAAHLFALLEKKPNIDSRSQEGKKPDTCEGNLEFREVSFFYPCRPDVFILRGLSLSIERGKTVAFVGSSGCGKSTSVQLLQRLYDPVQGQVLFDGVDAKELNVQWLRSQIAIVPQEPVLFNCSIAENIAYGDNSRVVPLDEIKEAANAANIHSFIEGLPEKYNTQVGLKGAQLSGGQKQRLAIARALLQKPKILLLDEATSALDNDSEKVVQHALDKARTGRTCLVVTHRLSAIQNADLIVVLHNGKIKEQGTHQELLRNRDIYFKLVNAQSVQ

SEQ ID NO: 1314 - protein, 631 aa, Homo sapiens
MAAHLVKRCTCLLREAARQAPAMAPVGRLRLAWVAHKTLTSSATSPISHLPGSLMEPVEKERASTPYIEKQVDHLIKKATRPEELLELLGGSHDLDSNQAAMVLIRLSHLLSEKPEDKGLLIQDAHFHQLLCLLNSQIASVWHGTLSKLLGSLYALGIPKASKELQSVEQEVRWRMRKLKYKHLAFLAESCATLSQEQHSQELLAELLTHLERRWTEIEDSHTLVTVMMKVGHLSEPLMNRLEDKCLELVEHFGPNELRKVLVMLAAQSRRSVPLLRAISYHLVQKPFSLTKDVLLDVAYAYGKLSFHQTQVSQRLATDLLSLMPSLTSGEVAHCAKSFALLKWLSLPLFEAFAQHVLNRAQDITLPHLCSVLLAFARLNFHPDQEDQFFSLVHEKLGSELPGLEPALQVDLVWALCVLQQAREAELQAVLHPEFHIQFLGGKSQKDQNTFQKLLHINATALLEYPEYSGPLLPASAVAPGPSALDRKVTPLQKELQETLKGLLGSADKGSLEVATQYGWVLDAEVLLDSDGEFLPVRDFVAPHLAQPTGSQSPPPGSKRLAFLRWEFPNFNSRSKDLLGRFVLARRHIVAAGFLIVDVPFYEWLELKSEWQKGAYLKDKMRKAVAEELAK

SEQ ID NO: 1315 - protein, 444 aa, Homo sapiens
MEEEGKKGKKPGIVSPFKRVFLKGEKSRDKKAHEKVTERRPLHTVVLSLPERVEPDRLLSDYIEKEVKYLGQLTSIPGYLNPSSRTEILHFIDNAKRAHQLPGHLTQEHDAVLSLSAYNVKLAWRDGEDIILRVPIHDIAAVSYVRDDAAHLVVLKTAQDPGISPSQSLCAESSRGLSAGSLSESAVGPVEACCLVILAAESKVAAEELCCLLGQVFQVVYTESTIDFLDRAIFDGASTPTHHLSLHSDDSSTKVDIKETYEVEASTFCFPESVDVGGASPHSKTISESELSASATELLQDYMLTLRTKLSSQEIQQFAALLHEYRNGASIHEFCINLRQLYGDSRKFLLLGLRPFIPEKDSQHFENFLETIGVKDGRGIITDSFGRHRRALSTTSSSTTNGNRATGSSDDRSAPSEGDEWDRMISDISSDIEALGCSMDQDSA

SEQ ID NO: 1316 - protein, 1907 aa, Homo sapiens
MEVAWLVYVLGQQPLARQGEGQSRLVPGRGLVLWLPGLPRSSPSWPAVDLAPLAPARPRGPLICHTGHEQAGREPGPGSSTKGPVLHDQDTRCAFLPRPPGPLQTRRYCRHQGRQGSGLGAGPGAGTWAPAPPGVSKPRCPGRARPGEGQQQVTTARPPAINRGARQPRAGAAAAGRGPGAGAWRTGEAAASAGPAVGEGGAMGSRRAPSRGWGAGGRSGAGGDGEDDGPVWIPSPASRSYLLSVRPETSLSSNRLSHPSSGRSTFCSIIAQLTEETQPLFETTLKSRSVSEDSDVRFTCIVTGYPEPEVTWYKDDTELDRYCGLPKYEITHQGNRHTLQLYRCREEDAAIYQASAQNSKGIVSCSGVLEVGTMTEYKIHQRWFAKLKRKAAAKLREIEQSWKHEKAVPGEVDTLRKLSPDRFQRKRRLSGAQAPGPSVPTREPEGGTLAAWQEGETETAQHSGLGLINSFASGEVTTNGEAAPENGEDGEHGLLTYICDAMELGPQRALKEESGAKKKKKDEESKQGLRKPELEKAAQSRRSSENCIPSSDEPDSCGTQGPVGVEQVQTQPRGRAARGPGSSGTDSTRKPASAVGTPDKAQKAPGPGPGQEVYFSLKDMYLENTQAVRPLGEEGPQTLSVRAPGESPKGKAPLRARSEGVPGAPGQPTHSLTPQPTRPFNRKRFAPPKPKGEATTDSKPISSLSQAPECGAQSLGKAPPQASVQVPTPPARRRHGTRDSTLQGQAGHRTPGEVLECQTTTAPTMSASSSSDVASIGVSTSGSQGIIEPMDMETQEDGRTSANQRTGSKKNVQADGKIQVDGRTRGDGTQTAQRTRADRKTQVDAGTQESKRPQSDRSAQKGMMTQGRAETQLETTQAGEKIQEDRKAQADKGTQEDRRMQGEKGMQGEKGTQSEGSAPTAMEGQSEQEVATSLGPPSRTPKLPPTAGPRAPLNIECFVQTPEGSCFPKKPGCLPRSEEAVVTASRNHEQTVLGPLSGNLMLPAQPPHEGSVEQVGGERCRGPQSSGPVEAKQEDSPFQCPKEERPGGVPCMDQGGCPLAGLSQEVPTMPSLPGTGLTASPKAGPCSTPTSQHGSTATFLPSEDQVLMSSAPTLHLGLGTPTQSHPPETMATSSEGACAQVPDVEGRTPGPRSCDPGLIDSLKNYLLLLLKLSSTETSGAGGESQVGAATGGLVPSATLTPTVEVAGLSPRTSRRILERVENNHLVQSAQTLLLSPCTSRRLTGLLDREVQAGRQALAAARGSWGPGPSSLTVPAIVVDEEDPGLASEGASEGEGEVSPEGPGLLGASQESSMAGRLGEAGGQAAPGQGPSAESIAQEPSQEEKFPGEALTGLPAATPEELALGARRKRFLPKVRAAGDGEATTPEERESPTVSPRGPRKSLVPGSPGTPGRERRSPTQGRKASMLEVPRAEEELAAGDLGPSPKAGGLDTEVALDEGKQETLAKPRKAKDLLKAPQVIRKIRVEQFPDASGSLKLWCQFFNILSDSVLTWAKDQRPVGEVGRSAGDEGPAALAIVQASPVDCGVYRCTIHNEHGSASTDFCLSPEVLSGFISREEGEVGEEIEMTPMVFAKGLADSGCWGDKLFGRLVSEELRGGGYGCGLRKASQAKVIYGLEPIFESGRTCIIKVSSLLVFGPSSETSLVGRNYDVTIQGCKIQNMSREYCKIFAAEARAAPGFGEVPEIIPLYLIYRPANNIPYATLEEDLGKPLESYCSREWGCAEAPTASGSSEAMQKCQTFQHWLYQWTNGSFLVTDLAGVDWKMTDVQIATKLRGYQGLKESCFPALLDRFASSHQCNAYCELLGLTPLKGPEAAHPQAKAKGSKSPSAGRKGSQLSPQPQKKGLPSPQGTRKSAPSSKATPQASEPVTTQLLGQPPTQEEGSKAQGMR

SEQ ID NO: 1317 - protein, 446 aa, Homo sapiens
MEETIKDPPTSAVLLDHCHFSQVIFNSVEKFYIPGGDVTCHYTFTQHFIPRRKDWIGIFRVGWKTTREYYTFMWVTLPIDLNNKSAKQQEVQFKAYYLPKDDEYYQFCYVDEDGVVRGASIPFQFRPENEEDILVVTTQGEVEEIEQHNKELCKENQELKDSCISLQKQNSDMQAELQKKQEELETLQSINKKLELKVKEQKDYWETELLQLKEQNQKMSSENEKMGIRVDQLQAQLSTQEKEMEKLVQGDQDKTEQLEQLKKENDHLFLSLTEQRKDQKKLEQTVEQMKQNETTAMKKQQELMDENFDLSKRLSENEIICNALQRQKERLEGENDLLKRENSRLLSYMGLDFNSLPYQVPTSDEGGARQNPGLAYGNPYSGIQESSSPSPLSIKKCPICKADDICDHTLEQQQMQPLCFNCPICDKIFPATEKQIFEDHVFCHSL

SEQ ID NO: 1318 - protein, 496 aa, Homo sapiens
MADESETAVKPPAPPLPQMMEGNGNGHEHCSDCENEEDNSYNRGGLSPANDTGAKKKKKKQKKKKEKGSETDSAQDQPVKMNSLPAERIQEIQKAIELFSVGQGPAKTMEEASKRSYQFWDTQPVPKLGEVVNTHGPVEPDKDNIRQEPYTLPQGFTWDALDLGDRGVLKELYTLLNENYVEDDDNMFRFDYSPEFLLWALRPPGWLPQWHCGVRVVSSRKLVGFISAIPANIHIYDTEKKMVEINFLCVHKKLRSKRVAPVLIREITRRVHLEGIFQAVYTAGVVLPKPVGTCRYWHRSLNPRKLIEVKFSHLSRNMTMQRTMKLYRLPETPKTAGLRPMETKDIPVVHQLLTRYLKQFHLTPVMSQEEVEHWFYPQENIIDTFVVENANGEVTDFLSFYTLPSTIMNHPTHKSLKAAYSFYNVHTQTPLLDLMSDALVLAKMKGFDVFNALDLMENKTFLEKLKFGIGDGNLQYYLYNWKCPSMGAEKVGLVLQ

SEQ ID NO: 1319 - protein, 1134 aa, Homo sapiens
MTSLYGRHAEKTTDMPKPSAPKVHVQRSVSRDTIAIHFSASGEEEEEEEEEFREYFEEGLDDQSIVTGLEAKEDLYLEPQVGHDPAGPAASPVLADGLSVSQAPAILPVSKNTVKLLESPVPAAQVLSTVPLAVSPGSSSSGPLASSPSVSSLSEQKTSSSSPLSSPSKSPILSSSASTSTLSSAKPFMSLVKSLSTEVEPKESPHPARHRHLMKTLVKSLSTDTSRQESDTVSYKPPDSKLNLHLFKQFTQPRNTGGDSKTAPSSPLTSPSDTRSFFKVPEMEAKIEDTKRRLSEVIYEPFQLLSKIIGEESGSHRPKALSSSASELSNLSSLNGHLESNNNYSIKEEECDSEGDGYGSDSNIPRSDHPKSTGEPTREIELKSSQGSSLKDLGLKTSSLVLEKCSLSALVSKEDEEFCELYTEDFDLETEGESKVDKLSDIPLKPEVLAEDGVVLDSEDEVDSAVQHPELPVKTLGFFIMCVYVYLILPLPHYVSGLFLGIGLGFMTAVCVIWFFTPPSAHKYHKLHKNLRHWNTRSLDIKEPEILKGWMNEIYNYDPETYHATLTHSVFVRLEGGTLRLSKPNKNISRRASYNEPKPEVTYISQKIYDLSDSKIYLVPKTLARKRIWNKKYPICIELGQQDDFMSKAQTDKETSEEKPPAEGSEDPKKPPRPQEGTRSSQRDQILYLFGRTGREKEEWFRRFILASKLKSEIKKSSGVSGGKPAPVFLAPGLLPAHSRHNSPSGHLTHSRSSSKGSVEEIMSQPKQKELAGSVRQKMLLDYSVYMGRCVPQESRSPQRSPLQSAESSPTAGKKLPEVPPSEEEEQEAWVNALLGRIFWDFLGEKYWSDLVSKKIQMKLSKIKLPYFMNELTLTELDMGVAVPKILQAFKPYVDHQGLWIDLEMSYNGSFLMTLETKMNLTKLGKEPLVEALKVGEIGKEGCRPRAFCLADSDEESSSAGSSEEDDAPEPSGGDKQLLPGAEGYVGGHRTSKIMRFVDKITKSKYFQKATETEFIKKKIEEVSNTPLLLTVEVQECRGTLAVNIPPPPTDRVWYGFRKPPHVELKARPKLGEREVTLVHVTDWIEKKLEQEFQKVFVMPNMDDVYITIMHSAMDPRSTSCLLKDPPVEAADQP

SEQ ID NO: 1320 - protein, 1249 aa, Homo sapiens
MSSMWSEYTIGGVKIYFPYKAYPSQLAMMNSILRGLNSKQHCLLESPTGSGKSLALLCSALAWQQSLSGKPADEGVSEKAEVQLSCCCACHSKDFTNNDMNQGTSRHFNYPSTPPSERNGTSSTCQDSPEKTTLAAKLSAKKQASIYRDENDDFQVEKKRIRPLETTQQIRKRHCFGTEVHNLDAKVDSGKTVKLNSPLEKINSFSPQKPPGHCSRCCCSTKQGNSQESSNTIKKDHTGKSKIPKIYFGTRTHKQIAQITRELRRTAYSGVPMTILSSRDHTCVHPEVVGNFNRNEKCMELLDGKNGKSCYFYHGVHKISDQHTLQTFQGMCKAWDIEELVSLGKKLKACPYYTARELIQDADIIFCPYNYLLDAQIRESMDLNLKEQVVILDEAHNIEDCARESASYSVTEVQLRFARDELDSMVNNNIRKKDHEPLRAVCCSLINWLEANAEYLVERDYESACKIWSGNEMLLTLHKMGITTATFPILQGHFSAVLQKEEKISPIYGKEEAREVPVISASTQIMLKGLFMVLDYLFRQNSRFADDYKIAIQQTYSWTNQIDISDKNGLLVLPKNKKRSRQKTAVHVLNFWCLNPAVAFSDINGKVQTIVLTSGTLSPMKSFSSELGVTFTIQLEANHIIKNSQVWVGTIGSGPKGRNLCATFQNTETFEFQDEVGALLLSVCQTVSQGILCFLPSYKLLEKLKERWLSTGLWHNLELVKTVIVEPQGGEKTNFDELLQVYYDAIKYKGEKDGALLVAVCRGKVSEGLDFSDDNARAVITIGIPFPNVKDLQVELKRQYNDHHSKLRGLLPGRQWYEIQAYRALNQALGRCIRHRNDWGALILVDDRFRNNPSRYISGLSKWVRQQIQHHSTFESALESLAEFSKKHQKVLNVSIKDRTNIQDNESTLEVTSLKYSTSPYLLEAASHLSPENFVEDEAKICVQELQCPKIITKNSPLPSSIISRKEKNDPVFLEEAGKAEKIVISRSTSPTFNKQTKRVSWSSFNSLGQYFTGKIPKATPELGSSENSASSPPRFKTEKMESKTVLPFTDKCESSNLTVNTSFGSCPQSETIISSLKIDATLTRKNHSEHPLCSEEALDPDIELSLVSEEDKQSTSNRDFETEAEDESIYFTPELYDPEDTDEEKNDLAETDRGNRLANNSDCILAKDLFEIRTIKEVDSAREVKAEDCIDTKLNGILHIEESKIDDIDGNVKTTWINELELGKTHEIEIKNFKPSPSKNKGMFPGFK

SEQ ID NO: 1321 - protein, 611 aa, Homo sapiens
MPRRKRNAGSSSDGTEDSDFSTDLEHTDSSESDGTSRRSARVTRSSARLSQSSQDSSPVRNLQSFGTEEPAYSTRRVTRSQQQPTPVTPKKYPLRQTRSSGSETEQVVDFSDRETKNTADHDESPPRTPTGNAPSSESDIDISSPNVSHDESIAKDMSLKDSGSDLSHRPKRRRFHESYNFNMKCPTPGCNSLGHLTGKHERHFSISGCPLYHNLSADECKVRAQSRDKQIEERMLSHRQDDNNRHATRHQAPTERQLRYKEKVAELRKKRNSGLSKEQKEKYMEHRQTYGNTREPLLENLTSEYDLDLFRRAQARASEDLEKLRLQGQITEGSNMIKTIAFGRYELDTWYHSPYPEEYARLGRLYMCEFCLKYMKSQTILRRHMAKCVWKHPPGDEIYRKGSISVFEVDGKKNKIYCQNLCLLAKLFLDHKTLYYDVEPFLFYVMTEADNTGCHLIGYFSKEKNSFLNYNVSCILTMPQYMRQGYGKMLIDFSYLLSKVEEKVGSPERPLSDLGLISYRSYWKEVLLRYLHNFQGKEISIKEISQETAVNPVDIVSTLQALQMLKYWKGKHLVLKRQDLIDEWIAKEAKRSNSNKTMDPSCLKWTPPKGT

SEQ ID NO: 1322 - protein, 704 aa, Homo sapiens
MESKPSRIPRRISVQPSSSLSARMMSGSRGSSLNDTYHSRDSSFRLDSEYQSTSASASASPFQSAWYSESEITQGARSRSQNQQRDHDSKRPKLSCTNCTTSAGRNVGNGLNTLSDSSWRHSQVPRSSSMVLGSFGTDLMRERRDLERRTDSSISNLMDYSHRSGDFTTSSYVQDRVPSYSQGARPKENSMSTLQLNTSSTNHQLPSEHQTILSSRDSRNSLRSNFSSRESESSRSNTQPGFSYSSSRDEAPIISNSERVVSSQRPFQESSDNEGRRTTRRLLSRIASSMSSTFFSRRSSQDSLNTRSLNSENSYVSPRILTASQSRSNVPSASEVPDNRASEASQGFRFLRRRWGLSSLSHNHSSESDSENFNQESEGRNTGPWLSSSLRNRCTPLFSRRRREGRDESSRIPTSDTSSRSHIFRRESNEVVHLEAQNDPLGAAANRPQASAASSSATTGGSTSDSAQGGRNTGISGILPGSLFRFAVPPALGSNLTDNVMITVDIIPSGWNSADGKSDKTKSAPSRDPERLQKIKESLLLEDSEEEEGDLCRICQMAAASSSNLLIEPCKCTGSLQYVHQDCMKKWLQAKINSGSSLEAVTTCELCKEKLELNLEDFDIHELHRAHANEQAEYEFISSGLYLVVLLHLCEQSFSDMMGNTNEPSTRVRFINLARTLQAHMEDLETSEDDSEEDGDHNRTFDIA

SEQ ID NO: 1323 - protein, 940 aa, Homo sapiens
MNRIRKFFRGSGRVLAFIFVASVIWLLFDMAALRLSFSEINTRVIKEDIVRRERIGFRVQPDQGKIFYSSIKEMKPPLRGHGKGAWGKENVRKTEESVLKVEVDLDQTQRERKMQNALGRGKVVPLWHPAHLQTLPVTPNKQKTDGRGTKPEASSHQGTPKQTTAQGAPKTSFIAAKGTQVVKISVHMGRVSLKQEPRKSHSPSSDTSKLAAERDLNVTISLSTDRPKQRSQAVANERAHPASTAVPKSGEAMALNKTKTQSKEVNANKHKANTSLPFPKFTVNSNRLRKQSINETPLGSLSKDDGARGAHGKKLNFSESHLVIITKEEEQKADPKEVSNSKTKTIFPKVLGKSQSKHISRNRSEMSSSSLAPHRVPLSQTNHALTGGLEPAKINITAKAPSTEYNQSHIKALLPEDSGTHQVLRIDVTLSPRDPKAPGQFGRPVVVPHGKEKEAERRWKEGNFNVYLSDLIPVDRAIEDTRPAGCAEQLVHNNLPTTSVIMCFVDEVWSTLLRSVHSVINRSPPHLIKEILLVDDFSTKDYLKDNLDKYMSQFPKVRILRLKERHGLIRARLAGAQNATGDVLTFLDSHVECNVGWLEPLLERVYLSRKKVACPVIEVINDKDMSYMTVDNFQRGIFVWPMNFGWRTIPPDVIAKNRIKETDTIRCPVMAGGLFSIDKSYFFELGTYDPGLDVWGGENMELSFKVWMCGGEIEIIPCSRVGHIFRNDNPYSFPKDRMKTVERNLVRVAEVWLDEYKELFYGHGDHLIDQGLDVGNLTQQRELRKKLKCKSFKWYLENVFPDLRAPIVRASGVLINVALGKCISIENTTVILEDCDGSKELQQFNYTWLRLIKCGEWCIAPIPDKGAVRLHPCDNRNKGLKWLHKSTSVFHPELVNHIVFENNQQLLCLEGNFSQKILKVAACDPVKPYQKWKFEKYYEA

SEQ ID NO: 1324 - protein, 684 aa, Homo sapiens
MENLQTNFSLVQGSTKKLNGMGDDGSPPAKKMITDIHANGKTINKVPTVKKEHLDDYGEAPVETDGEHVKRTCTSVPETLHLNPSLKHTLAQFHLSSQSSLGGPAAFSARHSQESMSPTVFLPLPSPQVLPGPLLIPSDSSTELTQTVLEGESISCFQVGGEKRLCLPQVLNSVLREFTLQQINTVCDELYIYCSRCTSDQLHILKVLGILPFNAPSCGLITLTDAQRLCNALLRPRTFPQNGSVLPAKSSLAQLKETGSAFEVEHECLGKCQGLFAPQFYVQPDAPCIQCLECCGMFAPQTFVMHSHRSPDKRTCHWGFESAKWHCYLHVNQKYLGTPEEKKLKIILEEMKEKFSMRSGKRNQSKTDAPSGMELQSWYPVIKQEGDHVSQTHSFLHPSYYLYMCDKVVAPNVSLTSAVSQSKELTKTEASKSISRQSEKAHSSGKLQKTVSYPDVSLEEQEKMDLKTSRELCSRLDASISNNSTSKRKSESATCNLVRDINKVGIGLVAAASSPLLVKDVICEDDKGKIMEEVMRTYLKQQEKLNLILQKKQQLQMEVKMLSSSKSMKELTEEQQNLQKELESLQNEHAQRMEEFYVEQKDLEKKLEQIMKQKCTCDSNLEKDKEAEYAGQLAELRQRLDHAEADRQELQDELRQEREARQKLEMMIKELKLQILKSSKTAKE

SEQ ID NO: 1325 - protein, 815 aa, Homo sapiens
MAGGHCGSFPAAAAGSGEIVQLNVGGTRFSTSRQTLMWIPDSFFSSLLSGRISTLRDETGAIFIDRDPAAFAPILNFLRTKELDLRGVSINVLRHEAEFYGITPLVRRLLLCEELERSSCGSVLFHGYLPPPGIPSRKINNTVRSADSRNGLNSTEGEARGNGTQPVLSGTGEETVRLGFPVDPRKVLIVAGHHNWIVAAYAHFAVCYRIKESSGWQQVFTSPYLDWTIERVALNAKVVGGPHGDKDKMVAVASESSIILWSVQDGGSGSEIGVFSLGVPVDALFFIGNQLVATSHTGKVGVWNAVTQHWQVQDVVPITSYDTAGSFLLLGCNNGSIYYIDMQKFPLRMKDNDLLVTELYHDPSNDAITALSVYLTPKTSVSGNWIEIAYGTSSGAVRVIVQHPETVGSGPQLFQTFTVHRSPVTKIMLSEKHLVSVCADNNHVRTWTVTRFRGMISTQPGSTPLASFKILSLEETESHGSYSSGNDIGPFGERDDQQVFIQKVVPITNKLFVRLSSTGKRICEIQAVDCTTISSFTVRECEGSSRMGSRPRRYLFTGHTNGSIQMWDLTTAMDMVNKSEDKDVGGPTEEELLKLLDQCDLSTSRCATPNISPATSVVQHSHLRESNSSLQLQHHDTTHEAATYGSMRPYRESPLLARARRTESFHSYRDFQTINLNRNVERAVPENGNLGPIQAEVKGATGECNISERKSPGVEIKSLRELDSGLEVHKIAEGFSESKKRSSEDENENKIEFRKKGGFEGGGFLGRKKVPYLASSPSTSDGGTDSPGTASPSPTKTTPSPRHKKSDSSGQEYSL

SEQ ID NO: 1326 - protein, 158 aa, Homo sapiens
MEKALKIDTPQQGSIQDINHRVWVLQDQTLIAVPRKDRMSPVTIALISCRHVETLEKDRGNPIYLGLNGLNLCLMCAKVGDQPTLQLKEKDIMDLYNQPEPVKSFLFYHSQSGRNSTFESVAFPGWFIAVSSEGGCPLILTQELGKANTTDFGLTMLF

SEQ ID NO: 1327 - protein, 164 aa, Homo sapiens
MNPQREAAPKSYAIRDSRQMVWVLSGNSLIAAPLSRSIKPVTLHLIACRDTEFSDKEKGNMVYLGIKGKDLCLFCAEIQGKPTLQLKLQGSQDNIGKDTCWKLVGIHTCINLDVRESCFMGTLDQWGIGVGRKKWKSSFQHHHLRKKDKDFSSMRTNIGMPGRM

SEQ ID NO: 1328 - protein, 837 aa, Homo sapiens
MTTFGAVAEWRLPSLRRATLWIPQWFAKKAIFNSPLEAAMAFPHLQQPSFLLASLKADSINKPFAQQCQDLVKVIEDFPAKELHTIFPWLVESIFGSLDGVLVGWNLRCLQGRVNPVEYSIVMEFLDPGGPMMKLVYKLQAEDYKFDFPVSYLPGPVKASIQECILPDSPLYHNKVQFTPTGGLGLNLALNPFEYYIFFFALSLITQKPLPVSLHVRTSDCAYFILVDRYLSWFLPTEGSVPPPLSSSPGGTSPSPPPRTPAIPFASYGLHHTSLLKRHISHQTSVNADPASHEIWRSETLLQVFVEMWLHHYSLEMYQKMQSPHAKESFTPTEEHVLVVRLLLKHLHAFANSLKPEQASPSAHSHATSPLEEFKRAAVPRFVQQKLYLFLQHCFGHWPLDASFRAVLEMWLSYLQPWRYAPDKQAPGSDSQPRCVSEKWAPFVQENLLMYTKLFVGFLNRALRTDLVSPKHALMVFRVAKVFAQPNLAEMIQKGEQLFLEPELVIPHRQHRLFTAPTFTGSFLSPWPPAVTDASFKVKSHVYSLEGQDCKYTPMFGPEARTLVLRLAQLITQAKHTAKSISDQCAESPAGHSFLSWLGFSSMDTNGSYTANDLDEMGQDSVRKTDEYLEKALEYLRQIFRLSEAQLRQFTLALGTTQDENGKKQLPDCIVGEDGLILTPLGRYQIINGLRRFEIEYQGDPELQPIRSYEIASLVRTLFRLSSAINHRFAGQMAALCSRDDFLGSFCRYHLTEPGLASRHLLSPVGRRQVAGHTRGPRLSLRFLGSYRTLVSLLLAFFVASLFCVGPLPCTLLLTLGYVLYASAMTLLTERGKLHQP

SEQ ID NO: 1329 - protein, 1056 aa, Homo sapiens
MSSQQFPRLGAPSTGLSQAPSQIANSGSAGLINPAATVNDESGRDSEVSAREHMSSSSSLQSREEKQEPVVVRPYPQVQMLSTHHAVASATPVAVTAPPAHLTPAVPLSFSEGLMKPPPKPTMPSRPIAPAPPSTLSLPPKVPGQVTVTMESSIPQASAIPVATISGQQGHPSNLHHIMTTNVQMSIIRSNAPGPPLHIGASHLPRGAAAAAVMSSSKVTTVLRPTSQLPNAATAQPAVQHIIHQPIQSRPPVTTSNAIPPAVVATVSATRAQSPVITTTAAHATDSALSRPTLSIQHPPSAAISIQRPAQSRDVTTRITLPSHPALGTPKQQLHTMAQKTIFSTGTPVAAATVAPILATNTIPSATTAGSVSHTQAPTSTIVTMTVPSHSSHATAVTTSNIPVAKVVPQQITHTSPRIQPDYPAERSSLIPISGHRASPNPVAMETRSDNRPSVPVQFQYFLPTYPPSAYPLAAHTYTPITSSVSTIRQYPVSAQAPNSAITAQTGVGVASTVHLNPMQLMTVDASHARHIQGIQPAPISTQGIQPAPIGTPGIQPAPLGTQGIHSATPINTQGLQPAPMGTQQPQPEGKTSVVLADGATIVANPISNPFSAAPAATTVVQTHSQSASTNAPAQGSSPRPSILRKKPATDGMAVRKTLIPPQPPDVASPRVESSMRSTSGSPRPAGAKPKSEIHVSMATPVTVSMETVSNQNNDQPTIAVPPTAQQPPPTIPTMIAAASPPSQPAVALSTIPGAVPITPPITTIAAAPPPSVTVGGSLSSVLGPPVPEIKVKEEVEPMDIMRPVSAVPPLATNTVSPSLALLANNLSMPTSDLPPGASPRKKPRKQQHVISTEEGDMMETNSTDDEKSTAKSLLVKAEKRKSPPKEYIDEEGVRYVPVRPRPPITLLRHYRNPWKAAYHHFQRYSDVRVKEEKKAMLQEIANQKGVSCRAQGWKVHLCAAQLLQLTNLEHDVYERLTNLQEGIIPKKKAATDDDLHRINELIQGNMQRCKLVMDQISEARDSMLKVLDHKDRVLKLLNKNGTVKKVSKLKRKEKV

SEQ ID NO: 1330 - protein, 1555 aa, Homo sapiens
MGCKGDASGACAAGALPVTGVCYKMGVLVVLTVLWLFSSVKADSKAITTSLTTKWFSTPLLLEASEFLAEDSQEKFWNFVEASQNIGSSDHDGTDYSYYHAILEAAFQFLSPLQQNLFKFCLSLRSYSATIQAFQQIAADEPPPEGCNSFFSVHGKKTCESDTLEALLLTASERPKPLLFKGDHRYPSSNPESPVVIFYSEIGSEEFSNFHRQLISKSNAGKINYVFRHYIFNPRKEPVYLSGYGVELAIKSTEYKAKDDTQVKGTEVNTTVIGENDPIDEVQGFLFGKLRDLHPDLEGQLKELRKHLVESTNEMAPLKVWQLQDLSFQTAARILASPVELALVVMKDLSQNFPTKARAITKTAVSSELRTEVEENQKYFKGTLGLQPGDSALFINGLHMDLDTQDIFSLFDVLRNEARVMEGLHRLGIEGLSLHNVLKLNIQPSEADYAVDIRSPAISWVNNLEVDSRYNSWPSSLQELLRPTFPGVIRQIRKNLHNMVFIVDPAHETTAELMNTAEMFLSNHIPLRIGFIFVVNDSEDVDGMQDAGVAVLRAYNYVAQEVDDYHAFQTLTHIYNKVRTGEKVKVEHVVSVLEKKYPYVEVNSILGIDSAYDRNRKEARGYYEQTGVGPLPVVLFNGMPFEREQLDPDELETITMHKILETTTFFQRAVYLGELPHDQDVVEYIMNQPNVVPRINSRILTAERDYLDLTASNNFFVDDYARFTILDSQGKTAAVANSMNYLTKKGMSSKEIYDDSFIRPVTFWIVGDFDSPSGRQLLYDAIKHQKSSNNVRISMINNPAKEISYENTQISRAIWAALQTQTSNAAKNFITKMAKEGAAEALAAGADIAEFSVGGMDFSLFKEVFESSKMDFILSHAVYCRDVLKLKKGQRAVISNGRIIGPLEDSELFNQDDFHLLENIILKTSGQKIKSHIQQLRVEEDVASDLVMKVDALLSAQPKGDPRIEYQFFEDRHSAIKLRPKEGETYFDVVAVVDPVTREAQRLAPLLLVLAQLINMNLRVFMNCQSKLSDMPLKSFYRYVLEPEISFTSDNSFAKGPIAKFLDMPQSPLFTLNLNTPESWMVESVRTPYDLDNIYLEEVDSVVAAEYELEYLLLEGHCYDITTGQPPRGLQFTLGTSANPVIVDTIVMANLGYFQLKANPGAWILRLRKGRSEDIYRIYSHDGTDSPPDADEVVIVLNNFKSKIIKVKVQKKADMVNEDLLSDGTSENESGFWDSFKWGFTGQKTEEVKQDKDDIINIFSVASGHLYERFLRIMMLSVLKNTKTPVKFWFLKNYLSPTFKEFIPYMANEYNFQYELVQYKWPRWLHQQTEKQRIIWGYKILFLDVLFPLVVDKFLFVDADQIVRTDLKELRDFNLDGAPYGYTPFCDSRREMDGYRFWKSGYWASHLAGRKYHISALYVVDLKKFRKIAAGDRLRGQYQGLSQDPNSLSNLDQDLPNNMIHQVPIKSLPQEWLWCETWCDDASKKRAKTIDLCNNPMTKEPKLEAAVRIVPEWQDYDQEIKQLQIRFQKEKETGALYKEKTKEPSREGPQKREEL

SEQ ID NO: 1331 - protein, 585 aa, Homo sapiens
MASPGSGFWSFGSEDGSGDSENPGTARAWCQVAQKFTGGIGNKLCALLYGDAEKPAESGGSQPPRAAARKAACACDQKPCSCSKVDVNYAFLHATDLLPACDGERPTLAFLQDVMNILLQYVVKSFDRSTKVIDFHYPNELLQEYNWELADQPQNLEEILMHCQTTLKYAIKTGHPRYFNQLSTGLDMVGLAADWLTSTANTNMFTYEIAPVFVLLEYVTLKKMREIIGWPGGSGDGIFSPGGAISNMYAMMIARFKMFPEVKEKGMAALPRLIAFTSEHSHFSLKKGAAALGIGTDSVILIKCDERGKMIPSDLERRILEAKQKGFVPFLVSATAGTTVYGAFDPLLAVADICKKYKIWMHVDAAWGGGLLMSRKHKWKLSGVERANSVTWNPHKMMGVPLQCSALLVREEGLMQNCNQMHASYLFQQDKHYDLSYDTGDKALQCGRHVDVFKLWLMWRAKGTTGFEAHVDKCLELAEYLYNIIKNREGYEMVFDGKPQHTNVCFWYIPPSLRTLEDNEERMSRLSKVAPVIKARMMEYGTTMVSYQPLGDKVNFFRMVISNPAATHQDIDFLIEEIERLGQDL

SEQ ID NO: 1332 - protein, 859 aa, Homo sapiens
MEIEVSVAECKSVPGITSTPHPMDHPSAFYSPPHNGLLTDHHESLDNDVAREIRYLDEVLEANCCDSAVDGTYNGTSSPEPGAVVLVGGLSPPVHEATQPEPTERTASRQAPPHIELSNSSPDPMAEAERTNGHSPSQPRDALGDSLQVPVSPSSTTSSRCSSRDGEFTLTTLKKEAKFELRAFHEDKKPSKLFEDDEHEKEQYCIRKVRPSEEMLELEKERRELIRSQAVKKNPGIAAKWWNPPQEKTIEEQLDEEHLESHKKYKERKERRAQQEQLLLQKQLQQQQQQPPSQLCTAPASSHERASMIDKAKEDIVTEQIDFSAARKQFQLMENSRQAVAKGQSTPRLFSIKPFYRPLGSVNSDKPLTNPRPPSVGGPPEDSGASAAKGQKSPGALETPSAAGSQGNTASQGKEGPYSEPSKRGPLSKLWAEDGEFTSARAVLTVVKDDDHGILDQFSRSVNVSLTQEELDSGLDELSVRSQDTTVLETLSNDFSMDNISDSGASNETTNALQENSLADFSLPQTPQTDNPSEGRGEGVSKSFSDHGFYSPSSTLGDSPLVDDPLEYQAGLLVQNAIQQAIAEQVDKAVSKTSRDGAEQQGPEATVEEAEAAAFGSEKPQSMFEPPQVSSPVQEKRDVLPKILPAEDRALRERGPPQPLPAVQPSGPINMEETRPEGSYFSKYSEAAELRSTASLLATQESDVMVGPFKLRSRKQRTLSMIEEEIRAAQEREEELKRQRQVLQSTQSPRTKNAPSLPSRTCYKTAPGKIEKVKPPPSPTTEGPSLQPDLAPEEAAGTQRPKNLMQTLMEDYETHKSKRRERMDDSSVLEATRVNRRKSALALRWEAGIYANQEEEDNE

SEQ ID NO: 1333 - protein, 810 aa, Homo sapiens
MIPVTELRYFADTQPAYRILKPWWDVFTDYISIVMLMIAVFGGTLQVTQDKMICLPCKWVTKDSCNDSFRGWAAPGPEPTYPNSTILPTPDTGPTGIKYDLDRHQYNYVDAVCYENRLHWFAKYFPYLVLLHTLIFLACSNFWFKFPRTSSKLEHFVSILLKCFDSPWTTRALSETVVEESDPKPAFSKMNGSMDKKSSTVSEDVEATVPMLQRTKSRIEQGIVDRSETGVLDKKEGEQAKALFEKVKKFRTHVEEGDIVYRLYMRQTIIKVIKFILIICYTVYYVHNIKFDVDCTVDIESLTGYRTYRCAHPLATLFKILASFYISLVIFYGLICMYTLWWMLRRSLKKYSFESIREESSYSDIPDVKNDFAFMLHLIDQYDPLYSKRFAVFLSEVSENKLRQLNLNNEWTLDKLRQRLTKNAQDKLELHLFMLSGIPDTVFDLVELEVLKLELIPDVTIPPSIAQLTGLKELWLYHTAAKIEAPALAFLRENLRALHIKFTDIKEIPLWIYSLKTLEELHLTGNLSAENNRYIVIDGLRELKRLKVLRLKSNLSKLPQVVTDVGVHLQKLSINNEGTKLIVLNSLKKMANLTELELIRCDLERIPHSIFSLHNLQEIDLKDNNLKTIEEIISFQHLHRLTCLKLWYNHIAYIPIQIGNLTNLERLYLNRNKIEKIPTQLFYCRKLRYLDLSHNNLTFLPADIGLLQNLQNLAITANRIETLPPELFQCRKLRALHLGNNVLQSLPSRVGELTNLTQIELRGNRLECLPVELGECPLLKRSGLVVEEDLFNTLPPEVKERLWRADKEQA

SEQ ID NO: 1334 - protein, 2017 aa, Homo sapiens
MTSRTKRRQKVKISISKINHSSYRKEHRPFWEHQPPPHQNWAVGGRCGAGARPGLSQRRGREVRREAQGGASSRRLRARLYFSESTSLPLDRRGSPGPLGPAPHGLRRAAPRGPARRTPRSTALTSRRRAQRPRHGDRLRLRSEARPRAAGDWPCARGGAVRPGRPHRPPRVESARGAHAGRAATDQLERVFLRLGHAETDEQLQNIISKFLPPVLLKLSSTQEGVRKKVMELLVHLNKRIKSRPKIQLPVETLLVQYQDPAAVSFVTNFTIIYVKMGYPRLPVEKQCELAPTLLTAMEGKPQPQQDSLMHLLIPTLFHMKYPVESSKSASPFNLAEKPKTVQLLLDFMLDVLLMPYGYVLNESQSRQNSSSAQGSSSNSGGGSGIPQPPPGMSFYAAKRVIGDNPWTPEQLEQCKLGIVKFIEAEQVPELEAVLHLVIASSDTRHSVATAADLELKSKQSLIDWNNPAIINKMYKVYLGDIPLKTKEGAVLKPELKRDPVSTRVKLKIVPHLLRSRQAAETFPANIQVVYDGLFGTNTNSKLRTLSLQFVHHICITCPEIKIKPLGPMLLNGLTKLINEYKEDPKLLSMAYSAVGKLSSRMPHLFTKDIALVQQLFEALCKEEPETRLAIQEALSMMVGAYSTLEGAQRTLMEALVASYLIKPEVQVRQVAVKFASTVFPSDHIPSRYLLLLAAGDPREEVHGEAQRVLRCLPGRNRKESTSEQMPSFPEMVYYIQEKASHRMKTPVKYMTGTTVLPFNPAAFGEIVLYLRMCLAHSAGVVPTSQSLADMQDHAPAIGRYIRTLMSSGQMAPSSSNKSGETNPVQIYIGLLQQLLAGVGGLPVMYCLLEAVSVYPEKLATKFVDKTEWIKSLMNNSKEEMRELAALFYSVVVSTVSGNELKSMIEQLIKTTKDNHSPEIQHGSLLALGFTVGRYLAKKKMRMSEQQDLERNADTLPDQEELIQSATETIGSFLDSTSPLLAIAACTALGEIGRNGPLPIPSEGSGFTKLHLVESLLSRIPSSKETNKMKERAIQTLGYFPVGDGDFPHQKLLLQGLMDSVEAKQIELQFTIGEAITSAAIGTSSVAARDAWQMTEEEYTPPAGAKVNDVVPWVLDVILNKHIISPNPHVRQAACIWLLSLVRKLSTHKEVKSHLKEIQSAFVSVLSENDELSQDVASKGLGLVYELGNEQDQQELVSTLVETLMTGKRVKHEVSGETVVFQGGALGKTPDGQGLSTYKELCSLASDLSQPDLVYKFMNLANHHAMWNSRKGAAFGFNVIATRAGEQLAPFLPQLVPRLYRYQFDPNLGIRQAMTSIWNALVTDKSMVDKYLKEILQDLVKNLTSNMWRVRESSCLALNDLLRGRPLDDIIDKLPEIWETLFRVQDDIKESVRKAAELALKTLSKVCVKMCDPAKGAAGQRTIAALLPCLLDKGMMSTVTEVRALSINTLVKISKSAGAMLKPHAPKLIPALLESLSVLEPQVLNYLSLRATEQEKAAMDSARLSAAKSSPMMETINMCLQYLDVSVLGELVPRLCELIRSGVGLGTKGGCASVIVSLTTQCPQDLTPYSGKLMSALLSGLTDRNSVIQKSCAFAMGHLVRTSRDSSTEKLLQKLNGWYMEKEEPIYKTSCALTIHAIGRYSPDVLKNHAKEVLPLAFLGMHEIADEEKSEKEECNLWTEVWQENVPGSFGGIRLYLQELITITQKALQSQSWKMKAQGAIAMASIAKQTSSLVPPYLGMILTALLQGLAGRTWAGKEELLKAIACVVTACSAELEKSVPNQPSTNEILQAVLKECSKENVKYKIVAISCAADILKATKEDRFQEFSNIVIPLIKKNSLESSGVRTTKNEEENEKEKELQLEYLLGAFESLGKAWPRNAETQRCYRQELCKLMCERLKLSTWKVQLGVLQSMNAFFQGLMLLEEEHADPEALAEILLETCKSITYSLENKTYSSVRTEALSVIELLLKKLEESKQWECLTSECRVLLIESLATMEPDSRPELQEKAALLKKTLENLE

SEQ ID NO: 1335 - protein, 318 aa, Homo sapiens
MEWENQTILVEFFLKGHSVHPRLELLFFVLIFIMYVVILLGNGTLILISILDPHLHTPMYFFLGNLSFLDICYTTTSIPSTLVSFLSERKTISFSGCAVQMFLGLAMGTTECVLLGMMAFDRYVAICNPLRYPIIMSKNAYVPMAVGSWFAGIVNSAVQTTFVVQLPFCRKNVINHFSCEILAVMKLACADISGNEFLMLVATILFTLMPLLLIVISYSLIISSILKIHSSEGRSKAFSTCSAHLTVVIIFYGTILFMYMKPKSKETLNSDDLDATDKIISMFYGVMTPMMNPLIYSLRNKDVKEAVKHLPNRRFFSK

SEQ ID NO: 1336 - protein, 359 aa, Homo sapiens
MSYRRELEKYRDLDEDEILGALTEEELRTLENELDELDPDNALLPAGLRQKDQTTKAPTGPFKREELLDHLEKQAKEFKDREDLVPYTGEKRGKVWVPKQKPLDPVLESVTLEPELEEALANASDAELCDIAAILGMHTLMSNQQYYQALSSSSIMNKEGLNSVIKPTQYKPVPDEEPNSTDVEETLERIKNNDPKLEEVNLNNIRNIPIPTLKAYAEALKENSYVKKFSIVGTRSNDPVAYALAEMLKENKVLKTLNVESNFISGAGILRLVEALPYNTSLVEMKIDNQSQPLGNKVEMEIVSMLEKNATLLKFGYHFTQQGPRLRASNAMMNNNDLVRKRRLADLTGPIIPKCRSGV

SEQ ID NO: 1337 - protein, 1132 aa, Homo sapiens
MEPDSLLDQDDSYESPQERPGSRRSLPGSLSEKSPSMEPSAATPFRVTGFLSRRLKGSIKRTKSQPKLDRNHSFRHILPGFRSAAAAAADNERSHLMPRLKESRSHESLLSPSSAVEALDLSMEEEVVIKPVHSSILGQDYCFEVTTSSGSKCFSCRSAAERDKWMENLRRAVHPNKDNSRRVEHILKLWVIEAKDLPAKKKYLCELCLDDVLYARTTGKLKTDNVFWGEHFEFHNLPPLRTVTVHLYRETDKKKKKERNSYLGLVSLPAASVAGRQFVEKWYPVVTPNPKGGKGPGPMIRIKARYQTITILPMEMYKEFAEHITNHYLGLCAALEPILSAKTKEEMASALVHILQSTGKVKDFLTDLMMSEVDRCGDNEHLIFRENTLATKAIEEYLKLVGQKYLQDALGEFIKALYESDENCEVDPSKCSAADLPEHQGNLKMCCELAFCKIINSYCVFPRELKEVFASWRQECSSRGRPDISERLISASLFLRFLCPAIMSPSLFNLLQEYPDDRTARTLTLIAKVTQNLANFAKFGSKEEYMSFMNQFLEHEWTNMQRFLLEISNPETLSNTAGFEGYIDLGRELSSLHSLLWEAVSQLEQSIVSKLGPLPRILRDVHTALSTPGSGQLPGTNDLASTPGSGSSSISAGLQKMVIENDLSGLIDFTRLPSPTPENKDLFFVTRSSGVQPSPARSSSYSEANEPDLQMANGGKSLSMVDLQDARTLDGEAGSPAGPDVLPTDGQAAAAQLVAGWPARATPVNLAGLATVRRAGQTPTTPGTSEGAPGRPQLLAPLSFQNPVYQMAAGLPLSPRGLGDSGSEGHSSLSSHSNSEELAAAAKLGSFSTAAEELARRPGELARRQMSLTEKGGQPTVPRQNSAGPQRRIDQPPPPPPPPPPAPRGRTPPNLLSTLQYPRPSSGTLASASPDWVGPSTRLRQQSSSSKGDSPELKPRAVHKQGPSPVSPNALDRTAAWLLTMNAQLLEDEGLGPDPPHRDRLRSKDELSQAEKDLAVLQDKLRISTKKLEEYETLFKCQEETTQKLVLEYQARLEEGEERLRRQQEDKDIQMKGIISRLMSVEEELKKDHAEMQAAVDSKQKIIDAQEKRIASLDAANARLMSALTQLKESMH

SEQ ID NO: 1338 - protein, 584 aa, Homo sapiens
MMENYGNLVSLDVLNRDKDEEPTVKQEIEEIEEEVEPQGVIVTRIKSEIDQDPMGRETFELVGRLDKQRGIFLWEIPRESLTQEQRMFRENTNIIRKRPNSEEKCHKCEECGKGFVRKAHFIQHQRVHTGEKPFQCNECGKSFSRSSFVIEHQRIHTGERPYECNYCGKTFSVSSTLIRHQRIHTGERPYQCNQCKQSFSQRRSLVKHQRIHTGEKPHKCSDCGKAFSWKSHLIEHQRTHTGEKPYHCTKCKKSFSRNSLLVEHQRIHTGERPHKCGECGKAFRLSTYLIQHQKIHTGEKPFLCIECGKSFSRSSFLIEHQRIHTGERPYQCKECGKSFSQLCNLTRHQRIHTGDKPHKCEECGKAFSRSSGLIQHQRIHTREKTYPYNETKESFDPNCSLVIQQEVYPKEKSYKCDECGKTFSVSAHLVQHQRIHTGEKPYLCTVCGKSFSRSSFLIEHQRIHTGERPYLCRQCGKSFSQLCNLIRHQGVHTGNKPHKCDECGKAFSRNSGLIQHQRIHTGEKPYKCEKCDKSFSQQRSLVNHQKIHAEVKTQETHECDACGEAFNCRISLIQHQKLHTAWMQ

SEQ ID NO: 1339 - protein, 1198 aa, Homo sapiens
MPVIPALWEVEMGRSQGQEIETILANRSHSDSTPLPNFLSGSHRPECCTCRLLTASGAQDSLPFGRRLYSGPWRSCEEVCHVSVLSVLSTSCGLSLSLPIFPGWMEWLSPDIALPRRDEWTQTSPARKRITHAKVQGAGQLRLSIDAQDRVLLLHIIEGKGLISKQPGTCDPYVKISLIPEDSRLRHQKTQTVPDCRDPAFHEHFFFPVQEEDDQKRLLVTVWNRASQSRQSGLIGCMSFGVKSLLTPDKEISGWYYLLGEHLGRTKHLKVARRRLRPLRDPLLRMPGGGDTENGKKLKITIPRGKDGFGFTICCDSPVRVQAVDSGGPAERAGLQQLDTVLQLNERPVEHWKCVELAHEIRSCPSEIILLVWRMVPQVKPGPDGGVLRRASCKSTHDLQSPPNKREKNCTHGVQARPEQRHSCHLVCDSSDGLLLGGWERYTEVAKRGGQHTLPALSRATAPTDPNYIILAPLNPGSQLLRPVYQEDTIPEESGSPSKGKSYTGLGKKSRLMKTVQTMKGHGNYQNCPVVRPHATHSSYGTYVTLAPKVLVFPVFVQPLDLCNPARTLLLSEELLLYEGRNKAAEVTLFAYSDLLLFTKEDEPGRCDVLRNPLYLQSVKLQEGSSEDLKFCVLYLAEKAECLFTLEAHSQEQKKRVCWCLSENIAKQQQLAASPPDSKMFETEADEKREMALEEGKGPGAEDSPPSKEPSPGQELPPGQDLPPNKDSPSGQEPAPSQEPLSSKDSATSEGSPPGPDAPPSKDVPPCQEPPPAQDLSPCQDLPAGQEPLPHQDPLLTKDLPAIQESPTRDLPPCQDLPPSQVSLPAKALTEDTMSSGDLLAATGDPPAAPRPAFVIPEVRLDSTYSQKAGAEQGCSGDEEDAEEAEEVEEGEEGEEDEDEDTSDDNYGERSEAKRSSMIETGQGAEGGLSLRVQNSLRRRTHSEGSLLQEPRGPCFASDTTLHCSDGEGAASTWGMPSPSTLKKELGRNGGSMHHLSLFFTGHRKMSGADTVGDDDEASRKRKSKNLAKDMKNKLGIFRRRNESPGAPPAGKADKMMKSFKPTSEEALKWGESLEKLLVHKYGLAVFQAFLRTEFSEENLEFWLACEDFKKVKSQSKMASKAKKIFAEYIAIQACKEVNLDSYTREHTKDNLQSVTRGCFDLAQKRIFGLMEKDSYPRFLRSDLYLDLINQKKMSPPL

SEQ ID NO: 1340 - protein, 418 aa, Homo sapiens
MIQLTATPVSALVDEPVHIRATGLIPFQMVSFQASLEDENGDMFYSQAHYRANEFGEVDLNHASSLGGDYMGVHPMGLFWSLKPEKLLTRLLKRDVMNRPFQVQVKLYDLELIVNNKVASAPKASLTLERWYVAPGVTRIKVREGRLRGALFLPPGEGLFPGVIDLFGGLGGLLEFRASLLASRGFASLALAYHNYEDLPRKPEVTDLEYFEEAANFLLRHPKVFGSGVGVVSVCQGVQIGLSMAIYLKQVTATVLINGTNFPFGIPQVYHGQIHQPLPHSAQLISTNALGLLELYRTFETTQVGASQYLFPIEEAQGQFLFIVGEGDKTINSKAHAEQAIGQLKRHGKNNWTLLSYPGAGHLIEPPYSPLCCASTTHDLRLHWGGEVIPHAAAQEHAWKEIQRFLRKHLIPDVTSQL

SEQ ID NO: 1341 - protein, 941 aa, Homo sapiens
MASPRSSGQPGPPPPPPPPPARLLLLLLLPLLLPLAPGAWGWARGAPRPPPSSPPLSIMGLMPLTKEVAKGSIGRGVLPAVELAIEQIRNESLLRPYFLDLRLYDTECDNAKGLKAFYDAIKYGPNHLMVFGGVCPSVTSIIAESLQGWNLVQLSFAATTPVLADKKKYPYFFRTVPSDNAVNPAILKLLKHYQWKRVGTLTQDVQRFSEVRNDLTGVLYGEDIEISDTESFSNDPCTSVKKLKGNDVRIILGQFDQNMAAKVFCCAYEENMYGSKYQWIIPGWYEPSWWEQVHTEANSSRCLRKNLLAAMEGYIGVDFEPLSSKQIKTISGKTPQQYEREYNNKRSGVGPSKFHGYAYDGIWVIAKTLQRAMETLHASSRHQRIQDFNYTDHTLGRIILNAMNETNFFGVTGQVVFRNGERMGTIKFTQFQDSREVKVGEYNAVADTLEIINDTIRFQGSEPPKDKTIILEQLRKISLPLYSILSALTILGMIMASAFLFFNIKNRNQKLIKMSSPYMNNLIILGGMLSYASIFLFGLDGSFVSEKTFETLCTVRTWILTVGYTTAFGAMFAKTWRVHAIFKNVKMKKKIIKDQKLLVIVGGMLLIDLCILICWQAVDPLRRTVEKYSMEPDPAGRDISIRPLLEHCENTHMTIWLGIVYAYKGLLMLFGCFLAWETRNVSIPALNDSKYIGMSVYNVGIMCIIGAAVSFLTRDQPNVQFCIVALVIIFCSTITLCLVFVPKLITLRTNPDAATQNRRFQFTQNQKKEDSKTSTSVTSVNQASTSRLEGLQSENHRLRMKITELDKDLEEVTMQLQDTPEKTTYIKQNHYQELNDILNLGNFTESTDGGKAILKNHLDQNPQLQWNTTEPSRTCKDPIEDINSPEHIQRRLSLQLPILHHAYLPSIGGVDASCVSPCVSPTASPRHRHVPPSFRVMVSGL

SEQ ID NO: 1342 - protein, 484 aa, Homo sapiens
MDLGKDQSHLKHHQTPDPHQEENHSPEVIGTWSLRNRELLRKRKAEVHEKETSQWLFGEQKKRKQQRTGKGNRRGRKRQQNTELKVEPQPQIEKEIVEKALAPIEKKTEPPGSITKVFPSVASPQKVVPEEHFSEICQESNIYQENFSEYQEIAVQNHSSETCQHVSEPEDLSPKMYQEISVLQDNSSKICQDMKEPEDNSPNTCQVISVIQDHPFKMYQDMAKREDLAPKMCQEAAVPKILPCPTSEDTADLAGCSLQAYPKPDVPKGYILDTDQNPAEPEEYNETDQGIAETEGLFPKIQEIAEPKDLSTKTHQESAEPKYLPHKTCNEIIVPKAPSHKTIQETPHSEDYSIEINQETPGSEKYSPETYQEIPGLEEYSPEIYQETSQLEEYSPEIYQETPGPEDLSTETYKNKDVPKECFPEPHQETGGPQGQDPKAHQEDAKDAYTFPQEMKEKPKEEPGIPAILNESHPENDVYSYVLF

SEQ ID NO: 1343 - protein, 334 aa, Homo sapiens
MNLSLVLAAFCLGIASAVPKFDQNLDTKWYQWKATHRRLYGANEEGWRRAVWEKNMKMIELHNGEYSQGKHGFTMAMNAFGDMTNEEFRQMMGCFRNQKFRKGKVFREPLFLDLPKSVDWRKKGYVTPVKNQKQCGSCWAFSATGALEGQMFRKTGKLVSLSEQNLVDCSRPQGNQGCNGGFMARAFQYVKENGGLDSEESYPYVAVDEICKYRPENSVANDTGFTVVAPGKEKALMKAVATVGPISVAMDAGHSSFQFYKSGIYFEPDCSSKNLDHGVLVVGYGFEGANSNNSKYWLVKNSWGPEWGSNGYVKIAKDKNNHCGIATAASYPNV

SEQ ID NO: 1344 - protein, 915 aa, Homo sapiens
MARRSSFQSCQIISLFTFAVGVNICLGFTAHRIKRAEGWEEGPPTVLSDSPWTNISGSCKGRCFELQEAGPPDCRCDNLCKSYTSCCHDFDELCLKTARGWECTKDRCGEVRNEENACHCSEDCLARGDCCTNYQVVCKGESHWVDDDCEEIKAAECPAGFVRPPLIIFSVDGFRASYMKKGSKVMPNIEKLRSCGTHSPYMRPVYPTKTFPNLYTLATGLYPESHGIVGNSMYDPVFDATFHLRGREKFNHRWWGGQPLWITATKQGVKAGTFFWSVVIPHERRILTILQWLTLPDHERPSVYAFYSEQPDFSGHKYGPFGPEESSYGSPFTPAKRPKRKVAPKRRQERPVAPPKKRRRKIHRMDHYAAETRQDKMTNPLREIDKIVGQLMDGLKQLKLHRCVNVIFVGDHGMEDVTCDRTEFLSNYLTNVDDITLVPGTLGRIRSKFSNNAKYDPKAIIANLTCKKPDQHFKPYLKQHLPKRLHYANNRRIEDIHLLVERRWHVARKPLDVYKKPSGKCFFQGDHGFDNKVNSMQTVFVGYGSTFKYKTKVPPFENIELYNVMCDLLGLKPAPNNGTHGSLNHLLRTNTFRPTMPEEVTRPNYPGIMYLQSDFDLGCTCDDKVEPKNKLDELNKRLHTKGSTEERHLLYGRPAVLYRTRYDILYHTDFESGYSEIFLMPLWTSYTVSKQAEVSSVPDHLTSCVRPDVRVSPSFSQNCLAYKNDKQMSYGFLFPPYLSSSPEAKYDAFLVTNMVPMYPAFKRVWNYFQRVLVKKYASERNGVNVISGPIFDYDYDGLHDTEDKIKQYVEGSSIPVPTHYYSIITSCLDFTQPADKCDGPLSVSSFILPHRPDNEESCNSSEDESKWVEELMKMHTARVRDIEHLTSLDFFRKTSRSYPEILTLKTYLHTYESEI

SEQ ID NO: 1345 - protein, 257 aa, Homo sapiens
MPLNVSFTNRNYDLDYDSVQPYFYCDEEENFYQQQQQSELQPPAPSEDIWKKFELLPTPPLSPSRRSGLCSPSYVAVTPFSLRGDNDGGGGSFSTADQLEMVTELLGGDMVNQSFICDPDDETFIKNIIIQDCMWSGFSAAAKLVSEKLASYQAARKDSGSPNPARGHSVCSTSSLYLQDLSAAASECIDPSVVFPYPLNDSSSPKSCASQDSSAFSPSSDSLLSSTESSPQGSPEPLVLHEETPPTTSSDSGGTRR

SEQ ID NO: 1346 - protein, 1105 aa, Homo sapiens
MAATASAGVPATVSEKQEFYQLLKNLINPSCMVRRQAEEIYENIPGLCKTTFLLDAVRNRRAGYEVRQMAAALLRRLLSSGFEEVYPNLPADVQRDVKIELILAVKLETHASMRKKLCDIFAVLARNLIDEDGTNHWPEGLKFLIDSIYSKNVVLWEVALHVFWHFPGIFGTQERHDLDIIKRLLDQCIQDQEHPAIRTLSARAAAAFVLANENNIALFKDFADLLPGILQAVNDSCYQDDDSVLESLVEIADTVPKYLGPYLEDTLQLSLKLCGDSRLSNLQRQLALEVIVTLSETATPMLKKHTNIIAQAVPHILAMMVDLQDDEDWVNADEMEEDDFDSNAVAAESALDRLACGLGGKVVLPMTKEHIMQMLQSPDWKYRHAGLMALSAIGEGCHQQMESILDETVNSVLLFLQDPHPRVRAAACTTLGQMATDFAPNFQKKFHETVIAALLRTMENQGNQRVQSHAASALIIFIEDCPKSLLVLYVDSMVKNLHSVLVIKLQELIRNGTKLALEQLVTTIASVADTIEEKFVPYYDIFMPSLKHIVELAVQKELKLLRGKTIECISHIGLAVGKEKFMQDASNVMQLLLKTQSDLNNMEDDDPQTSYMVSAWARMCKILGKDFQQYLPLVIEPLIKTASAKPDVALLDTQDVENMSDDDGWQFVNLGDQQSFGIKTSGLEAKATACQMLVYYAKELREGFVEYTEQVVKLMVPLLKFYFHDNVRVAAAESMPFLLECARIRGPEYLAQMWQFICDPLIKAIGTEPDTDVLSEIMNSFAKSIEVMGDGCLNDEHLEELGGILKAKLEGHFKNQELRQVKRQEENYDQQVEMSLQDEDECDVYILTKVSDILHSLFSTYKEKILPWFEQLLPLIVNLICSSRPWPDRQWGLCIFDDIIEHCSPTSFKYVEYFRWPMLLNMRDNNPEVRQAAAYGLGVMAQFGGDDYRSLCSEAVPLLVKVIKCANSKTKKNVIATENCISAIGKILKFKPNCVNVDEVLPHWLSWLPLHEDKEEAIQTLSFLCDLIESNHPVVIGPNNSNLPKIISIIAEGKINETINYEDPCAKRLANVVRQVQTSEDLWLECVSQLDDEQQEALQELLNFA

SEQ ID NO: 1347 - protein, 196 aa, Homo sapiens
MNQADPRLRAVCLWTLTSAAMSRGDNCTDLLALGIPSITQAWGLWVLLGAVTLLFLISLAAHLSQWTRGRSRSHPGQGRSGESVEEVPLYGNLHYLQTGRLSQDPEPDQQDPTLGGPARAAEEVMCYTSLQLRPPQGRIPGPGTPVKYSEVVLDSEPKSQASGPEPELYASVCAQTRRARASFPDQAYANSQPAAS

SEQ ID NO: 1348 - protein, 1068 aa, Homo sapiens
MLVGSQSFSPGGPNGIIRSQSFAGFSGLQERRSRCNSFIENSSALKKPQAKLKKMHNLGHKNNNPPKEPQPKRVEEVYRALKNGLDEYLEVHQTELDKLTAQLKDMKRNSRLGVLYDLDKQIKTIERYMRRLEFHISKVDELYEAYCIQRRLQDGASKMKQAFATSPASKAARESLTEINRSFKEYTENMCTIEVELENLLGEFSIKMKGLAGFARLCPGDQYEIFMKYGRQRWKLKGKIEVNGKQSWDGEETVFLPLIVGFISIKVTELKGLATHILVGSVTCETKELFAARPQVVAVDINDLGTIKLNLEITWYPFDVEDMTASSGAGNKAAALQRRMSMYSQGTPETPTFKDHSFFRWLHPSPDKPRRLSVLSALQDTFFAKLHRSRSFSDLPSLRPSPKAVLELYSNLPDDIFENGKAAEEKMPLSLSFSDLPNGDCALTSHSTGSPSNSTNPEITITPAEFNLSSLASQNEGMDDTSSASSRNSLGEGQEPKSHLKEEDPEEPRKPASAPSEACRRQSSGAGAEHLFLENDVAEALLQESEEASELKPVELDTSEGNITKQLVKRLTSAEVPMATDRLLSEGSVGGESEGCRSFLDGSLEDAFNGLLLALEPHKEQYKEFQDLNQEVMNLDDILKCKPAVSRSRSSSLSLTVESALESFDFLNTSDFDEEEDGDEVCNVGGGADSVFSDTETEKHSYRSVHPEARGHLSEALTEDTGVGTSVAGSPLPLTTGNESLDITIVRHLQYCTQLVQQIVFSSKTPFVARSLLEKLSRQIQVMEKLAAVSDENIGNISSVVEAIPEFHKKLSLLSFWTKCCSPVGVYHSPADRVMKQLEASFARTVNKEYPGLADPVFRTLVSQILDRAEPLLSSSLSSEVVTVFQYYSYFTSHGVSDLESYLSQLARQVSMVQTLQSLRDEKLLQTMSDLAPSNLLAQQEVLRTLALLLTREDNEVSEAVTLYLAAASKNQHFREKALLYYCEALTKTNLQLQKAACLALKILEATESIKMLVTLCQSDTEEIRNVASETLLSLGEDGRLAYEQLDKFPRDCVKVGGRHGTEVATAF

SEQ ID NO: 1349 - protein, 260 aa, Homo sapiens
MGPRARPALLLLMLLQTAVLQGRLLQSHTLQVILGCEMQEDNSTEGYWKYGYDGQDHLEFCPDTLDWRAAEPRAWPTKLEWERHKIRARQNRAYLERDCPAQLQQLLELGRGVLDQQVPPLVKVTHHVTSSVTTLRCRALNYYPQNITMKWLKDKQPMDAKEFEPKDVLPNGDGTYQGWITLAVPPGEEQRYTCQVEHPGLDQPLIVIWEPSPSGTLVIGVISGIAVFVVILFIGILFIILRKRQGSRGAMGHYVLAERE

SEQ ID NO: 1350 - protein, 637 aa, Homo sapiens
MEVTGFGVTRPGKVPQARMSGLVLGQRDEPAGHRLSQEEILGSTRLVSQGLEALRSEHQAVLQSLSQTIECLQQGGHEEGLVHEKARQLRRSMENIELGLSEAQVMLALASHLSTVESEKQKLRAQVRRLCQENQWLRDELAGTQQRLQRSEQAVAQLEEEKKHLEFLGQLRQYDEDGHTSEEKEGDATKDSLDDLFPNEEEEDPSNGLSRGQGATAAQQGGYEIPARLRTLHNLVIQYAAQGRYEVAVPLCKQALEDLERTSGRGHPDVATMLNILALVYRDQNKYKEAAHLLNDALSIRESTLGPDHPAVAATLNNLAVLYGKRGKYKEAEPLCQRALEIREKVLGTNHPDVAKQLNNLALLCQNQGKYEAVERYYQRALAIYEGQLGPDNPNVARTKNNLASCYLKQGKYAEAETLYKEILTRAHVQEFGSVDDDHKPIWMHAEEREEMSKSRHHEGGTPYAEYGGWYKACKVSSPTVNTTLRNLGALYRRQGKLEAAETLEECALRSRRQGTDPISQTKVAELLGESDGRRTSQEGPGDSVKFEGGEDASVAVEWSGDGSGTLQRSGSLGKIRDVLRRSSELLVRKLQGTEPRPSSSNMKRAASLNYLNQPSAAPLQVSRGLSASTMDLSSSS

SEQ ID NO: 1351 - protein, 1805 aa, Homo sapiens
MSDTKVKVAVRVRPMNRRELELNTKCVVEMEGNQTVLHPPPSNTKQGERKPPKVFAFDYCFWSMDESNTTKYAGQEVVFKCLGEGILEKAFQGYNACIFAYGQTGSGKSFSMMGHAEQLGLIPRLCCALFKRISLEQNESQTFKVEVSYMEIYNEKVRDLLDPKGSRQSLKVREHKVLGPYVDGLSQLAVTSFEDIESLMSEGNKSRTVAATNMNEESSRSHAVFNIIITQTLYDLQSGNSGEKVSKVSLVDLAGSERVSKTGAAGERLKEGSNINKSLTTLGLVISSLADQAAGKGKSKFVPYRDSVLTWLLKDNLGGNSQTSMIATISPAADNYEETLSTLRYADRAKRIVNHAVVNEDPNAKVIRELREEVEKLREQLSQAEAMKAPELKEKLEESEKLIKELTVTWEEKLRKTEEIAQERQRQLESMGISLEMSGIKVGDDKCYLVNLNADPALNELLVYYLKDHTRVGADTSQDIQLFGIGIQPQHCEIDIASDGDVTLTPKENARSCVNGTLVCSTTQLWHGDRILWGNNHFFRINLPKRKRRDWLKDFEKETGPPEHDLDAASEASSEPDYNYEFAQMEVIMKTLNSNDPVQNVVQVLEKQYLEEKRSALEEQRLMYERELEQLRQQLSPDRQPQSSGPDRLAYSSQTAQQKVTQWAEERDELFRQSLAKLREQLVKANTLVREANFLAEEMSKLTDYQVTLQIPAANLSANRKRGAIVSEPAIQVRRKGKSTQVWTIEKLENKLIDMRDLYQEWKEKVPEAKRLYGKRGDPFYEAQENHNLIGVANVFLECLFCDVKLQYAVPIISQQGEVAGRLHVEVMRVTGAVPERVVEDDSSENSSESGSLEVVDSSGEIIHRVKKLTCRVKIKEATGLPLNLSNFVFCQYTFWDQCESTVAAPVVDPEVPSPQSKDAQYTVTFSHCKDYVVNVTEEFLEFISDGALAIEVWGHRCAGNGSSIWEVDSLHAKTRTLHDRWNEVTRRIEMWISILELNELGEYAAVELHQAKDVNTGGIFQLRQGHSRRVQVTVKPVQHSGTLPLMVEAILSVSIGCVTARSTKLQRGLDSYQRDDEDGDDMDSYQEEDLNCVRERWSDALIKRREYLDEQIKKVSNKTEKTEDDVEREAQLVEQWVGLTEERNAVLVPAPGSGIPGAPADWIPPPGMETHIPVLFLDLNADDLSANEQLVGPHASGVNSILPKEHGSQFFYLPIIKHSDDEVSATASWDSSVHDSVHLNRVTPQNERIYLIVKTTVQLSHPAAMELVLRKRIAANIYNKQSFTQSLKRRISLKNIFYSCGVTYEIVSNIPKATEEIEDRETLALLAARSENEGTSDGETYIEKYTRGVLQVENILSLERLRQAVTVKEALSTKARHIRRSLSTPNVHNVSSSRPDLSGFDEDDKGWPENQLDMSDYSSSYQDVACYGTLPRDSPRRNKEGCTSETPHALTVSPFKAFSPQPPKFFKPLMPVKEEHKKRIALEARPLLSQESMPPPQAHNPGCIVPSGSNGSSMPVEHNSKREKKIDSEEEENELEAINRKLISSQPYVPVEFADFSVYNASLENREWFSSKVDLSNSRVLEKEVSRSPTTSSITSGYFSHSASNATLSDMVVPSSDSSDQLAIQTKDADSTEHSTPSLVHDFRPSSNKELTEVEKGLVKDKIIVVPLKENSALAKGSPSSQSIPEKNSKSLCRTGSCSELDACPSKISQPARGFCPREVTVEHTTNILEDHSFTEFMGVSEGKDFDGLTDSSAGELSSRRSLPNKTGGKTVSDGLHHPSQLHSKLENDQVIIPEAAFWVLCCQ

SEQ ID NO: 1352 - protein, 345 aa, Homo sapiens
MPRIDADLKLDFKDVLLRPKRSSLKSRAEVDLERTFTFRNSKQTYSGIPIIVANMDTVGTFEMAAVMSQHSMFTAIHKHYSLDDWKLFATNHPECLQNVAVSSGSGQNDLEKMTSILEAVPQVKFICLDVANGYSEHFVEFVKLVRAKFPEHTIMAGNVVTGEMVEELILSGADIIKVGVGPGSVCTTRTKTGVGYPQLSAVIECADSAHGLKGHIISDGGCTCPGDVAKAFGAGADFVMLGGMFSGHTECAGEVFERNGRKLKLFYGMSSDTAMNKHAGGVAEYRASEGKTVEVPYKGDVENTILDILGGLRSTCTYVGAAKLKELSRRATFIRVTQQHNTVFS

SEQ ID NO: 1353 - protein, 832 aa, Homo sapiens
MLPFLLATLGTTALNNSNPKDYCYSARIRSTVLQGLPFGGVPTVLALDFMCFLALLFLFSILRKVAWDYGRLALVTDADRLRRQERDRVEQEYVASAMHGDSHDRYERLTSVSSSVDFDQRDNGFCSWLTAIFRIKDDEIRDKCGGDAVHYLSFQRHIIGLLVVVGVLSVGIVLPVNFSGDLLENNAYSFGRTTIANLKSGNNLLWLHTSFAFLYLLLTVYSMRRHTSKMRYKEDDLVKRTLFINGISKYAESEKIKKHFEEAYPNCTVLEARPCYNVARLMFLDAERKKAERGKLYFTNLQSKENVPTMINPKPCGHLCCCVVRGCEQVEAIEYYTKLEQKLKEDYKREKEKVNEKPLGMAFVTFHNETITAIILKDFNVCKCQGCTCRGEPRPSSCSESLHISNWTVSYAPDPQNIYWEHLSIRGFIWWLRCLVINVVLFILLFFLTTPAIIITTMDKFNVTKPVEYLNNPIITQFFPTLLLWCFSALLPTIVYYSAFFEAHWTRSGENRTTMHKCYTFLIFMVLLLPSLGLSSLDLFFRWLFDKKFLAEAAIRFECVFLPDNGAFFVNYVIASAFIGNAMDLLRIPGLLMYMIRLCLARSAAERRNVKRHQAYEFQFGAAYAWMMCVFTVVMTYSITCPIIVPFGLMYMLLKHLVDRYNLYYAYLPAKLDKKIHSGAVNQVVAAPILCLFWLLFFSTMRTGFLAPTSMFTFVVLVITIVICLCHVCFGHFKYLSAHNYKIEHTETDTVDPRSNGRPPTAAAVPKSAKYIAQVLQDSEVDGDGDGAPGSSGDEPPSSSSQDEELLMPPDALTDTDFQSCEDSLIENEIHQ

SEQ ID NO: 1354 - protein, 492 aa, Homo sapiens
MGSCCSCLNRDSVPDNHPTKFKVTNVDDEGVELGSGVMELTQSELVLHLHRREAVRWPYLCLRRYGYDSNLFSFESGRRCQTGQGIFAFKCSRAEEIFNLLQDLMQCNSINVMEEPVIITRNSHPAELDLPRAPQPPNALGYTVSSFSNGCPGEGPRFSAPRRLSTSSLRHPSLGEESTHALIAPDEQSHTYVNTPASEDDHRRGRHCLQPLPEGQAPFLPQARGPDQRDPQVFLQPGQVKFVLGPTPARRHMVKCQGLCPSLHDPPHHNNNNEAPSECPAQPKCTYENVTGGLWRGAGWRLSPEEPGWNGLAHRRAALLHYENLPPLPPVWESQAQQLGGEAGDDGDSRDGLTPSSNGFPDGEEDETPLQKPTSTRAAIRSHGSFPVPLTRRRGSPRVFNFDFRRPGPEPPRQLNYIQVELKGWGGDRPKGPQNPSSPQAPMPTTHPARSSDSYAVIDLKKTVAMSNLQRALPRDDGTARKTRHNSTDLPL

SEQ ID NO: 1355 - protein, 1321 aa, Homo sapiens
MQCLAAALKDETNMSGGGEQADILPANYVVKDRWKVLKKIGGGGFGEIYEAMDLLTRENVALKVESAQQPKQVLKMEVAVLKKLQGKDHVCRFIGCGRNEKFNYVVMQLQGRNLADLRRSQPRGTFTLSTTLRLGKQILESIEAIHSVGFLHRDIKPSNFAMGRLPSTYRKCYMLDFGLARQYTNTTGDVRPPRNVAGFRGTVRYASVNAHKNREMGRHDDLWSLFYMLVEFAVGQLPWRKIKDKEQVGMIKEKYEHRMLLKHMPSEFHLFLDHIASLDYFTKPDYQLIMSVFENSMKERGIAENEAFDWEKAGTDALLSTSTSTPPQQNTRQTAAMFGVVNVTPVPGDLLRENTEDVLQGEHLSDQENAPPILPGRPSEGLGPSPHLVPHPGGPEAEVWEETDVNRNKLRINIGKSPCVEEEQSRGMGVPSSPVRAPPDSPTTPVRSLRYRRVNSPESERLSTADGRVELPERRSRMDLPGSPSRQACSSQPAQMLSVDTGHADRQASGRMDVSASVEQEALSNAFRSVPLAEEEDFDSKEWVIIDKETELKDFPPGAEPSTSGTTDEEPEELRPLPEEGEERRRLGAEPTVRPRGRSMQALAEEDLQHLPPQPLPPQLSQGDGRSETSQPPTPGSPSHSPLHSGPRPRRRESDPTGPQRQVFSVAPPFEVNGLPRAVPLSLPYQDFKRDLSDYRERARLLNRVRRVGFSHMLLTTPQVPLAPVQPQANGKEEEEEEEEDEEEEEEDEEEEEEEEEEEEEEEEEEEEEEEAAAAVALGEVLGPRSGSSSEGSERSTDRSQEGAPSTLLADDQKESRGRASMADGDLEPEEGSKTLVLVSPGDMKKSPVTAELAPDPDLGTLAALTPQHERPQPTGSQLDVSEPGTLSSVLKSEPKPPGPGAGLGAGTVTTGVGGVAVTSSPFTKVERTFVHIAEKTHLNVMSSGGQALRSEEFSAGGELGLELASDGGAVEEGARAPLENGLALSGLNGAEIEGSALSGAPRETPSEMATNSLPNGPALADGPAPVSPLEPSPEKVATISPRRHAMPGSRPRSRIPVLLSEEDTGSEPSGSLSAKERWSKRARPQQDLARLVMEKRQGRLLLRLASGASSSSSEEQRRASETLSGTGSEEDTPASEPAAALPRKSGRAAATRSRIPRPIGLRMPMPVAAQQPASRSHGAAPALDTAITSRLQLQTPPGSATAADLRPKQPPGRGLGPGRAQAGARPPAPRSPRLPASTSAARNASASPRSQSLSRRESPSPSHQARPGVPPPRGVPPARAQPDGTPSPGGSKKGPRGKLQAQRATTKGRAGGAEGRAGAR

SEQ ID NO: 1356 - protein, 476 aa, Homo sapiens
MWTGYKILIFSYLTTEIWMEKQYLSQREVDLEAYFTRNHTVLQGTRFKRAIFQGQYCRNFGCCEDRDDGCVTEFYAANALCYCDKFCDRENSDCCPDYKSFCREEKEWPPHTQPWYPEGCFKDGQHYEEGSVIKENCNSCTCSGQQWKCSQHVCLVRSELIEQVNKGDYGWTAQNYSQFWGMTLEDGFKFRLGTLPPSPMLLSMNEMTASLPATTDLPEFFVASYKWPGWTHGPLDQKNCAASWAFSTASVAADRIAIQSKGRYTANLSPQNLISCCAKNRHGCNSGSIDRAWWYLRKRGLVSHACYPLFKDQNATNNGCAMASRSDGRGKRHATKPCPNNVEKSNRIYQCSPPYRVSSNETEIMKEIMQNGPVQAIMQVREDFFHYKTGIYRHVTSTNKESEKYRKLQTHAVKLTGWGTLRGAQGQKEKFWIAANSWGKSWGENGYFRILRGVNESDIEKLIIAAWGQLTSSDEP

SEQ ID NO: 1357 - protein, 671 aa, Homo sapiens
MQPDMSLNVIKMKSSDFLESAELDSGGFGKVSLCFHRTQGLMIMKTVYKGPNCIEHNEALLEEAKMMNRLRHSRVVKLLGVIIEEGKYSLVMEYMEKGNLMHVLKAEMSTPLSVKGRIILEIIEGMCYLHGKGVIHKDLKPENILVDNDFHIKIADLGLASFKMWSKLNNEEHNELREVDGTAKKNGGTLYYMAPEHLNDVNAKPTEKSDVYSFAVVLWAIFANKEPYENAICEQQLIMCIKSGNRPDVDDITEYCPREIISLMKLCWEANPEARPTFPGIEEKFRPFYLSQLEESVEEDVKSLKKEYSNENAVVKRMQSLQLDCVAVPSSRSNSATEQPGSLHSSQGLGMGPVEESWFAPSLEHPQEENEPSLQSKLQDEANYHLYGSRMDRQTKQQPRQNVAYNREEERRRRVSHDPFAQQRPYENFQNTEGKGTAYSSAASHGNAVHQPSGLTSQPQVLYQNNGLYSSHGFGTRPLDPGTAGPRVWYRPIPSHMPSLHNIPVPETNYLGNTPTMPFSSLPPTDESIKYTIYNSTGIQIGAYNYMEIGGTSSSLLDSTNTNFKEEPAAKYQAIFDNTTSLTDKHLDPIRENLGKHWKNCARKLGFTQSQIDEIDHDYERDGLKEKVYQMLQKWVMREGIKGATVGKLAQALHQCSRIDLLSSLIYVSQN

SEQ ID NO: 1358 - protein, 325 aa, Homo sapiens
MQGRVAGSCAPLGLLLVCLHLPGLFARSIGVVEEKVSQNLGTNLPQLGQPSSTGPSNSEHPQPALDPRSNDLARVPLKLSVPASDGFPPAGGSAVQRWPPSWGLPAMDSWPPEDPWQMMAAAAEDRLGEALPEELSYLSSAAALAPGSGPLPGESSPDATGLSPKASLLHQDSESRRLPRSNSLGAGGKILSQRPPWSLIHRVLPDHPWGTLNPSVSWGGGGPGTGWGTRPMPHPEGIWGINNQPPGTSWGNINRYPGGSWGNINRYPGGSWGNINRYPGGSWGNIHLYPGINNPFPPGVLRPPGSSWNIPAGFPNPPSPRLQWG

SEQ ID NO: 1359 - protein, 258 aa, Homo sapiens
MAASVLNTVLRRLPMLSLFRGSHRVQVPLQTLCTKAPSEEDSLSSVPISPYKDEPWKYLESEEYQERYGSRPVWADYRRNHKGGVPPQRTRKTCIRRNKVVGNPCPICRDHKLHVDFRNVKLLEQFVCAHTGIIFYAPYTGVCVKQHKRLTQAIQKARDHGLLIYHIPQVEPRDLDFSTSHGAVSATPPAPTLVSGDPWYPWYNWKQPPERELSRLRRLYQGHLQEESGPPPESMPKMPPRTPAEASSTGQTGPQSAL

SEQ ID NO: 1360 - protein, 809 aa, Homo sapiens
MYEALPGPAPENEDGLVKVKEEDPTWEQVCNSQEGSSHTQEICRLRFRHFCYQEAHGPQEALAQLRELCHQWLRPEMHTKEQIMELLVLEQFLTILPKELQPCVKTYPLESGEEAVTVLENLETGSGDTGQQASVYIQGQDMHPMVAEYQGVSLECQSLQLLPGITTLKCEPPQRPQGNPQEVSGPVPHGSAHLQEKNPRDKAVVPVFNPVRSQTLVKTEEETAQAVAAEKWSHLSLTRRNLCGNSAQETVMSLSPMTEEIVTKDRLFKAKQETSEEMEQSGEASGKPNRECAPQIPCSTPIATERTVAHLNTLKDRHPGDLWARMHISSLEYAAGDITRKGRKKDKARVSELLQGLSFSGDSDVEKDNEPEIQPAQKKLKVSCFPEKSWTKRDIKPNFPSWSALDSGLLNLKSEKLNPVELFELFFDDETFNLIVNETNNYASQKNVSLEVTVQEMRCVFGVLLLSGFMRHPRREMYWEVSDTDQNLVRDAIRRDRFELIFSNLHFADNGHLDQKDKFTKLRPLIKQMNKNFLLYAPLEEYYCFDKSMCECFDSDQFLNGKPIRIGYKIWCGTTTQGYLVWFEPYQEESTMKVDEDPDLGLGGNLVMNFADVLLERGQYPYHLCFDSFFTSVKLLSALKKKGVRATGTIRENRTEKCPLMNVEHMKKMKRGYFDFRIEENNEIILCRWYGDGIISLCSNAVGIEPVNEVSCCDADNEEIPQISQPSIVKVYDECKEGVAKMDQIISKYRVRIRSKKWYSILVSYMIDVAMNNAWQLHRACNPGASLDPLDFRRFVAHFYLEHNAHLSD

SEQ ID NO: 1361 - protein, 413 aa, Homo sapiens
MAEGPEEARGHPPGQDDGGGDHEPVPSLRGPPTTAVPCPRDDPQAEPQAPGRPTAPGLAAAAAADKLEPPRELRKRGEAASGSGAELQEQAGCEAPEAAAPRERPARLSAREYSRQVHEWLWQSYCGYLTWHSGLAAFPAYCSPQPSPQSFPSGGAAVPQAAAPPPPQLGYYNPFYFLSPGAAGPDPRTAAGISTPAPVAGLGPRAPHVQASVRATPVTRVGSAAPSRSPSETGRQAGREYVIPSLAHRFMAEMVDFFILFFIKATIVLSIMHLSGIKDISKFAMHYIIEEIDEDTSMEDLQKMMVVALIYRLLVCFYEIICIWGAGGATPGKFLLGLRVVTCDTSVLIAPSRVLVIPSSNVSITTSTIRALIKNFSIASFFPAFITLLFFQHNRTAYDIVAGTIVVKRNGVR

SEQ ID NO: 1362 - protein, 1143 aa, Homo sapiens
MHVMNCVSLVSDKENGNIATAPGFMIGQTPPPAPPPPPPPPPPSPPCSCSREECPSSPPPPPPPPLPGEPPIPPPPPGLPPTTHMNGYSHLGKKKRMRSFFWKTIPEEQVRGKTNIWTLAARQEHHYQIDTKTIEELFGQQEDTTKSSLPRRGRTLNSSFREAREEITILDAKRSMNIGIFLKQFKKSPRSIVEDIHQGKSEHYGSETLREFLKFLPESEEVKKLKAFSGDVSKLSLADSFLYGLIQVPNYSLRIEAMVLKKEFLPSCSSLYTDITVLRTAIKELMSCEELHSILHLVLQAGNIMNAGGYAGNAVGFKLSSLLKLADTKANKPGMNLLHFVAQEAQKKDTILLNFSEKLHHVQKTARLSLENTEAELHLLFVRTKSLKENIQRDGELCQQMEDFLQFAIEKLRELECWKQELQDEAYTLIDFFCEDKKTMKLDECFQIFRDFCTKFNKAVKDNHDREAQELRQLQRLKEQEQKQRSWATGELGAFGRSSSENDVELLTKKGAEGLLPFLHPRPISPSSPSYRPPNTRRSRLSLGPSADRELLTFLESSTGSPEEPNKFHSLPRSSPRQARPTIACLEPAEVRHQDSSFAHKPQASGGQEEAPNPPSAQAHQLAAAQPENHASAFPRARRQGVSVLRKRYSEPVSLGSAQSPPLSPLALGIKEHELVTGLAQFNLQGSQGMEETSQLTLSDFSPMELESVGHRGPQSLSASSSSLTPMGRDALGSLSPALEDGKAAPDEPGSAALGSVGSSDPENKDPRPLFCISDTTDCSLTLDCSEGTDSRPRGGDPEEGGEGDGSMSSGVGEMGDSQVSSNPTSSPPGEAPAPVSVDSEPSCKGGLPRDKPTKRKDVVAPKRGSLKEASPGASKPGSARRSQGAVAKSVRTLTASENESMRKVMPITKSSRGAGWRRPELSSRGPSQNPPSSTDTVWSRQNSVRRASTGAEEQRLPRGSSGSSSTRPGRDVPLQPRGSFKKPSAKPLRNLPRQKPEENKTCRAHSEGPESPKEEPKTPSVPSVPHELPRVPSFARNTVASSSRSMRTDLPPVAKAPGITRTVSQRQLRVKGDPEDAAPKDSSTLRRASSARAPKKRPESAEGPSANTEAPLKARGAGERASLRRKDSSRTTLGRILNPLRK

SEQ ID NO: 1363 - protein, 784 aa, Homo sapiens
MPHTLWMVWVLGVIISLSKEESSNQASLSCDRNGICKGSSGSLNSIPSGLTEAVKSLDLSNNRITYISNSDLQRCVNLQALVLTSNGINTIEEDSFSSLGSLEHLDLSYNYLSNLSSSWFKPLSSLTFLNLLGNPYKTLGETSLFSHLTKLQILRVGNMDTFTKIQRKDFAGLTFLEELEIDASDLQSYEPKSLKSIQNVSHLILHMKQHILLLEIFVDVTSSVECLELRDTDLDTFHFSELSTGETNSLIKKFTFRNVKITDESLFQVMKLLNQISGLLELEFDDCTLNGVGNFRASDNDRVIDPGKVETLTIRRLHIPRFYLFYDLSTLYSLTERVKRITVENSKVFLVPCLLSQHLKSLEYLDLSENLMVEEYLKNSACEDAWPSLQTLILRQNHLASLEKTGETLLTLKNLTNIDISKNSFHSMPETCQWPEKMKYLNLSSTRIHSVTGCIPKTLEILDVSNNNLNLFSLNLPQLKELYISRNKLMTLPDASLLPMLLVLKISRNAITTFSKEQLDSFHTLKTLEAGGNNFICSCEFLSFTQEQQALAKVLIDWPANYLCDSPSHVRGQQVQDVRLSVSECHRTALVSGMCCALFLLILLTGVLCHRFHGLWYMKMMWAWLQAKRKPRKAPSRNICYDAFVSYSERDAYWVENLMVQELENFNPPFKLCLHKRDFIPGKWIIDNIIDSIEKSHKTVFVLSENFVKSEWCKYELDFSHFRLFDENNDAAILILLEPIEKKAIPQRFCKLRKIMNTKTYLEWPMDEAQREGFWVNLRAAIKS

SEQ ID NO: 1364 - protein, 517 aa, Homo sapiens
MPGVANSGPSTSSRETANPCSRKKVHFGSIHDAVRAGDVKQLSEIVVRGASINELDVLHKFTPLHWAAHSGSLECLHWLLWHGADITHVTTRGWTASHIAAIRGQDACVQALIMNGANLTAQDDRGCTPLHLAATHGHSFTLQIMLRSGDPSVTDKREWRPVHYAAFHGRLGCLQLLVKWGCSIEDVDYNGNLPVHLAAMEGHLHCFKFLVSRMSSATQVLKAFNDNGENVLDLAQRFFKQNILQFIQGAEYEGKDLEDQETLAFPGHVAAFKGDLGMLKKLVEDGVININERADNGSTPMHKAAGQGHIECLQWLIKMGADSNITNKAGERPSDVAKRFAHLAAVKLLEELQKYDIDDENEIDENDVKYFIRHGVEGSTDAKDDLCLSDLDKTDARMRAYKKIVELRHLLEIAESNYKHLGGITEEDLKQKKEQLESEKTIKELQGQLEYERLRREKLECQLDEYRAEVDQLRETLEKIQVPNFVAMEDSASCESNKEKRRVKKKVSSGGVFVRRY

SEQ ID NO: 1365 - protein, 979 aa, Homo sapiens
MTLHATRGAALLSWVNSLHVADPVEAVLQLQDCSIFIKIIDRIHGTEEGQQILKQPVSERLDFVCSFLQKNRKHPSSPECLVSAQKVLEGSELELAKMTMLLLYHSTMSSKSPRDWEQFEYKIQAELAVILKFVLDHEDGLNLNEDLENFLQKAPVPSTCSSTFPEELSPPSHQAKREIRFLELQKVASSSSGNNFLSGSPASPMGDILQTPQFQMRRLKKQLADERSNRDELELELAENRKLLTEKDAQIAMMQQRIDRLALLNEKQAASPLEPKELEELRDKNESLTMRLHETLKQCQDLKTEKSQMDRKINQLSEENGDLSFKLREFASHLQQLQDALNELTEEHSKATQEWLEKQAQLEKELSAALQDKKCLEEKNEILQGKLSQLEEHLSQLQDNPPQEKGEVLGDVLQVEELSKKLADSDQASKVQQQKLKAVQAQGGESQQEAQRLQAQLNELQAQLSQKEQAAEHYKLQMEKAKTHYDAKKQQNQELQEQLRSLEQLQKENKELRAEAERLGHELQQAGLKTKEAEQTCRHLTAQVRSLEAQVAHADQQLRDLGKFQVATDALKSREPQAKPQLDLSIDSLDLSCEEGTPLSITSKLPRTQPDGTSVPGEPASPISQRLPPKVESLESLYFTPIPARSQAPLESSLDSLGDVFLDSGRKTRSARRRTTQIINITMTKKLDVEEPDSANSSFYSTRSAPASQASLRATSSTQSLARLGSPDYGNSALLSLPGYRPTTRSSARRSQAGVSSGAPPGRNSFYMGTCQDEPEQLDDWNRIAELQQRNRVCPPHLKTCYPLESRPSLSLGTITDEEMKTGDPQETLRRASMQPIQIAEGTGITTRQQRKRVSLEPHQGPGTPESKKATSCFPRPMTPRDRHEGRKQSTTEAQKKAAPASTKQADRRQSMAFSILNTPKKLGNSLLRRGASKKALSKASPNTRSGTRRSPRIATTTASAATAAAIGATPRAKGKAKH

SEQ ID NO: 1366 - protein, 296 aa, Homo sapiens [sequence omitted]

SEQ ID NO: 1367 - protein, 258 aa, Homo sapiens
MIAISAVSSALLFSLLCEASTVVLLNSTDSSPPTNNFTDIEAALKAQLDSADIPKARRKRYISQNDMIAILDYHNQVRGKVFPPAANMEYMVWDENLAKSAEAWAATCIWDHGPSYLLRFLGQNLSVRTGRYRSILQLVKPWYDEVKDYAFPYPQDCNPRCPMRCFGPMCTHYTQMVWATSNRIGCAIHTCQNMNVWGSVWRRAVYLVCNYAPKGNWIGEAPYKVGVPCSSCPPSYGGSCTDNLCFPGVTSNYLYWFK

SEQ ID NO: 1368 - protein, 848 aa, Homo sapiens
MDEGTGLQPGAGEQLEAPATAEAVQERCEPETLRSKSLPVLSSASCRPSLSPTSGDANPAFGCVDSSGHQELKQGPNPLAPSPSAPSTSAGLGDCNHRVDLSKTFSVSSALAMLQERRCLYVVLTDSRCFLVCMCFLTFIQALMVSGYLSSVITTIERRYSLKSSESGLLVSCFDIGNLVVVVFVSYFGGRGRRPLWLAVGGLLIAFGAALFALPHFISPPYQIQELNASAPNDGLCQGGNSTATLEPPACPKDSGGNNHWVYVALFICAQILIGMGSTPIYTLGPTYLDDNVKKENSSLYLAIMYVMGALGPAVGYLLGGLLIGFYVDPRNPVHLDQNDPRFIGNWWSGFLLCAIAMFLVIFPMFTFPKKLPPRHKKKKKKKFSVDAVSDDDVLKEKSNNSEQADKKVSSMGFGKDVRDLPRAAVRILSNMTFLFVSLSYTAESAIVTAFITFIPKFIESQFGIPASNASIYTGVIIVPSAGVGIVLGGYIIKKLKLGARESAKLAMICSGVSLLCFSTLFIVGCESINLGGINIPYTTGPSLTMPHRNLTGSCNVNCGCKIHEYEPVCGSDGITYFNPCLAGCVNSGNLSTGIRNYTECTCVQSRQVITPPTVGQRSQLRVVIVKTYLNENGYAVSGKCKRTCNTLIPFLVFLFIVTFITACAQPSAIIVTLRSVEDEERPFALGMQFVLLRTLAYIPTPIYFGAVIDTTCMLWQQECGVQGSCWEYNVTSFRFVYFGLAAGLKFVGFIFIFLAWYSIKYKEDGLQRRRQREFPLSTVSERVGHPDNARTRSCPAFSTQGEFHEETGLQKGIQCAAQTYPGPFPEAISSSADPGLEESPAALEPPS

SEQ ID NO: 1369 - protein, 871 aa, Homo sapiens
MKYSCCALVLAVLGTELLGSLCSTVRSPRFRGRIQQERKNIRPNIILVLTDDQDVELGSLQVMNKTRKIMEHGGATFINAFVTTPMCCPSRSSMLTGKYVHNHNVYTNNENCSSPSWQAMHEPRTFAVYLNNTGYRTAFFGKYLNEYNGSYIPPGWREWLGLIKNSRFYNYTVCRNGIKEKHGFDYAKDYFTDLITNESINYFKMSKRMYPHRPVMMVISHAAPHGPEDSAPQFSKLYPNASQHITPSYNYAPNMDKHWIMQYTGPMLPIHMEFTNILQRKRLQTLMSVDDSVERLYNMLVETGELENTYIIYTADHGYHIGQFGLVKGKSMPYDFDIRVPFFIRGPSVEPGSIVPQIVLNIDLAPTILDIAGLDTPPDVDGKSVLKLLDPEKPGNRFRTNKKAKIWRDTFLVERGKFLRKKEESSKNIQQSNHLPKYERVKELCQQARYQTACEQPGQKWQCIEDTSGKLRIHKCKGPSDLLTVRQSTRNLYARGFHDKDKECSCRESGYRASRSQRKSQRQFLRNQGTPKYKPRFVHTRQTRSLSVEFEGEIYDINLEEEEELQVLQPRNIAKRHDEGHKGPRDLQASSGGNRGRMLADSSNAVGPPTTVRVTHKCFILPNDSIHCERELYQSARAWKDHKAYIDKEIEALQDKIKNLREVRGHLKRRKPEECSCSKQSYYNKEKGVKKQEKLKSHLHPFKEAAQEVDSKLQLFKENNRRRKKERKEKRRQRKGEECSLPGLTCFTHDNNHWQTAPFWNLGSFCACTSSNNNTYWCLRTVNETHNFLFCEFATGFLEYFDMNTDPYQLTNTVHTVERGILNQLHVQLMELRSCQGYKQCNPRPKNLDVGNKDGGSYDLHRGQLWDGWEG

SEQ ID NO: 1370 - protein, 1706 aa, Homo sapiens
MGSKDHAVFFREMTQLILNEMPKAGYSSILNDFVESNFFVIDGDSLLVTCLGVKSFKWGQNLHFFYLVECYLVDLLSNGGQFTIVFFKDAEYAYFDFPELLSLRTALILHLQHNTNIDVQTEFSGCLSQDWKLFLEQHYPYFLIVSEEGLSDLQTYLFNFLIIHSWGMKVNVVLSSGHESDTLRFYAYTMESTDRNQTFSKENETVIQSAYKSLIQHLEEIRVLVLATHFEHLKWNDMMEEAYQTLFLLQHLWSEGSDIQRVLCVTSCSLSLRMYHRVLVHSNCLSLQEVEDFCRLRCLCVAFQLHLPLSQRACSRVITCSWIRNSDSFLKMNKWCEYFILSNLNVFGCWNLNLNHVSDLYDEQLLKNIAFYYEFESTQEPHLNLGDSIRRDYEDLWNVVSHLVKEFNVGKSFPLRTTRRHFLRQEKSVIQEISLEKMPSVGFIPMTSAVIDEFVGDMMKDLPILKSDDPVVPSLFKQKTSDELLHWHAQRLLSDDYDRIKCHVDEQSRDPHVLDFLKKIQDYQQFYGKSLESISTKVIVTQTTRPKEDSSGASGEILQNTKPHQITKKSKKKSFLKEDQNKAQQNDDLLFSIEEEMKNNLHSGIRKLEDYLTSCASNSVKFGVEMLGLIACFKAWKKHCRGEGKISKDLSIAVQMMKRIHSLLERYPEILEAEHHQYIAKCLKYLGFNDLANSLDPTLIGDDKNKKKYSIDIGPARFQLQYMGHYLIRDERKDRDPRVQDFIPNAWQQELLDVVDKNESAVIVAPTSSGKTYASYYCMEKVLRESDVGVVVYVAPAKSLVGQVAATVENRFTKTLPAGRTLCGAFTRDYCHNVLNCQVLITVPECFEILLLAPHRQKWVERIRYVIFDEVHYLGREVGAKFWELLLVIIRCPFLVLSATINNPNLLTKWLQSVKQYWKQADKIMEEKCISEKQADKCLNFLQDHSYKNQSYEVRLVLCGERYNDLEKHICSVKHDDVYFDHFHPCAALTTDIIEKYGFPPDLTLTPQESIQLYDTMAQVWETWPRAQELCPEEFILFKNKIVIKKLDARKYEENLKAELTNWIKNGQVKKVKRVLKNLSPDSLSSSKDMVKMFPLLVEKLRQMDKLPAIFFLFKNDDVGKRAGSVCTFLEKTETKSHPHTECHSYVFAIDEVLEKVRKTQKRITKKNPKKAEKLERKKVYRAEYINFLENLKILEISEDCTYADVKALHTEITRNKDSTLERVLPRVRFTRHGKELKALAQRGIGYHHSSMYFKEKEFVEILFVKGLIRVVTATETLALGIHMPCKSVVFAQDSVYLDALNYRQMSGRAGRRGQDLLGNVYFFDIPLPKIKRLLASSVPELRGQFPLSITLVLRLMLLASKGDDPEDAKAKVLSVLKHSLLSFKRRRAMETLKLYFLFSLQLLIKEDYLNKKGNPKKFAGLASYLHGHEPSNLVFVNFLKRGLFHNLCKPAWKGSQQFSQDVMEKLVLVLANLFGRKYIPAKFQNANLSFSQSKVILAELPEDFKAALYEYNLAVMKDFASFLLIASKSVNMKKEHQLPLSRIKFTGKECEDSQLVSHLMSCKKGRVAISPFVCLSGNTDNDLLRPETINQVILRTVGVSGTQAPLLWPWKLDNRGRRMPLNAYVLNFYKHNCLTRLDQKNGMRMGQLLKCLKDFAFNIQAISDSLSELCENKRDNVVLAFKQLSQTFYEKLQEMQIQMSQNHLE

SEQ ID NO: 1371 - protein, 605 aa, Homo sapiens
MSQLSSTLKRYTESARYTDAHYAKSGYGAYTPSSYGANLAASLLEKEKLGFKPVPTSSFLTRPRTYGPSSLLDYDRGRPLLRPDITGGGKRAESQTRGTERPLGSGLSGGSGFPYGVTNNCLSYLPINAYDQGVTLTQKLDSQSDLARDFSSLRTSDSYRIDPRNLGRSPMLARTRKELCTLQGLYQTASCPEYLVDYLENYGRKGSASQVPSQAPPSRVPEIISPTYRPIGRYTLWETGKGQAPGPSRSSSPGRDGMNSKSAQGLAGLRNLGNTCFMNSILQCLSNTRELRDYCLQRLYMRDLHHGSNAHTALVEEFAKLIQTIWTSSPNDVVSPSEFKTQIQRYAPRFVGYNQQDAQEFLRFLLDGLHNEVNRVTLRPKSNPENLDHLPDDEKGRQMWRKYLEREDSRIGDLFVGQLKSSLTCTDCGYCSTVFDPFWDLSLPIAKRGYPEVTLMDCMRLFTKEDVLDGDEKPTCCRCRGRKRCIKKFSIQRFPKILVLHLKRFSESRIRTSKLTTFVNFPLRDLDLREFASENTNHAVYNLYAVSNHSGTTMGGHYTAYCRSPGTGEWHTFNDSSVTPMSSSQVRTSDAYLLFYELASPPSRM

SEQ ID NO: 1372 - protein, 2214 aa, Homo sapiens
MATRSSRRESRLPFLFTLVALLPPGALCEVWTQRLHGGSAPLPQDRGFLVVQGDPRELRLWARGDARGASRADEKPLRRKRSAALQPEPIKVYGQVSLNDSHNQMVVHWAGEKSNVIVALARDSLALARPKSSDVYVSYDYGKSFKKISDKLNFGLGNRSEAVIAQFYHSPADNKRYIFADAYAQYLWITFDFCNTLQGFSIPFRAADLLLHSKASNLLLGFDRSHPNKQLWKSDDFGQTWIMIQEHVKSFSWGIDPYDKPNTIYIERHEPSGYSTVFRSTDFFQSRENQEVILEEVRDFQLRDKYMFATKVVHLLGSEQQSSVQLWVSFGRKPMRAAQFVTRHPINEYYIADASEDQVFVCVSHSNNRTNLYISEAEGLKFSLSLENVLYYSPGGAGSDTLVRYFANEPFADFHRVEGLQGVYIATLINGSMNEENMRSVITFDKGGTWEFLQAPAFTGYGEKINCELSQGCSLHLAQRLSQLLNLQLRRMPILSKESAPGLIIATGSVGKNLASKTNVYISSSAGARWREALPGPHYYTWGDHGGIITAIAQGMETNELKYSTNEGETWKTFIFSEKPVFVYGLLTEPGEKSTVFTIFGSNKENVHSWLILQVNATDALGVPCTENDYKLWSPSDERGNECLLGHKTVFKRRTPHATCFNGEDFDRPVVVSNCSCTREDYECDFGFKMSEDLSLEVCVPDPEFSGKSYSPPVPCPVGSTYRRTRGYRKISGDTCSGGDVEARLEGELVPCPLAEENEFILYAVRKSIYRYDLASGATEQLPLTGLRAAVALDFDYEHNCLYWSDLALDVIQRLCLNGSTGQEVIINSGLETVEALAFEPLSQLLYWVDAGFKKIEVANPDGDFRLTIVNSSVLDRPRALVLVPQEGVMFWTDWGDLKPGIYRSNMDGSAAYHLVSEDVKWPNGISVDDQWIYWTDAYLECIERITFSGQQRSVILDNLPHPYAIAVFKNEIYWDDWSQLSIFRASKYSGSQMEILANQLTGLMDMKIFYKGKNTGSNACVPRPCSLLCLPKANNSRSCRCPEDVSSSVLPSGDLMCDCPQGYQLKNNTCVKQENTCLRNQYRCSNGNCINSIWWCDFDNDCGDMSDERNCPTTICDLDTQFRCQESGTCIPLSYKCDLEDDCGDNSDESHCEMHQCRSDEYNCSSGMCIRSSWVCDGDNDCRDWSDEANCTAIYHTCEASNFQCRNGHCIPQRWACDGDTDCQDGSDEDPVNCEKKCNGFRCPNGTCIPSSKHCDGLRDCSDGSDEQHCEPLCTHFMDFVCKNRQQCLFHSMVCDGIIQCRDGSDEDAAFAGCSQDPEFHKVCDEFGFQCQNGVCISLIWKCDGMDDCGDYSDEANCENPTEAPNCSRYFQFRCENGHCIPNRWKCDRENDCGDWSDEKDCGDSHILPFSTPGPSTCLPNYYRCSSGTCVMDTWVCDGYRDCADGSDEEACPLLANVTAASTPTQLGRCDRFEFECHQPKTCIPNWKRCDGHQDCQDGRDEANCPTHSTLTCMSREFQCEDGEACIVLSERCDGFLDCSDESDEKACSDELTVYKVQNLQWTADFSGDVTLTWMRPKKMPSASCVYNVYYRVVGESIWKTLETHSNKTNTVLKVLKPDTTYQVKVQVQCLSKAHNTNDFVTLRTPEGLPDAPRNLQLSLPREAEGVIVGHWAPPIHTHGLIREYIVEYSRSGSKMWASQRAASNFTEIKNLLVNTLYTVRVAAVTSRGIGNWSDSKSITTIKGKVIPPPDIHIDSYGENYLSFTLTMESDIKVNGYVVNLFWAFDTHKQERRTLNFRGSILSHKVGNLTAHTSYEISAWAKTDLGDSPLAFEHVMTRGVRPPAPSLKAKAINQTAVECTWTGPRNVVYGIFYATSFLDLYRNPKSLTTSLHNKTVIVSKDEQYLFLVRVVVPYQGPSSDYVVVKMIPDSRLPPRHLHVVHTGKTSVVIKWESPYDSPDQDLLYAVAVKDLIRKTDRSYKVKSRNSTVEYTLNKLEPGGKYHIIVQLGNMSKDSSIKITTVSLSAPDALKIITENDHVLLFWKSLALKEKHFNESRGYEIHMFDSAMNITAYLGNTTDNFFKISNLKMGHNYTFTVQARCLFGNQICGEPAILLYDELGSGADASATQAARSTDVAAVVVPILFLILLSLGVGFAILYTKHRRLQSSFTAFANSHYSSRLGSAIFSSGDDLGEDDEDAPMITGFSDDVPMVIA

SEQ ID NO: 1373 - protein, 619 aa, Homo sapiens
MAAAPPLSKAEYLKRYLSGADAGVDRGSESGRKRRKKRPKPGGAGGKGMRIVDDDVSWTAISTTKLEKEEEEDDGDLPVVAEFVDERPEEVKQMEAFRSSAKWKLLGGHNEDLPSNRHFRHDTPDSSPRRVRHGTPDPSPRKDRHDTPDPSPRRARHDTPDPSPLRGARHDSDTSPPRRIRHDSSDTSPPRRARHDSPDPSPPRRPQHNSSGASPRRVRHDSPDPSPPRRARHGSSDISSPRRVHNNSPDTSRRTLGSSDTQQLRRARHDSPDLAPNVTYSLPRTKSGKAPERASSKTSPHWKESGASHLSFPKNSKYEYDPDISPPRKKQAKSHFGDKKQLDSKGDCQKATDSDLSSPRHKQSPGHQDSDSDLSPPRNRPRHRSSDSDLSPPRRRQRTKSSDSDLSPPRRSQPPGKKAAHMYSGAKTGLVLTDIQREQQELKEQDQETMAFEAEFQYAETVFRDKSGRKRNLKLERLEQRRKAEKDSERDELYAQWGKGLAQSRQQQQNVEDAMKEMQKPLARYIDDEDLDRMLREQEREGDPMANFIKKNKAKENKNKKVRPRYSGPAPPPNRFNIWPGYRWDGVDRSNGFEQKRFARLASKKAVEELAYKWSVEDM

SEQ ID NO: 1374 - protein, 483 aa, Homo sapiens
MKVLPASGLAVFLIMALKFSTAAPSLVAASPRTWRNNYRLAQAYLDKYYTNKEGHQIGEMVARGSNSMIRKIKELQAFFGLQVTGKLDQTTMNVIKKPRCGVPDVANYRLFPGEPKWKKNTLTYRISKYTPSMSSVEVDKAVEMALQAWSSAVPLSFVRINSGEADIMISFENGDHGDSYPFDGPRGTLAHAFAPGEGLGGDTHFDNAEKWTMGTNGFNLFTVAAHEFGHALGLAHSTDPSALMYPTYKYKNPYGFHLPKDDVKGIQALYGPRKVFLGKPTLPHAPHHKPSIPDLCDSSSSFDAVTMLGKELLLFKDRIFWRRQVHLRTGIRPSTITSSFPQLMSNVDAAYEVAERGTAYFFKGPHYWITRGFQMQGPPRTIYDFGFPRHVQQIDAAVYLREPQKTLFFVGDEYYSYDERKRKMEKDYPKNTEEEFSGVNGQIDAAVELNGYIYFFSGPKTYKYDTEKEDVVSVVKSSSWIGC

SEQ ID NO: 1375 - protein, 237 aa, Homo sapiens
MPVKKKRKSPGVAAAVAEDGGLKKCKISSYCRSQPPARLISGEEHFSSKKCLAWFYEYAGPDEVVGPEGMEKFCEDIGVEPENIIMLVLAWKLEAESMGFFTKEEWLKGMTSLQCDCTEKLQNKFDFLRSQLNDISSFKNIYRYAFDFARDKDQRSLDIDTAKSMLALLLGRTWPLFSVFYQYLEQSKYRVMNKDQWYNVLEFSRTVHADLSNYDEDGAWPVLLDEFVEWQKVRQTS

SEQ ID NO: 1376 - protein, 438 aa, Homo sapiens
MESPRTAKGGRDIKMSGDVADSTDARSTLSQVEPGNDRNGLDFNRQIKTEDLSDSLQQTLSHRPCHLSQGPAMMSGNQMSGLNASPCQDMASLHPLQQLVLVPGHLQSVSQFLLSQTQPGQQGLQPNLLPFPQQQSGLLLPQTGPGLASQAFGHPGLPGSSLEPHLEASQHLPVPKHLPSSGGADEPSDLEELEKFAKTFKQRRIKLGFTQGDVGLAMGKLYGNDFSQTTISRFEALNLSFKNMCKLKPLLEKWLNDAESSPSDPSVSTPSSYPSLSEVFGRKRKKRTSIETNIRLTLEKRFQDNPKPSSEEISMIAEQLSMEKEVVRVWFCNRRQKEKRINCPVATPIKPPVYNSRLVSPSGSLGPLSVPPVHSTMPGTVTSSCSPGNNSRPSSPGSGLHASSPTASQNNSKAAVNSASSFNSSGSWYRWNHSTYLH

SEQ ID NO: 1377 - protein, 1191 aa, Homo sapiens
MEAMSPQQETLGGQPGRSSSLTGVSRLAGGSCTKKKMKTLAERRRSAPSLILDKALQKRPTTRDSPSASVDTCTFLSSLVCSNRTLLIDGRAELKRGLQRQERHLFLFNDLFVVAKIKYNNNFKIKNKIKLTDMWTASCVDEVGEGNTNAMKSFVLGWPTVNFVATFSSPEQKDKWLSLLQRYINLEKEKDYPKSIPLKIFAKDIGNCAYSKTITVMNSDTANEVINMSLPMLGITGSERDYQLWVNSGKEEAPYPLIGHEYPYGIKMSHLRDSALLTPGSKDSTTPFNLQEPFLMEQLPREMQCQFILKPSRLAAAQQLSDSGHKTFKRRRSIINWAFWRGSSTHLDNLPSSPTSPMPGQLFGISLPNICENDNLPKPVLDMLFFLNQKGPLTKGIFRQSANVKSCRELKEKLNSGVEVHLDCESIFVIASVLKDFLRNIPGSIFSSDLYDHWVSVMDQGNDEEKINTVQRLLDQLPRANVVLLRYLFGVLHNIEQHSSSNQMTAFNLAVCVAPSILWPPASSSPELENEFTKKVSLLIQFLIENCLRIFGEEITSLFREVSVRCDTRENASDISCFQLNDSSYDSLENELNEDVDAPCSDLVKKLGQGSRSMDSVLTLSDYDLDQPEVEGLLTLSDFDLAHSKDEDVQMKRPLESKPVNILVYTKIPLRDHARAPSAMCTPSYLSTAAANAAKSLRRHRRCSEPSIDYLDSKLSYLREFYQKKLRKSSCDAILSQKDEDYLKQNQPLQEEGKTCFKQSLVTGTDVSKKNATTQNTKKKSLSGSEGNHVKLFPKSKPVAISVASYSPMSSQDHSKNQPFDVNTSGYSPPHTADALKGPRTHRRCSEPNIEDQNRKLTYLRGIYSKKQHKTSCEAGLLHGEEDYLKRHKSLQMEGQKLINQSLVMGIEVGKSSATNQNTEKVLPPRLNLCPRTSYSSLSSPGTSPSGSSVSSQDSAFSQISEHSVFTPTETSSPIDCTFQAQRKREDLSPDFSNASHVSGMPGPSSGQACSRPAYTKKDTMEWHSQMHSVTLHPSTWLRNGVASLKNWSLKKKAKAARPEEEKIASPKGPLEPPPHASGVPEANSLQEEQKDLPLRAAEGLSPVQSAQRCSSSPFQDSERHCSSPFSLVESRLKLCMKSHEEIEPGSQSSSGSLPWERASASSWTLEDATSPDSGPTVVCDIEDRYLTKDI

SEQ ID NO: 1378 - protein, 434 aa, Homo sapiens
MAEDSGKKKRRKNFEAMFKGILQSGLDNFVINHMLKNNVAGQTSIQTLVPNTDQKSTSVKKDNHKKKTVKMLEYLGKDVLHGVFNYLAKHDVLTLKEEEKKKYYDTKIEDKALILVDSLRKNRVAHQMFTQTLLNMDQKITSVKPLLQIEAGPPESAESTNILKLCPREEFLRLCKKNHDEIYPIKKREDRRRLALIICNTKFDHLPARNGAHYDIVGMKRLLQGLGYTVVDEKNLTARDMESVLRAFAARPEHKSSDSTFLVLMSHGILEGICGTAHKKKKPDVLLYDTIFQIFNNRNCLSLKDKPKVIIVQACRGEKHGELWVRDSPASLALISSQSSENLEADSVCKIHEEKDFIAFCSSTPHNVSWRDRTRGSIFITELITCFQKYSCCCHLMEIFRKVQKSFEVPQAKAQMPTIERATLTRDFYLFPGN

SEQ ID NO: 1379 - protein, 238 aa, Homo sapiens
MDSNHQSNYKLSKTEKKFLRKQIKAKHTLLRHEGIETVSYATQSLVVANGGLGNGVSRNQLLPVLEKCGLVDALLMPPNKPYSFARYRTTEESKRAYVTLNGKEVVDDLGQKITLYLNFVEKVQWKELRPQALPPGLMVVEEIISSEEEKMLLESVDWTEDTDNQNSQKSLKHRRVKHFGYEFHYENNNVDKDKPLSGGLPDICESFLEKWLRKGYIKHKPDQMTINQYEPGQDCHGF

SEQ ID NO: 1380 - protein, 2214 aa, Homo sapiens
MVANFFKSLILPYIHKLCKGMFTKKLGNTNKNKEYRQQKKDQDFPTAGQTKSPKFSYTFKSTVKKIAKCSSTHNLSTEEDEASKEFSLSPTFSYRVAIANGLQKNAKVTNSDNEDLLQELSSIESSYSESLNELRSSTENQAQSTHTMPVRRNRKSSSSLAPSEGSSDGERTLHGLKLGALRKLRKWKKSQECVSSDSELSTMKKSWGIRSKSLDRTVRNPKTNALEPGFSSSGCISQTHDVMEMIFKELQGISQIETELSELRGHVNALKHSIDEISSSVEVVQSEIEQLRTGFVQSRRETRDIHDYIKHLGHMGSKASLRFLNVTEERFEYVESVVYQILIDKMGFSDAPNAIKIEFAQRIGHQRDCPNAKPRPILVYFETPQQRDSVLKKSYKLKGTGIGISTDILTHDIRERKEKGIPSSQTYESMAIKLSTPEPKIKKNNWQSPDDSDEDLESDLNRNSYAVLSKSELLTKGSTSKPSSKSHSARSKNKTANSSRISNKSDYDKISSQLPESDILEKQTTTHYADATPLWHSQSDFFTAKLSRSESDFSKLCQSYSEDFSENQFFTRTNGSSLLSSSDRELWQRKQEGTATLYDSPKDQHLNGGVQGIQGQTETENTETVDSGMSNGMVCASGDRSHYSDSQLSLHEDLSPWKEWNQGADLGLDSSTQEGFDYETNSLFDQQLDVYNKDLEYLGKCHSDLQDDSESYDLTQDDNSSPCPGLDNEPQGQWVGQYDSYQGANSNELYQNQNQLSMMYRSQSELQSDDSEDAPPKSWHSRLSIDLSDKTFSFPKFGSTLQRAKSALEVVWNKSTQSLSGYEDSGSSLMGRFRTLSQSTANESSTTLDSDVYTEPYYYKAEDEEDYTEPVADNETDYVEVMEQVLAKLENRTSITETDEQMQAYDHLSYETPYETPQDEGYDGPADDMVSEEGLEPLNETSAEMEIREDENQNIPEQPVEITKPKRIRPSFKEAALRAYKKQMAELEEKILAGDSSSVDEKARIVSGNDLDASKFSALQVCGGAGGGLYGIDSMPDLRRKKTLPIVRDVAMTLAARKSGLSLAMVIRTSLNNEELKMHVFKKTLQALIYPMSSTIPHNFEVWTATTPTYCYECEGLLWGIARQGMKCLECGVKCHEKCQDLLNADCLQRAAEKSSKHGAEDKTQTIITAMKERMKIREKNRPEVFEVIQEMFQISKEDFVQFTKAAKQSVLDGTSKWSAKITITVVSAQGLQAKDKTGSSDPYVTVQVGKNKRRTKTIFGNLNPVWDEKFYFECHNSTDRIKVRVWDEDDDIKSRVKQHFKKESDDFLGQTIVEVRTLSGEMDVWYNLEKRTDKSAVSGAIRLKINVEIKGEEKVAPYHIQYTCLHENLFHYLTEVKSNGGVKIPEVKGDEAWKVFFDDASQEIVDEFAMRYGIESIYQAMTHFSCLSSKYMCPGVPAVMSTLLANINAFYAHTTVSTNIQVSASDRFAATNFGREKFIKLLDQLHNSLRIDLSKYRENFPASNTERLQDLKSTVDLLTSITFFRMKVLELQSPPKASMVVKDCVRACLDSTYKYIFDNCHELYSQLTDPSKKQDIPREDQGPTTKNLDFWPQLITLMVTIIDEDKTAYTPVLNQFPQELNMGKISAEIMWTLFALDMKYALEEHENQRLCKSTDYMNLHFKVKWFYNEYVRELPAFKDAVPEYSLWFEPFVMQWLDENEDVSMEFLHGALGRDKKDGFQQTSEHALFSCSVVDVFAQLNQSFEIIKKLECPNPEALSHLMRRFAKTINKVLLQYAAIVSSDFSSHCDKENVPCILMNNIQQLRVQLEKMFESMGGKELDSEASTILKELQVKLSGVLDELSVTYGESFQVIIEECIKQMSFELNQMRANGNTTSNKNSAAMDAEIVLRSLMDFLDKTLSLSAKICEKTVLKRVLKELWKLVLNKIEKQIVLPPLTDQTGPQMIFIAAKDLGQLSKLKEHMIREDARGLTPRQCAIMEVVLATIKQYFHAGGNGLKKNFLEKSPDLQSLRYALSLYTQTTDALIKKFIDTQTSQSRSSKDAVGQISVHVDITATPGTGDHKVTVKVIAINDLNWQTTAMFRPFVEVCILGPNLGDKKRKQGTKTKSNTWSPKYNETFQFILGKENRPGAYELHLSVKDYCFAREDRIIGMTVIQLQNIAEKGSYGAWYPLLKNISMDETGLTILRILSQRTSDDVAKEFVRLKSETRSTEESA

SEQ ID NO: 1381 - protein, 1170 aa, Homo sapiens
MGLAWGLGVLFLMHVCGTNRIPESGGDNSVFDIFELTGAARKGSGRRLVKGPDPSSPAFRIEDANLIPPVPDDKFQDLVDAVRAEKGFLLLASLRQMKKTRGTLLALERKDHSGQVFSVVSNGKAGTLDLSLTVQGKQHVVSVEEALLATGQWKSITLFVQEDRAQLYIDCEKMENAELDVPIQSVFTRDLASIARLRIAKGGVNDNFQGVLQNVRFVFGTTPEDILRNKGCSSSTSVLLTLDNNVVNGSSPAIRTNYIGHKTKDLQAICGISCDELSSMVLELRGLRTIVTTLQDSIRKVTEENKELANELRRPPLCYHNGVQYRNNEEWTVDSCTECHCQNSVTICKKVSCPIMPCSNATVPDGECCPRCWPSDSADDGWSPWSEWTSCSTSCGNGIQQRGRSCDSLNNRCEGSSVQTRTCHIQECDKRFKQDGGWSHWSPWSSCSVTCGDGVITRIRLCNSPSPQMNGKPCEGEARETKACKKDACPINGGWGPWSPWDICSVTCGGGVQKRSRLCNNPTPQFGGKDCVGDVTENQICNKQDCPIDGCLSNPCFAGVKCTSYPDGSWKCGACPPGYSGNGIQCTDVDECKEVPDACFNHNGEHRCENTDPGYNCLPCPPRFTGSQPFGQGVEHATANKQVCKPRNPCTDGTHDCNKNAKCNYLGHYSDPMYRCECKPGYAGNGIICGEDTDLDGWPNENLVCVANATYHCKKDNCPNLPNSGQEDYDKDGIGDACDDDDDNDKIPDDRDNCPFHYNPAQYDYDRDDVGDRCDNCPYNHNPDQADTDNNGEGDACAADIDGDGILNERDNCQYVYNVDQRDTDMDGVGDQCDNCPLEHNPDQLDSDSDRIGDTCDNNQDIDEDGHQNNLDNCPYVPNANQADHDKDGKGDACDHDDDNDGIPDDKDNCRLVPNPDQKDSDGDGRGDACKDDFDHDSVPDIDDICPENVDISETDFRRFQMIPLDPKGTSQNDPNWVVRHQGKELVQTVNCDPGLAVGYDEFNAVDFSGTFFINTERDDDYAGFVFGYQSSSRFYVVMWKQVTQSYWDTNPTRAQGYSGLSVKVVNSTTGPGEHLRNALWHTGNTPGQVRTLWHDPRHIGWKDFTAYRWRLSHRPKTGFIRVVMYEGKKIMADSGPIYDKTYAGGRLGLFVFSQEMVFFSDLKYECRDP

SEQ ID NO: 1382 - protein, 426 aa, Homo sapiens
MIIPSLEELDSLKYSDLQNLAKSLGLRANLRATKLLKALKGYIKHEARKGNENQDESQTSASSCDETEIQISNQEEAERQPLGHVTKTRRRCKTVRVDPDSQNHEKQESQDLRATAKVPSPPDEHQEAENAVSSGNRDSKVPSEGKKSLYTDESSKPGKNKRTAITTPNFKKLHEAHFKEMESIDQYIERKKKHFEEHNSMNELKQQPINKGGVRTPVPPRGRLSVASTPISQRRSQGRSCGPASQSTLGLKGSLKRSAISAAKTGVRFSAATKDNEHKRSLTKTPARKSAHVTVSGGTPKGEAVLGTHKLKTITGNSAAVITPFKLTTEATQTPVSNKKPVFDLKASLSRPLNYEPHKGKLKPWGQSKENNYLNQHVNRINFYKKTYKQPHLQTKEEQRKKREQERKEKKAKVLGMRRGLILAED

SEQ ID NO: 1383 - protein, 960 aa, Homo sapiens
MKSARAKTPRKPTVKKGSQTNLKDPVGVYCRVRPLGFPDQECCIEVINNTTVQLHTPEGYRLNRNGDYKETQYSFKQVFGTHTTQKELFDVVANPLVNDLIHGKNGLLFTYGVTGSGKTHTMTGSPGEGGLLPRCLDMIFNSIGSFQAKRYVFKSNDRNSMDIQCEVDALLERQKREAMPNPKTSSSKRQVDPEFADMITVQEFCKAEEVDEDSVYGVFVSYIEIYNNYIYDLLEEVPFDPIKPKPPQSKLLREDKNHNMYVAGCTEVEVKSTEEAFEVFWRGQKKRRIANTHLNRESSRSHSVFNIKLVQAPLDADGDNVLQEKEQITISQLSLVDLAGSERTNRTRAEGNRLREAGNINQSLMTLRTCMDVLRENQMYGTNKMVPYRDSKLTHLFKNYFDGEGKVRMIVCVNPKAEDYEENLQVMRFAEVTQEVEVARPVDKAICGLTPGRRYRNQPRGPVGNEPLVTDVVLQSFPPLPSCEILDINDEQTLPRLIEALEKRHNLRQMMIDEFNKQSNAFKALLQEFDNAVLSKENHMQGKLNEKEKMISGQKLEIERLEKKNKTLEYKIEILEKTTTIYEEDKRNLQQELETQNQKLQRQFSDKRRLEARLQGMVTETTMKWEKECERRVAAKQLEMQNKLWVKDEKLKQLKAIVTEPKTEKPERPSRERDREKVTQRSVSPSPVPLSSNYIAQISNGQQLMSQPQLHRRSNSCSSISVASCISEWEQKIPTYNTPLKVTSIARRRQQEPGQSKTCIVSDRRRGMYWTEGREVVPTFRNEIEIEEDHCGRLLFQPDQNAPPIRLRHRRSRSAGDRWVDHKPASNMQTETVMQPHVPHAITVSVANEKALAKCEKYMLTHQELASDGEIETKLIKGDIYKTRGGGQSVQFTDIETLKQESPNGSRKRRSSTVAPAQPDGAESEWTDVETRCSVAVEMRAGSQLGPGYQHHAQPKRKKP

SEQ ID NO: 1384 - protein, 686 aa, Homo sapiens
MIPGKYRSVSGRAANNVNCGLHLVIQTSSLPEKNKVEFKLNKDTSSFPGRLLQHDLERNYSSRQGDHINLVSSSLSSFPILQRSSEEKILYSDRLSLERQKLTVCPIINGEDHLRLLNFQHNFITRIQNISNLQKLISLDLYDNQIEEISGLSTLRCLRVLLLGKNRIKKISNLENLKSLDVLDLHGNQITKIENINHLCELRVLNLARNFLSHVDNLNGLDSLTELNLRHNQITFVRDVDNLPCLQHLFLSFNNISSFDSVSCLADSSSLSDITFDGNPIAQESWYKHTVLQNMMQLRQLDMKRITEEERRMASVLAKKEEEKKRESHKQSLLKEKKRLTINNVARQWDLQQQRVANIATNEDRKDSDSPQDPCQIDGSTLSAFPEETGPLDSGLNNALQGLSVIDTYLVEVDGDTLSLYGSGALESLDRNWSVQTAGMITTVSFTFIEFDEIVQVLPKLKIKFPNSLHLKFKETNLVMLQQFNALAQLRRIDQLTIDPQGNPVVNFTLWKYYVLFRLSHFSMQKINGTEVTQNDMIMAERLFGILAHVASSELPQYRLISILGDARKKQFRYLLESKGKKPGIINEENNDSKRLVGENTNRATLNYTTRDFYNEKLEEIKEKKKFCKTYIEDLVKEATEINMKNEALQKLWPQMFIELVRDAVIEIRNKNSYMKLCLQQITDQK

SEQ ID NO: 1385 - protein, 1185 aa, Homo sapiens
MSLLNPVLLPPKVKAYLSQGERFIKWDDETTVASPVILRVDPKGYYLYWTYQSKEMEFLDITSIRDTRFGKFAKMPKSQKLRDVFNMDFPDNSFLLKTLTVVSGPDMVDLTFHNFVSYKENVGKAWAEDVLALVKHPLTANASRSTFLDKILVKLKMQLNSEGKIPVKNFFQMFPADRKRVEAALSACHLPKGKNDAINPEDFPEPVYKSFLMSLCPRPEIDEIFTSYHAKAKPYMTKEHLTKFINQKQRDSRLNSLLFPPARPDQVQGLIDKYEPSGINAQRGQLSPEGMVWFLCGPENSVLAQDKLLLHHDMTQPLNHYFINSSHNTYLTAGQFSGLSSAEMYRQVLLSGCRCVELDCWKGKPPDEEPIITHGFTMTTDIFFKEAIEAIAESAFKTSPYPIILSFENHVDSPRQQAKMAEYCRTIFGDMLLTEPLEKFPLKPGVPLPSPEDLRGKILIKNKKNQFSGPTSSSKDTGGEAEGSSPPSAPAGEGTVWAGEEGTELEEEEVEEEEEEESGNLDEEEIKKMQSDEGTAGLEVTAYEEMSSLVNYIQPTKFVSFEFSAQKNRSYVISSFTELKAYDLLSKASVQFVDYNKRQMSRIYPKGTRMDSSNYMPQMFWNAGCQMVALNFQTMDLPMQQNMAVFEFNGQSGYLLKHEFMRRPDKQFNPFSVDRIDVVVATTLSITVISGQFLSERSVRTYVEVELFGLPGDPKRRYRTKLSPSTNSINPVWKEEPFVFEKILMPELASLRVAVMEEGNKFLGHRIIPINALNSGYHHLCLHSESNMPLTMPALFIFLEMKDYIPGAWADLTVALANPIKFFSAHDTKSVKLKEAMGGLPEKPFPLASPVASQVNGALAPTSNGSPAARAGAREEAMKEAAEPRTASLEELRELKGVVKLQRRHEKELRELERRGARRWEELLQRGAAQLAELGPPGVGGVGACKLGPGKGSRKKRSLPREESAGAAPGEGPEGVDGRVRELKDRLELELLRQGEEQYECVLKRKEQHVAEQISKMMELAREKQAAELKALKETSENDTKEMKKKLETKRLERIQGMTKVTTDKMAQERLKREINNSHIQEVVQVIKQMTENLERHQEKLEEKQAACLEQIREMEKQFQKEALAEYEARMKGLEAEVKESVRACLRTCFPSEAKDKPERACECPPELCEQDPLIAKADAQESRL

SEQ ID NO: 1386 - protein, 681 aa, Homo sapiens
MFRKKKKKRPEISAPQNFQHRVHTSFDPKEGKFVGLPPQWQNILDTLRRPKPVVDPSRITRVQLQPMKTVVRGSAMPVDGYISGLLNDIQKLSVISSNTLRGRSPTSRRRAQSLGLLGDEHWATDPDMYLQSPQSERTDPHGLYLSCNGGTPAGHKQMPWPEPQSPRVLPNGLAAKAQSLGPAEFQGASQRCLQLGACLQSSPPGASPPTGTNRHGMKAAKHGSEEARPQSCLVGSATGRPGGEGSPSPKTRESSLKRRLFRSMFLSTAATAPPSSSKPGPPPQSKPNSSFRPPQKDNPPSLVAKAQSLPSDQPVGTFSPLTTSDTSSPQKSLRTAPATGQLPGRSSPAGSPRTWHAQISTSNLYLPQDPTVAKGALAGEDTGVVTHEQFKAALRMVVDQGDPRLLLDSYVKIGEGSTGIVCLAREKHSGRQVAVKMMDLRKQQRRELLFNEVVIMRDYQHFNVVEMYKSYLVGEELWVLMEFLQGGALTDIVSQVRLNEEQIATVCEAVLQALAYLHAQGVIHRDIKSDSILLTLDGRVKLSDFGFCAQISKDVPKRKSLVGTPYWMAPEVISRSLYATEVDIWSLGIMVIEMVDGEPPYFSDSPVQAMKRLRDSPPPKLKNSHKVSPVLRDFLERMLVRDPQERATAQELLDHPFLLQTGLPECLVPLIQLYRKQTSTC

SEQ ID NO: 1387 - protein, 748 aa, Homo sapiens
MVLLRVLILLLSWAAGMGGQYGNPLNKYIRHYEGLSYNVDSLHQKHQRAKRAVSHEDQFLRLDFHAHGRHFNLRMKRDTSLFSDEFKVETSNKVLDYDTSHIYTGHIYGEEGSFSHGSVIDGRFEGFIQTRGGTFYVEPAERYIKDRTLPFHSVIYHEDDINYPHKYGPQGGCADHSVFERMRKYQMTGVEEVTQIPQEEHAANGPELLRKKRTTSAEKNTCQLYIQTDHLFFKYYGTREAVIAQISSHVKAIDTIYQTTDFSGIRNISFMVKRIRINTTADEKDPTNPFRFPNIGVEKFLELNSEQNHDDYCLAYVFTDRDFDDGVLGLAWVGAPSGSSGGICEKSKLYSDGKKKSLNTGIITVQNYGSHVPPKVSHITFAHEVGHNFGSPHDSGTECTPGESKNLGQKENGNYIMYARATSGDKLNNNKFSLCSIRNISQVLEKKRNNCFVESGQPICGNGMVEQGEECDCGYSDQCKDECCFDANQPEGRKCKLKPGKQCSPSQGPCCTAQCAFKSKSEKCRDDSDCAREGICNGFTALCPASDPKPNFTDCNRHTQVCINGQCAGSICEKYGLEECTCASSDGKDDKELCHVCCMKKMDPSTCASTGSVQWSRHFSGRTITLQPGSPCNDFRGYCDVFMRCRLVDADGPLARLKKAIFSPELYENIAEWIVAHWWAVLLMGIALIMLMAGFIKICSVHTPSSNPKLPPPKPLPGTLKRRRPPQPIQQPQRQRPRESYQMGHMRR

SEQ ID NO: 1388 - protein, 495 aa, Homo sapiens
MGSKRRNLSCSERHQKLVDENYCKKLHVQALKNVNSQIRNQMVQNENDNRVQRKQFLRLLQNEQFELDMEEAIQKAEENKRLKELQLKQEEKLAMELAKLKHESLKDEKMRQQVRENSIELRELEKKLKAAYMNKERAAQIAEKDAIKYEQMKRDAEIAKTMMEEHKRIIKEENAAEDKRNKAKAQYYLDLEKQLEEQEKKKQEAYEQLLKEKLMIDEIVRKIYEEDQLEKQQKLEKMNAMRRYIEEFQKEQALWRKKKREEMEEENRKIIEFANMQQQREEDRMAKVQENEEKRLQLQNALTQKLEEMLRQREDLEQVRQELYQEEQAEIYKSKLKEEAEKKLRKQKEMKQDFEEQMALKELVLQAAKEEEENFRKTMLAKFAEDDRIELMNAQKQRMKQLEHRRAVEKLIEERRQQFLADKQRELEEWQLQQRRQGFINAIIEEERLKLLKEHATNLLGYLPKGVFKKEDDIDLLGEEFRKVYQQRSEICEEK

SEQ ID NO: 1389 - protein, 825 aa, Homo sapiens
MAAGKFASLPRNMPVNHQFPLASSMDLLSSRSPLAEHRPDAYQDVSIHGTLPRKKKGPPPIRSCDDFSHMGTLPHSKSPRQNSPVTQDGIQESPWQDRHGETFTFRDPHLLDPTVEYVKFSKERHIMDRTPEKLKKELEEELLLSSEDLRSHAWYHGRIPRQVSENLVQRDGDFLVRDSLSSPGNFVLTCQWKNLAQHFKINRTVLRLSEAYSRVQYQFEMESFDSIPGLVRCYVGNRRPISQQSGAIIFQPINRTVPLRCLEEHYGTSPGQAREGSLTKGRPDVAKRLSLTMGGVQAREQNLPRGNLLRNKEKSGSQPACLDHMQDRRALSLKAHQSESYLPIGCKLPPQSSGVDTSPCPNSPVFRTGSEPALSPAVVRRVSSDARAGEALRGSDSQLCPKPPPKPCKVPFLKVPSSPSAWLNSEANYCELNPAFATGCGRGAKLPSCAQGSHTELLTAKQNEAPGPRNSGVNYLILDDDDRERPWEPAAAQMEKGQWDKGEFVTPLLETVSSFRPNEFESKFLPPENKPLETAMLKRAKELFTNNDPKVIAQHVLSMDCRVARILGVSEEMRRNMGVSSGLELITLPHGHQLRLDIIERHNTMAIGIAVDILGCTGTLEDRAATLSKIIQVAVELKDSMGDLYSFSALMKALEMPQITRLEKTWTALRHQYTQTAILYEKQLKPFSKLLHEGRESTCVPPNNVSVPLLMPLVTLMERQAVTFEGTDMWEKNDQSCEIMLNHLATARFMAEAADSYRMNAERILAGFQPDEEMNEICKTEFQMRLLWGSKGAQVNQTERYEKFNQILTALSRKLEPPPVKQAEL

SEQ ID NO: 1390 - protein, 887 aa, Homo sapiens
MPSLPQEGVIQGPSPLDLNTELPYQSTMKRKVRKKKKKGTITANVAGTKFEIVRLVIDEMGFMKTPDEDETSNLIWCDSAVQQEKISELQNYQRINHFPGMGEICRKDFLARNMTKMIKSRPLDYTFVPRTWIFPAEYTQFQNYVKELKKKRKQKTFIVKPANGAMGHGISLIRNGDKLPSQDHLIVQEYIEKPFLMEGYKFDLRIYILVTSCDPLKIFLYHDGLVRMGTEKYIPPNESNLTQLYMHLTNYSVNKHNEHFERDETENKGSKRSIKWFTEFLQANQHDVAKFWSDISELVVKTLIVAEPHVLHAYRMCRPGQPPGSESVCFEVLGFDILLDRKLKPWLLEINRAPSFGTDQKIDYDVKRGVLLNALKLLNIRTSDKRRNLAKQKAEAQRRLYGQNSIKRLLPGSSDWEQQRHQLERRKEELKERLAQVRKQISREEHENRHMGNYRRIYPPEDKALLEKYENLLAVAFQTFLSGRAASFQRELNNPLKRMKEEDILDLLEQCEIDDEKLMGKTTKTRGPKPLCSMPESTEIMKRPKYCSSDSSYDSSSSSSESDENEKEEYQNKKREKQVTYNLKPSNHYKLIQQPSSIRRSVSCPRSISAQSPSSGDTRPFSAQQMISVSRPTSASRSHSLNRASSYMRHLPHSNDACSTNSQVSESLRQLKTKEQEDDLTSQTLFVLKDMKIRFPGKSDAESELLIEDIIDNWKYHKTKVASYWLIKLDSVKQRKVLDIVKTSIRTVLPRIWKVPDVEEVNLYRIFNRVFNRLLWSRGQGLWNCFCDSGSSWESIFNKSPEVVTPLQLQCCQRLVELCKQCLLVVYKYATDKRGSLSGIGPDWGNSRYLLPGSTQFFLRTPTYNLKYNSPGMTRSNVLFTSRYGHL

SEQ ID NO: 1391 - protein, 454 aa, Homo sapiens
MFLAQRSLCSLSGRAKFLKTISSSKILGFSTSAKMSLKFTNAKRIEGLDSNVWIEFTKLAADPSVVNLGQGFPDISPPTYVKEELSKIAAIDSLNQYTRGFGHPSLVKALSYLYEKLYQKQIDSNKEILVTVGAYGSLFNTIQALIDEGDEVILIVPFYDCYEPMVRMAGATPVFIPLRSKPVYGKRWSSSDWTLDPQELESKFNSKTKAIILNTPHNPLGKVYNREELQVIADLCIKYDTLCISDEVYEWLVYSGNKHLKIATFPGMWERTITIGSAGKTFSVTGWKLGWSIGPNHLIKHLQTVQQNTIYTCATPLQEALAQAFWIDIKRMDDPECYFNSLPKELEVKRDRMVRLLESVGLKPIVPDGGYFIIADVSLLDPDLSDMKNNEPYDYKFVKWMTKHKKLSAIPVSAFCNSETKSQFEKFVRFCFIKKDSTLDAAEEIIKAWSVQKS

SEQ ID NO: 1392 - protein, 1261 aa, Homo sapiens
MIAHKQKKTKKKRAWASGQLSTDITTSEMGLKSLSSNSIFDPDYIKELVNDIRKFSHMLLYLKEAIFSDCFKEVIHIRLEELLRVLKSIMNKHQNLNSVDLQNAAEMLTAKVKAVNFTEVNEENKNDLFQEVFSSIETLAFTFGNILTNFLMGDVGNDSLLRLPVSRETKSFENVSVESVDSSSEKGNFSPLELDNVLLKNTDSIELALSYAKTWSKYTKNIVSWVEKKLNLELESTRNMVKLAEATRTNIGIQEFMPLQSLFTNALLNDIESSHLLQQTIAALQANKFVQPLLGRKNEMEKQRKEIKELWKQEQNKMLEAENALKKAKLLCMQRQDEYEKAKSSMFRAEEEHLSSSGGLAKNLNKQLEKKRRLEEEALQKVEEANELYKVCVTNVEERRNDLENTKREILAQLRTLVFQCDLTLKAVTVNLFHMQHLQAASLADSLQSLCDSAKLYDPGQEYSEFVKATNSTEEEKVDGNVNKHLNSSQPSGFGPANSLEDVVRLPDSSNKIEEDRCSNSADITGPSFIRSWTFGMFSDSESTGGSSESRSLDSESISPGDFHRKLPRTPSSGTMSSADDLDEREPPSPSETGPNSLGTFKKTLMSKAALTHKFRKLRSPTKCRDCEGIVVFQGVECEECLLVCHRKCLENLVIICGHQKLPGKIHLFGAEFTQVAKKEPDGIPFILKICASEIENRALCLQGIYRVCGNKIKTEKLCQALENGMHLVDISEFSSHDICDVLKLYLRQLPEPFILFRLYKEFIDLAKEIQHVNEEQETKKNSLEDKKWPNMCIEINRILLKSKDLLRQLPASNFNSLHFLIVHLKRVVDHAEENKMNSKNLGVIFGPSLIRPRPTTAPITISSLAEYSNQARLVEFLITYSQKIFDGSLQPQDVMCSIGVVDQGCFPKPLLSPEERDIERSMKSLFFSSKEDIHTSESESKIFERATSFEESERKQNALGKCDACLSDKAQLLLDQEAESASQKIEDGKTPKPLSLKSDRSTNNVERHTPRTKIRPVSLPVDRLLLASPPNERNGRNMGNVNLDKFCKNPAFEGVNRKDAATTVCSKFNGFDQQTLQKIQDKQYEQNSLTAKTTMIMPSALQEKGVTTSLQISGDHSINATQPSKPYAEPVRSVREASERRSSDSYPLAPVRAPRTLQPQHWTTFYKPHAPIISIRGNEEKPASPSAAVPPGTDHDPHGLVVKSMPDPDKASACPGQATGQPKEDSEELGLPDVNPMCQRPRLKRMQQFEDLEGEIPQFV

SEQ ID NO: 1393 - protein, 620 aa, Homo sapiens
MALGEEKAEAEASEDTKAQSYGRGSCRERELDIPGPMSGEQPPRLEAEGGLISPVWGAEGIPAPTCWIGTDPGGPSRAHQPQASDANREPVAERSEPALSGLPPATMGSGDLLLSGESQVEKTKLSSSEEFPQTLSLPRTTTICSGHDADTEDDPSLADLPQALDLSQQPHSSGLSCLSQWKSVLSPGSAAQPSSCSISASSTGSSLQGHQERAEPRGGSLAKVSSSLEPVVPQEPSSVVGLGPRPQWSPQPVFSGGDASGLGRRRLSFQAEYWACVLPDSLPPSPDRHSPLWNPNKEYEDLLDYTYPLRPGPQLPKHLDSRVPADPVLQDSGVDLDSFSVSPASTLKSPTNVSPNCPPAEATALPFSGPREPSLKQWPSRVPQKQGGMGLASWSQLASTPRAPGSRDARWERREPALRGAKDRLTIGKHLDMGSPQLRTRDRGWPSPRPEREKRTSQSARRPTCTESRWKSEEEVESDDEYLALPARLTQTFCCQLEELICWLYNVADVTDHGTAARSNLTSLKSSLQLYRQFKKDIDEHQSLTESVLQKGEILLQCLLENTPVLEDVLGRIAKQSGELESHADRLYDSILASLDMLAGCTLIPDKKPMAAMEHPCEGV

SEQ ID NO: 1394 - protein, 1749 aa, Homo sapiens
MHLKHLRTLLSPQDGAAKVTCMAWSQNNAKFAVCTVDRVVLLYDEHGERRDKFSTKPADMKYGRKSYMVKGMAFSPDSTKIAIGQTDNIIYVYKIGEDWGDKKVICNKFIQTSAVTCLQWPAEYIIVFGLAEGKVRLANTKTNKSSTIYGTESYVVSLTTNCSGKGILSGHADGTIVRYFFDDEGSGESQGKLVNHPCPPYALAWATNSIVAAGCDRKIVAYGKEGHMLQTFDYSRDPQEREFTTAVSSPGGQSVVLGSYDRLRVFNWIPRRSIWEEAKPKEITNLYTITALAWKRDGSRLCVGTLCGGVEQFDCCLRRSIYKNKFELTYVGPSQVIVKNLSSGTRVVLKSHYGYEVEEVKILGKERYLVAHTSETLLLGDLNTNRLSEIAWQGSGGNEKYFFENENVCMIFNAGELTLVEYGNNDTLGSVRTEFMNPHLISVRINERCQRGTEDNKKLAYLIDIKTIAIVDLIGGYNIGTVSHESRVDWLELNETGHKLLFRDRKLRLHLYDIESCSKTMILNFCSYMQWVPGSDVLVAQNRNSLCVWYNIEAPERVTMFTIRGDVIGLERGGGKTEVMVMEGVTTVAYTLDEGLIEFGTAIDDGNYIRATAFLETLEMTPETEAMWKTLSKLALEARQLHIAERCFSALGQVAKARFLHETNEIADQVSREYGGEGTDFYQVRARLAMLEKNYKLAEMIFLEQNAVEEAMGMYQELHRWDECIAVAEAKGHPALEKLRRSYYQWLMDTQQEERAGELQESQGDGLAAISLYLKAGLPAKAARLVLTREELLANTELVEHITAALIKGELYERAGDLFEKIHNPQKALECYRKGNAFMKAVELARLAFPVEVVKLEEAWGDHLVQQKQLDAAINHYIEARCSIKAIEAALGARQWKKAIYILDLQDRNTASKYYPLVAQHYASLQEYEIAEELYTKGDRTKDAIDMYTQAGRWEQAHKLAMKCMRPEDVSVLYITQAQEMEKQGKYREAERLYVTVQEPDLAITMYKKHKLYDDMIRLVGKHHPDLLSDTHLHLGKELEAEGRLQEAEYHYLEAQEWKATVNMYRASGLWEEAYRVARTQGGANAHKHVAYLWAKSLGGEAAVRLLNKLGLLEAAVDHAADNCSFEFAFELSRLALKHKTPEVHLKYAMFLEDEGKFEEAEAEFIRAGKPKEAVLMFVHNQDWEAAQRVAEAHDPDSVAEVLVGQARGALEEKDFQKAEGLLLRAQRPGLALNYYKEAGLWSDALRICKDYVPSQLEALQEEYEREATKKGARGVEGFVEQARHWEQAGEYSRAVDCYLKVRDSGNSGLAEKCWMKAAELSIKFLPPQRNMEVVLAVGPQLIGIGKHSAAAELYLNLDLVKEAIDAFIEGEEWNKAKRVAKELDPRYEDYVDQHYKEFLKNQGKVDSLVGVDVIAALDLYVEQGQWDKCIETATKQNYKILHKYVALYATHLIREGSSAQALALYVQHGAPANPQNFNIYKRIFTDMVSSPGTNCAEAYHSWADLRDVLFNLCENLVKSSEANSPAHEEFKTMLLIAHYYATRSAAQSVKQLETVAARLSVSLLRHTQLLPVDKAFYEAGIAAKAVGWDNMAFIFLNRFLDLTDAIEEGTLDGLDHSDFQDTDIPFEVPLPAKQHVPEAEREEVRDWVLTVSMDQRLEQVLPRDERGAYEASLVAASTGVRALPCLITGYPILRNKIEFKRPGKAANKDNWNKFLMAIKTSHSPVCQDVLKFISQWCGGLPSTSFSFQ

SEQ ID NO: 1395 - protein, 397 aa, Homo sapiens
MAGYEYVSPEQLAGFDKYKYSAVDTNPLSLYVMHPFWNTIVKVFPTWLAPNLITFSGFLLVVFNFLLMAYFDPDFYASAPGHKHVPDWVWIVVGILNFVAYTLDGVDGKQARRTNSSTPLGELFDHGLDSWSCVYFVVTVYSIFGRGSTGVSVFVLYLLLWVVLFSFILSHWEKYNTGILFLPWGYDISQVTISFVYIVTAVVGVEAWYEPFLFNFLYRDLFTAMIIGCALCVTLPMSLLNFFRSYKNNTLKLNSVYEAMVPLFSPCLLFILSTAWILWSPSDILELHPRVFYFMVGTAFANSTCQLIVCQMSSTRCPTLNWLLVPLFLVVLVVNLGVASYVESILLYTLTTAFTLAHIHYGVRVVKQLSSHFQIYPFSLRKPNSDULGMEEKNIGL

SEQ ID NO: 1396 - protein, 1144 aa, Homo sapiens
MPRNQGFSEPEYSAEYSAEYSVSLPSDPDRGVGRTHEISVRNSGSCLCLPRFMRLTFVPESLENLYQTYFKRQRHETLLVLVVFAALFDCYVVVMCAVVFSSDKLASLAVAGIGLVLDIILFVLCKKGLLPDRVTRRVLPYVLWLLITAQIFSYLGLNFARAHAASDTVGWQVFFVFSFFITLPLSLSPIVIISVVSCVVHTLVLGVTVAQQQQEELKGMQLLREILANVFLYLCAIAVGIMSYYMADRKHRKAFLEARQSLEVKMNLEEQSQQQENLMLSILPKHVADEMLKDMKKDESQKDQQQFNTMYMYRHENVSILFADIVGFTQLSSACSAQELVKLLNELFARFDKLAAKYHQLRIKILGDCYYCICGLPDYREDHAVCSILMGLAMVEAISYVREKTKTGVDMRVGVHTGTVLGGVLGQKRWQYDVWSTDVTVANKMEAGGIPGRVHISQSTMDCLKGEFDVEPGDGGSRCDYLEEKGIETYLIIASKPEVKKTATQNGLNGSALPNGAPASSKSSSPALIETKEPNGSAHSSGSTSEKPEEQDAQADNPSFPNPRRRLRLQDLADRVVDASEDEHELNQLLNEALLERESAQVVKKRNTFLLSMRFMDPEMETRYSVEKEKQSGAAFSCSCVVLLCTALVEILIDPWLMTNYVTFMVGEILLLILTICSLAAIFPRAFPKKLVAFSTWIDRTRWARNTWAMLAIFILVMANVVDMLSCLQYYTGPSNATAGMETEGSCLENPKYYNYVAVLSLIATIMLVQVSHMVKLTLMLLVAGAVATINLYAWRPVFDEYDHKRFREHDLPMVALEQMQGFNPGLNGTDRLPLVPSKYSMTVMVFLMMLSFYYFSRHVEKLARTLFLWKIEVHDQKERVYEMRRWNEALVTNMLPEHVARHFLGSKKRDEELYSQTYDEIGVMFASLPNFADFYTEESINNGGIECLRFLNEIISDFDSLLDNPKFRVITKIKTIGSTYMAASGVTPDVNTNGFASSNKEDKSERERWQHLADLADFALAMKDTLTNINNQSFNNFMLRIGMNKGGVLAGVIGARKPHYDIWGNTVNVASRMESTGVMGNIQVVEETQVILREYGFRFVRRGPIFVKGKGELLTFFLKGRDKLATFPNGPSVTLPHQVVDNS

SEQ ID NO: 1397 - protein, 351 aa, Homo sapiens
MPSETLWEIAKAEVEKRGINGSEGDGAEIAEKFVFFIGSKNGGKTTIILRCLDRDEPPKPTLALEYTYGRRAKGHNTPKDIAHFWELGGGTSLLDLISIPITGDTLRTFSLVLVLDLSKPNDLWPTMENLLQATKSHVDKVIMKLGKTNAKAVSEMRQKIWNNMPKDHPDHELIDPFPVPLVIIGSKYDVFQDFESEKRKVICKTLRFVAHYYGASLMFTSKSEALLLKIRGVINQLAFGIDKSKSICVDQNKPLFITAGLDSFGQIGSPPVPENDIGKLHAHSPMELWKKVYEKLFPPKSINTLKDIKDPARDPQYAENEVDEMRIQKDLELEQYKRSSSKSWKQIELDS

SEQ ID NO: 1398 - protein, 394 aa, Homo sapiens
MDSQGRKVVVCDNGTGFVKCGYAGSNFPEHIFPALVGRPIIRSTTKVGNIEIKDLMVGDEASELRSMLEVNYPMENGIVRNWDDMKHLWDYTFGPEKLNIDTRNCKILLTEPPMNPTKNREKIVEVMFETYQFSGVYVAIQAVLTLYAQGLLTGVVVDSGDGVTHICPVYEGFSLPHLTRRLDIAGRDITRYLIKLLLLRGYAFNHSADFETVRMIKEKLCYVGYNIEQEQKLALETTVLVESYTLPDGRIIKVGGERFEAPEALFQPHLINVEGVGVAELLFNTIQAADIDTRSEFYKHIVLSGGSTMYPGLPSRLERELKQLYLERVLKGDVEKLSKFKIRIEDPPRRKHMVFLGGAVLADIMKDKDNFWMTRQEYQEKGVRVLEKLGVTVR

SEQ ID NO: 1399 - protein, 685 aa, Homo sapiens
MAEDKSKRDSIEMSMKGCQTNNGFVHNEDILEQTPDPGSSTDNLKHSTRGILGSQEPDFKGVQPYAGMPKEVLFQFSGQARYRIPREILFWLTVASVLVLIAATIAIIALSPKCLDWWQEGPMYQIYPRSFKDSNKDGNGDLKGIQDKLDYITALNIKTVWITSFYKSSLKDFRYGVEDFREVDPIFGTMEDFENLVAAIHDKGLKLIIDFIPNHTSDKHIWFQLSRTRTGKYTDYYIWHDCTHENGKTIPPNNWLSVYGNSSWHFDEVRNQCYFHQFMKEQPDLNFRNPDVQEEIKEILRFWLTKGVDGFSLDAVKFLLEAKHLRDEIQVNKTQIPDTVTQYSELYHDFTTTQVGMHDIVRSFRQTMDQYSTEPGRYRFMGTEAYAESIDRTVMYYGLPFIQEADFPFNNYLSMLDTVSGNSVYEVITSWMENMPEGKWPNWMIGGPDSSRLTSRLGNQYVNVMNMLLFTLPGTPITYYGEEIGMGNIVAANLNESYDINTLRSKSPMQWDNSSNAGFSEASNTWLPTNSDYHTVNVDVQKTQPRSALKLYQDLSLLHANELLLNRGWFCHLRNDSHYVVYTRELDGIDRIFIVVLNFGESTLLNLHNMISGLPAKMRIRLSTNSADKGSKVDTSGIFLDKGEGLIFEHNTKNLLHRQTAFRDRCFVSNRACYSSVLNILYTSC

SEQ ID NO: 1400 - protein, 332 aa, Homo sapiens
MVFRSPLDLYSSHFLLPNFADSHHRSILLASSGGGNGAGGGGGAGGGSGGGNGAGGGGAGGAGGGGGGGSRAPPEELSMFQLPTLNFSPEQVASVCETLEETGDIERLGRFLWSLPVAPGACEAINKHESILRARAVVAFHTGNFRDLYHILENHKFTKESHGKLQAMWLEAHYQEAEKLRGRPLGPVDKYRVRKKFPLPRTIWDGEQKTHCFKERTRSLLREWYLQDPYPNPSKKRELAQATGLTPTQVGNWFKNRRQRDRAAAAKNRLQHQAIGPSGMRSLAEPGCPTHGSAESPSTAASPTTSVSSLTERADTGTSILSVTSSDSECDV

SEQ ID NO: 1401 - protein, 300 aa, Homo sapiens
MEQANPLRPDGESKGGVLAHLERLETQVSRSRKQSEELQSVQAQEGALGTKIHKLRRLRDELRAVVRHRRASVKACIANVEPNQTVEINEQEALEEKLENVKAILQAYHFTGLSGKLTSRGVCVCISTAFEGNLLDSYFVDLVIQKPLRIHHHSVPVFIPLEEIAAKYLQTNIQHFLFSLCEYLNAYSGRKYQADRLQSDFAALLTGPLQRNPLCNLLSFTYKLDPGGQSFPFCARLLYKDLTATLPTDVTVTCQGVEVLSTSWEEQRASHETLFCTKPLHQVFASFTRKGEKLDMSLVS

SEQ ID NO: 1402 - protein, 490 aa, Homo sapiens [sequence omitted]

SEQ ID NO: 1403 - protein, 756 aa, Homo sapiens
MAWSPPATLFLFLLLLGQPPPSRPQSLGTTKLRLVGPESKPEEGRLEVLHQGQWGTVCDDNFAIQEATVACRQLGFEAALTWAHSAKYGQGEGPIWLDNVRCVGTESSLDQCGSNGWGVSDCSHSEDVGVICHPRRHRGYLSETVSNALGPQGRRLEEVRLKPILASAKQHSPVTEGAVEVKYEGHWRQVCDQGWTMNNSRVVCGMLGFPSEVPVDSHYYRKVWDLKMRDPKSRLKSLTNKNSFWIHQVTCLGTEPHMANCQVQVAPARGKLRPACPGGMHAVVSCVAGPHFRPPKTKPQRKGSWAEEPRVRLRSGAQVGEGRVEVLMNRQWGTVCDHRWNLISASVVCRQLGFGSAREALFGARLGQGLGPIHLSEVRCRGYERTLSDCPALEGSQNGCQHENDAAVRCNVPNMGFQNQVRLAGGRIPEEGLLEVQVEVNGVPRWGSVCSENWGLTEAMVACRQLGLGFAIHAYKETWFWSGTPRAQEVVMSGVRCSGTELALQQCQRHGPVHCSHGGGRFLAGVSCMDSAPDLVMNAQLVQETAYLEDRPLSQLYCAHEENCLSKSADHMDWPYGYRRLLRFSTQIYNLGRTDFRPKTGRDSWVWHQCHRHYHSIEVFTHYDLLTLNGSKVAEGHKASFCLEDTNCPTGLQRRYACANFGEQGVTVGCWDTYRHDIDCQWVDITDVGPGNYIFQVIVNPHYEVAESDFSNNMLQCRCKYDGHRVWLHNCHTGNSYPANAELSLEQEQRLRNNLI

SEQ ID NO: 1404 - protein, 506 aa, Homo sapiens
MIMSNTHKARLERRVTGSTNRWRLPKQPFSGDLLSLSQMCKALSIDFEEALRNPDRLCISQIQKFFFENFKNKDIQSGEADVILECLGFKWELHQPQLFQSETLAKLYLKALAQGTTHPLRELEELLRAQSPKKTKEKSPAKRIIISLKINDPLVTKVAFATALKNLYMSEVEINLEDLLGVLASAHILQFSGLFQRCVDVMIARLKPSTIKKFYEAGCKYKEEQLTTGCEKWLEMNLVPLGGTQIHLHKIPQDLLHKVLKSPRLFTFSEFHLLKTMLLWVFLQLNYKIQAIPTYETVMTFFKSFPENCCFLDRDIGRSLRPLFLCLRLHGITKGKDLEVLRHLNFFPESWLDQVTVNHYHALENGGDMVHLKDLNTQAVRFGLLFNQENTTYSKTIALYGFFFKIKGLKHDTTSYSFYMQRIKHTDLESPSAVYEHNHVSLRAARLVKYEIRAEALVDGKWQEFRTNQIKQKFGLTTSSCKSHTLKIQTVGIPIYVSFAFIFPAS

SEQ ID NO: 1405 - protein, 1026 aa, Homo sapiens
MGGSQSLQPAPASDLNLEASEAMSSDSEEAFETPESTTPVKAPPAPPPPPPEVIPEPEVSTQPPPEEPGCGSETVPVPDGPRSDSVEGSPFRPPSHSFSAVFDEDKPIASSGTYNLDFDNIELVDTFQTLEPRASDAKNQEGKVNTRRKSTDSVPISKSTLSRSLSLQASDFDGASSSGNPEAVALAPDAYSTGSSSASSTLKRTKKPRPPSLKKKQTTKKPTETPPVKETQQEPDEESLVPSGENLASETKTESAKTEGPSPALLEETPLEPAVGPKAACPLDSESAEGVVPPASGGGRVQNSPPVGRKTLPLTTAPEAGEVTPSDSGGQEDSPAKGLSVRLEFDYSEDKSSWDNQQENPPPTKKIGKKPVAKMPLRRPKMKKTPEKLDNTPASPPRSPAEPNDIPIAKGTYTFDIDKWDDPNFNPFSSTSKMQESPKLPQQSYNFDPDTCDESVDPFKTSSKTPSSPSKSPASFEIPASAMEANGVDGDGLNKPAKKKKTPLKTDTFRVKKSPKRSPLSDPPSQDPTPAATPETPPVISAVVHATDEEKLAVTNQKWTCMTVDLEADKQDYPQPSDLSTFVNETKFSSPTEELDYRNSYEIEYMEKIGSSLPQDDDAPKKQALYLMFDTSQESPVKSSPVRMSESPTPCSGSSFEETEALVNTAAKNQHPVPRGLAPNQESHLQVPEKSSQKELEAMGLGTPSEAIEITAPEGSFASADALLSRLAHPVSLCGALDYLEPDLAEKNPPLFAQKLQEELEFAIMRIEALKLARQIALASRSHQDAKREAAHPTDVSISKTALYSRIGTAEVEKPAGLLFQQPDLDSALQIARAEIITKEREVSEWKDKYEESRREVMEMRKIVAEYEKTIAQMIEDEQREKSVSHQTVQQLVLEKEQALADLNSVEKSLADLFRRYEKMKEVLEGFRKNEEVLKRCAQEYLSRVKKEEQRYQALKVHAEEKLDRANAEIAQVRGKAQQEQAAHQASLRKEQLRVDALERTLEQKNKEIEELTKICDELIAKMGKS

SEQ ID NO: 1406 - protein, 1780 aa, Homo sapiens
MESNFNQEGVPRPSYVFSADPIARPSEINFDGIKLDLSHEFSLVAPNTEANSFESKDYLQVCLRIRPFTQSEKELESEGCVHILDSQTVVLKEPQCILGRLSEKSSGQMAQKFSFSKVFGPATTQKEFFQGCIMQPVKDLLKGQSRLIFTYGLTNSGKTYTFQGTEENIGILPRTLNVLFDSLQERLYTKMNLKPHRSREYLRLSSEQEKEEIASKSALLRQIKEVTVHNDSDDTLYGSLTNSLNISEFEESIKDYEQANLNMANSIKFSVWVSFFEIYNEYIYDLFVPVSSKFQKRKMLRLSQDVKGYSFIKDLQWIQVSDSKEAYRLLKLGIKHQSVAFTKLNNASSRSHSIFTVKILQIEDSEMSRVIRVSELSLCDLAGSERTMKTQNEGERLRETGNINTSLLTLGKCINVLKNSEKSKFQQHVPFRESKLTHYFQSFFNGKGKICMIVNISQCYLAYDETLNVLKFSAIAQKVCVPDTLNSSQEKLFGPVKSSQDVSLDSNSNSKILNVKRATISWENSLEDLMEDEDLVEELENAEETQNVETKLLDEDLDKTLEENKAFISHEEKRKLLDLIEDLKKKLINEKKEKLTLEFKIREEVTQEFTQYWAQREADFKETLLQEREILEENAERRLAIFKDLVGKCDTREEAAKDICATKVETEEATACLELKFNQIKAELAKTKGELIKTKEELKKRENESDSLIQELETSNKKIITQNQRIKELINIIDQKEDTINEFQNLKSHMENTFKCNDKADTSSLIINNKLICNETVEVPKDSKSKICSERKRVNENELQQDEPPAKKGSIHVSSAITEDQKKSEEVRPNIAEIEDIRVLQENNEGLRAFLLTIENELKNEKEEKAELNKQIVHFQQELSLSEKKNLTLSKEVQQIQSNYDIAIAELHVQKSKNQEQEEKIMKLSNEIETATRSITNNVSQIKLMHTKIDELRTLDSVSQISNIDLLNLRDLSNGSEEDNLPNTQLDLLGNDYLVSKQVKEYRIQEPNRENSFHSSIEAIWEECKEIVKASSKKSHQIEELEQQIEKLQAEVKGYKDENNRLKEKEHKNQDDLLKEKETLIQQLKEELQEKNVTLDVQIQHVVEGKRALSELTQGVTCYKAKIKELETILETQKVECSHSAKLEQDILEKESIILKLERNLKEFQEHLQDSVKNTKDLNVKELKLKEEITQLTNNLQDMKHLLQLKEEEEETNRQETEKLKEELSASSARTQNLKADLQRKEEDYADLKEKLTDAKKQIKQVQKEVSVMRDEDKLLRIKINELEKKKNQCSQELDMKQRTIQQLKEQLNNQKVEEAIQQYERACKDLNVKEKIIEDMRMTLEEQEQTQVEQDQVLEAKLEEVERLATELEKWKEKCNDLETKNNQRSNKEHENNTDVLGKLTNLQDELQESEQKYNADRKKWLEEKMMLITQAKEAENIRNKEMKKYAEDRERFFKQQNEMEILTAQLTEKDSDLQKWREERDQLVAALEIQLKALISSNVQKDNEIEQLKRIISETSKIETQIMDIKPKRISSADPDKLQTEPLSTSFEISRNKIEDGSVVLDSCEVSTENDQSTRFPKPELEIQFTPLQPNKMAVKHPGCTTPVTVKIPKARKRKSNEMEEDLVKCENKKNATPRTNLKFPISDDRNSSVKKEQKVAIRPSSKKTYSLRSQASIIGVNLATKKKEGTLQKFGDFLQHSPSILQSKAKKIIETMSSSKLSNVEASKENVSQPKRAKRKLYTSEISSPIDISGQVILMDQKMKESDHQIIKRRLRTKTAK

SEQ ID NO: 1407 - protein, 804 aa, Homo sapiens
MAENSESLGTVPEHERILQEIESTDTACVGPTLRSVYDDQPNAHKKFMEKLDACIRNHDKEIEKMCNFHHQGFVDAITELLKVRTDAEKLKVQVTDTNRRFQDAGKEVIVHTEDIIRCRIQQRNITTVVEKLQLCLPVLEMYSKLKEQMSAKRYYSALKTMEQLENVYFPWVSQYRFCQLMIENLPKLREDIKEISMSDLKDFLESIRKHSDKIGETAMKQAQHQKTFSVSLQKQNKMKFGKNMYINRDRIPEERNETVLKHSLEEEDENEEEILTVQDLVDFSPVYRCLHIYSVLGDEETFENYYRKQRKKQARLVLQPQSNMHETVDGYRRYFTQIVGFFVVEDHILHVTQGLVTRAYTDELWNMALSKIIAVLRAHSSYCTDPDLVLELKNLTVIFADTLQGYGFPVNRLFDLLFEIRDQYNETLLKKWAGVFRDIFEEDNYSPIPVVNEEEYKIVISKFPFQDPDLEKQSFPKKFPMSQSVPHIYIQVKEFIYASLKFSESLHRSSTEIDDMLRKSTNLLLTRTLSSCLLNLIRKPHIGLTELVQIIINTTHLEQACKYLEDFITNITNISQETVHTTRLYGLSTFKDARHAAEGEIYTKLNQKIDEFVQLADYDWTMSEPDGRASGYLMDLINFLRSIFQVFTHLPGKVAQTACMSACQHLSTSLMQMLLDSELKQISMGAVQQFNLDVIQCELFASSEPVPGFQGDTLQLAFIDLRQLLDLFMVWDWSTYLADYGQPASKYLRVNPNTALTLLEKMKDTSKKNNIFAQFRKNDRDKQKLIETVVKQLRSLVNGMSQHM

SEQ ID NO: 1408 - protein, 571 aa, Homo sapiens
MVIEEVNFMQNHLEIEKTCRESAEALATKLNKENKTLKRISMLYMAKLGPDVITEEINIDDEDSTTDTDGAAETCVSVQCQKQIKELRDQIVSVQEEKKILAIELENLKSKLVEVIEEVNKVKQEKTVLNSEVLEQRKVLEKCNRVSMLAVEEYEEMQVNLELEKDLRKKAESFAQEMFIEQNKLKRQSHLLLQSSIPDQQLLKALDENAKLTQQLEEERIQHQQKVKELEEQLENETLHKEIHNLKQQLELLEEDKKELELKYQNSEEKARNLKHSVDELQKRVNQSENSVPPPPPPPPPLPPPPPNPIRSLMSMIRKRSHPSGSGAKKEKATQPETTEEVTDLKRQAVEEMMDRIKKGVHLRPVNQTARPKTKPESSKGCESAVDELKGILGTLNKSTSSRSLKSLDPENSETELERILRRRKVTAEADSSSPTGILATSESKSMPVLGSVSSVTKTALNKKTLEAEFNSPSPPTPEPGEGPRKLEGCTSSKVTFQPPSSIGCRKKYIDGEKQAEPVVVLDPVSTHEPQTKDQVAEKDPTQHKEDEGEIQPENKEDSIENVRETDSSNC

SEQ ID NO: 1409 - protein, 364 aa, Homo sapiens
MGAPACALALCVAVAIVAGASSESLGTEQRVVGRAAEVPGPEPGQQEQLVFGSGDAVELSCPPPGGGPMGPTVWVKDGTGLVPSERVLVGPQRLQVLNASHEDSGAYSCRQRLTQRVLCHFSVRVTDAPSSGDDEDGEDEAEDTGVDTGAPYWTRPERMDKKLLAVPAANTVRFRCPAAGNPTPSISWLKNGREFRGEHRIGGIKLRHQQWSLVMESVVPSDRGNYTCVVENKFGSIRQTYTLDVLERSPHRPILQAGLPANQTAVLGSDVEFHCKVYSDAQPHIQWLKHVEVNGSKVGPDGTPYVTVLKSWISESVEADVRLRLANVSERDGGEYLCRATNFIGVAEKAFWLSVHGPRADGGR

SEQ ID NO: 1410 - protein, 544 aa, Homo sapiens
MRVAVAGCCHGELDKIYETLALAERRGPGPVDLLLCCGDFQAVRNEADLRCMAVPPKYRHMQTFYRYYSGEKKAPVLTLFIGGNHEASNHLQELPYGGWVAPNIYYLGLAGVVKYRGVRIGGISGIFKSHDYRKGHFECPPYNSSTIRSIYHVRNIEVYKLKQLKQPIDIFLSHDWPRSIYHYGNKKQLLKTKSFFRQEVENNTLGSPAASELLEHLKPTYWFSAHLHVKFAALMQHQAKDKGQTARATKFLALDKCLPHRDFLQILEIEHDPSAPDYLEYDIEWLTILRATDDLINVTGRLWNMPENNGLHARWDYSATEEGMKEVLEKLNHDLKVPCNFSVTAACYDPSKPQTQMQLIHRINPQTTEFCAQLGIIDINVRLQKSKEEHHVCGEYEEQDDVESNDSGEDQSEYNTDTSALSSINPDEIMLDEEEDEDSIVSAHSGMNTPSVEPSDQASEFSASFSDVRILPGSMIVSSDDTVDSTIDREGKPGGTVESGNGEDLTKVPLKRLSDEHEPEQRKKIKRRNQAIYAAVDDDDDDAA

SEQ ID NO: 1411 - protein, 1522 aa, Homo sapiens
MSRNDKEPFFVKFLKSSDNSKCFFKALESIKEFQSEEYLQIITEEEALKIKENDRSLYICDPFSGVVFDHLKKLGCRIVGPQVVIFCMHHQRCVPRAEHPVYNMVMSDVTISCTSLEKEKREEVHKYVQMMGGRVYRDLNVSVTHLIAGEVGSKKYLVAANLKKPILLPSWIKTLWEKSQEKKITRYTDINMEDFKCPIFLGCIICVTGLCGLDRKEVQQLTVKHGGQYMGQLKMNECTHLIVQEPKGQKYECAKRWNVHCVTTQWFFDSIEKGFCQDESIYKTEPRPEAKTMPNSSTPTSQINTIDSRTLSDVSNISNINASCVSESICNSLNSKLEPTLENLENLDVSAFQAPEDLLDGCRIYLCGFSGRKLDKLRRLINSGGGVRFNQLNEDVTHVIVGDYDDELKQFWNKSAHRPHVVGAKWLLECFSKGYMLSEEPYIHANYQPVEIPVSHKPESKAALLKKKNSSFSKKDFAPSEKHEQADEDLLSQYENGSSTVVEAKTSEARPFNDSTHAEPLNDSTHISLQEENQSSVSHCVPDVSTITEEGLFSQKSFLVLGFSNENESNIANIIKENAGKIMSLLSRTVADYAVVPLLGCEVEATVGEVVTNTWLVTCIDYQTLFDPKSNPLFTPVPVMTGMTPLEDCVISFSQCAGAEKESLTFLANLLGASVQEYFVRKSNAKKGMFASTHLILKERGGSKYEAAKKWNLPAVTIAWLLETARTGKRADESHFLIENSTKEERSLETEITNGINLNSDTAEHPGTRLQTHRKTVVTPLDMNRFQSKAFRAVVSQHARQVAASPAVGQPLQKEPSLHLDTPSKFLSKDKLFKPSFDVKDALAALETPGRPSQQKRKPSTPLSEVIVKNLQLALANSSRNAVALSASPQLKEAQSEKEEAPKPLHKVVVCVSKKLSKKQSELNGIAASLGADYRWSFDETVTHFIYQGRPNDTNREYKSVKERGVHIVSEHWLLDCAQECKHLPESLYPHTYNPKMSLDISAVQDGRLCNSRLLSAVSSTKDDEPDPLILEENDVDNMATNNKESAPSNGSGKNDSKGVLTQTLEMRENFQKQLQEIMSATSIVKPQGQRTSLSRSGCNSASSTPDSTRSARSGRSRVLEALRQSRQTVPDVNTEPSQNEQIIWDDPTAREERARLASNLQWPSCPTQYSELQVDIQNLEDSPFQKPLHDSEIAKQAVCDPGNIRVTEAPKHPISEELETPIKDSHLIPTPQAPSIAFPLANPPVAPHPREKIITIEETHEELKKQYIFQLSSLNPQERIDYCHLIEKLGGLVIEKQCFDPTCTHIVVGHPLRNEKYLASVAAGKWVLHRSYLEACRTAGHFVQEEDYEWGSSSILDVLTGINVQQRRLALAAMRWRKKIQQRQESGIVEGAFSGWKVILHVDQSREAGFKRLLQSGGAKVLPGHSVPLFKEATHLFSDLNKLKPDDSGVNIAEAAAQNVYCLRTEYIADYLMQESPPHVENYCLPEAISFIQNNKELGTGLSQKRKAPTEKNKIKRPRVH

SEQ ID NO: 1412 - protein, 2243 aa, Homo sapiens
MNIIRENKDLACFYTTKHSWRGKYKRVFSVGTHAITTYNPNTLEVTNQWPYGDICSISPVGKGQGTEFNLTFRKGSGKKSETLKFSTEHRTELLTEALRFRTDFSEGKITGRRYNCYKHHWSDSRKPVILEVTPGGFDQINPATNRVLCSYDYRNIEGFVDLSDYQGGFCILYGGFSRLHLFASEQREEIIKSAIDHAGNYIGISLRIRKEPLEFEQYLNLRFGKYSTDESITSLAEFVVQKISPRHSEPVKRVLALTETCLVERDPATYNIATLKPLGEVFALVCDSENPQLFTIEFIKGQVRKYSSTERDSLLASLLDGVRASGNRDVCVKMTPTHKGQRWGLLSMPVDEEVESLHLRFLATPPNGNFADAVFRFNANISYSGVLHAVTQDGLFSENKEKLINNAITALLSQEGDVVASNAELESQFQAVRRLVASKAGFLAFTQLPKFRERLGVKVVKALKRSNNGIIHAAVDMLCALMCPMHDDYDLRQEQLNKASLLSSKKFLENLLEKFNSHVDHGTGALVISSLLDFLTFALCAPYSETTEGQQFDMLLEMVASNGRTLFKLFQHPSMAIIKGAGLVMKAIIEEGDKEIATKMQELALSEGALPRHLHTAMFTISSDQRMLTNRQLSRHLVGLWTADNATATNLLKRILPPGLLAYLESSDLVPEKDADRMHVRDNVKIAMDQYGKFNKVPEWQRLAGKAAKEVEKFAKEKVDLVLMHWRDRMGIAQKENINQKPVVLRKRRQRIKIEANWDLFYYRFGQDHARSNLIWNFKTREELKDTLESEMRAFNIDRELGSANVISWNHHEFEVKYECLAEEIKIGDYYLRLLLEEDENEESGSIKRSYEFFNELYHRFLLTPKVNMKCLCLQALAIVYGRCHEEIGPFTDTRYIIGMLERCTDKLERDRLILFLNKLILNKKNVKDLMDSNGIRILVDLLTLAHLHVSRATVPLQSNVIEAAPDMKRESEKEWYFGNADKERSGPYGFHEMQELWTKGMLNAKTRCWAQGMDGWRPLQSIPQLKWCLLASGQAVLNETDLATLILNMLITMCGYFPSRDQDNAIIRPLPKVKRLLSDSTCLPHIIQLLLTFDPILVEKVAILLYHIMQDNPQLPRLYLSGVFFFIMMYTGSNVLPVARFLKYTHTKQAFKSEETKGQDIFQRSILGHILPEAMVCYLENYEPEKFSEIFLGEFDTPEAIWSSEMRRLMIEKIAAHLADFTPRLQSNTRALYQYCPIPIINYPQLENELFCNIYYLKQLCDTLRFPDWPIKDPVKLLKDTLDAWKKEVEKKPPMMSIDDAYEVLNLPQGQGPHDESKIRKAYFRLAQKYHPDKNPEGRDMFEKVNKAYEFLCTKSAKIVDGPDPENIILILKTQSILFNRHKEDLQPYKYAGYPMLIRTITMETSDDLLFSKESPLLPAATELAFHTVNCSALNAEELRRENGLEVLQEAFSRCVAVLTRASKPSDMSVQVCGYISKCYSVAAQFEECREKITEMPSIIKDLCRVLYFGKSIPRVAALGVECVSSFAVDFWLQTHLFQAGILWYLLGFLFNYDYTLEESGIQKSEETNQQEVANSLAKLSVHALSRLGGYLAEEQATPENPTIRKSLAGMLTPYVARKLAVASVTEILKMLNSNTESPYLIWNNSTRAELLEFLESQQENMIKKGDCDKTYGSEFVYSDHAKELIVGEIFVRVYNEVPTFQLEVPKAFAASLLDYIGSQAQYLHTFMAITHAAKVESEQHGDRLPRVEMALEALRNVIKYNPGSESECIGHFKLIFSLLRVHGAGQVQQLALEVVNIVTSNQDCVNNIAESMVLSSLLALLHSLPSSRQLVLETLYALTSSTKIIKEAMAKGALIYLLDMFCNSTHPQVRAQTAELFAKMTADKLIGPKVRITLMKFLPSVFMDAMRDNPEAAVHIFEGTHENPELIWNDNSRDKVSTTVREMMLEHFKNQQDNPEANWKLPEDFAVVFGEAEGELAVGGVFLRIFIAQPAWVLRKPREFLIALLEKLTELLEKNNPHGETLETLTMATVCLFSAQPQLADQVPPLGHLPKVIQAMNHRNNAIPKSAIRVIHALSENELCVRAMASLETIGPLMNGMKKRADTVGLACEAINRMFQKEQSELVAQALKADLVPYLLKLLEGIGLENLDSPAATKAQIVKALKAMTRSLQYGEQVNEILCRSSVWSAFKDQKHDLFISESQTAGYLTGPGVAGYLTAGTSTSVMSNLPPPVDHEAGDLGYQT

SEQ ID NO: 1413 - protein, 358 aa, Homo sapiens
MGFNLTLAKLPNNELHGQESHNSGNRSDGPGKNTTLHNEFDTIVLPVLYLIIFVASILLNGLAVWIFFHIRNKTSFIFYLKNIVVADLIMTLTFPFRIVHDAGFGPWYFKFILCRYTSVLFYANMYTSIVFLGLISIDRYLKVVKPFGDSRMYSITFTKVLSVCVWVIMAVLSLPNIILTNGQPTEDNIHDCSKLKSPLGVKWHTAVTYVNSCLFVAVLVILIGCYIAISRYIHKSSRQFISQSSRKRKHNQSIRVVVAVFFTCFLPYHLCRIPFTFSHLDRLLDESAQKILYYCKEITLFLSACNVCLDPIIYFFMCRSFSRRLFKKSNIRTRSESIRSLQSVRRSEVRIYYDYTDV

SEQ ID NO: 1414 - protein, 733 aa, Homo sapiens
MERRSESPCLRDSPDRRSGSPDVKGPPPVKVARLEQNGSPMGARGRPNGAVAKAVGGLMIPVFCVVEQLDGSLEYDNREEHAEFVLVRKDVLFSQLVETALLALGYSHSSAAQAQGIIKLGRWNPLPLSYVTDAPDATVADMLQDVYHVVTLKIQLQSCSKLEDLPAEQWNHATVRNALKELLKEMNQSTLAKECPLSQSMISSIVNSTYYANVSATKCQEFGRWYKKYKKIKVERVERENLSDYCVLGQRPMHLPNMNQLASLGKTNEQSPHSQIHHSTPIRNQVPALQPIMSPGLLSPQLSPQLVRQQIAMAHLINQQIAVSRLLAHQHPQAINQQFLNHPPIPRAVKPEPTNSSVEVSPDIYQQVRDELKRASVSQAVFARVAFNRTQGLLSEILRKEEDPRTASQSLLVNLRAMQNFLNLPEVERDRIYQDERERSMNPNVSMVSSASSSPSSSRTPQAKTSTPTTDLPIKVDGANINITAAIYDEIQQEMKRAKVSQALFAKVAANKSQGWLCELLRWKENPSPENRTLWENLCTIRRFLNLPQHERDVIYEEESRHHHSERMQHVVQLPPEPVQVLHRQQSQPAKESSPPREEAPPPPPPTEDSCAKKPRSRTKISLEALGILQSFIHDVGLYPDQEAIHTLSAQLDLPKHTIIKFFQNQRYHVKHHGKLKEHLGSAVDVAEYKDEELLTESEENDSEEGSEEMYKVEAEEENADKSKAAPAEIDQR

SEQ ID NO: 1415 - protein, 730 aa, Homo sapiens
KPATGLWVWVSLLVAAGTVQPSDSQSVCAGTENKLSSLSDLEQQYRALRKYYENCEVVMGNLEITSIEHNRDLSFLRSVREVTGYVLVALNQFRYLPLENLRIIRGTKLYEDRYALAIFLNYRKDGNFGLQELGLKNLTEILNGGVYVDQNKFLCYADTIHWQDIVRNPWPSNLTLVSTNGSSGCGRCHKSCTGRCWGPTENHCQTLTRTVCAEQCDGRCYGPYVSDCCHRECAGGCSGPKDTDCFACMNFNDSGACVTQCPQTFVYNPTTFQLEHNFNAKYTYGAFCVKKCPHNFVVDSSSCVRACPSSKMEVEENGIKMCKPCTDICPKACDGIGTGSLMSAQTVDSSNIDKFINCTKINGNLIFLVTGIHGDPYNAIEAIDPEKLNVFRTVREITGFLNIQSWPPNMTDFSVFSNLVTIGGRVLYSGLSLLILKQQGITSLQFQSLKEISAGNIYITDNSNLCYYHTINWTTLFSTINQRIVIRDNRKAENCTAEGMVCNHLCSSDGCWGPGPDQCLSCRRFSRGRICIESCNLYDGEFREFENGSICVECDPQCEKMEDGLLTCHGPGPDNCTKCSHFKDGPNCVEKCPDGLQGANSFIFKYADPDRECHPCHPNCTQGCIGSSIEDCIGLMDRTPLIAAGVIGGLFILVIVGLTFAVYVRRKSIKKKRALRRFLETELVEPLTPSGTAPNQAQLRILKETELKRVKVLGSGAFGTVYKGIWVPEG

SEQ ID NO: 1416 - protein, 777 aa, Homo sapiens
MPDNRQPRNRQPRIRSGNEPRSAPAMEPDGRGAWAHSRAALDRLEKLLRCSRCTNILREPVCLGGCEHIFCSNCVSDCIGTGCPVCYTPAWIQDLKINRQLDSMIQLCSKLRNLLHDNELSDLKEDKPRKSLFNDAGNKKNSIKMWFSPRSKKVRYVVSKASVQTQPAIKKDASAQQDSYEFVSPSPPADVSERAKKASARSGKKQKKKTLAEINQKWNLEAEKEDGEFDSKEESKQKLVSFCSQPSVISSPQINGEIDLLASGSLTESECFGSLTEVSLPLAEQIESPDTKSRNEVVTPEKVCKNYLTSKKSLPLENNGKRGHHNRLSSPISKRCRTSILSTSGDFVKQTVPSENIPLPECSSPPSCKRKVGGTSGRKNSNMSDEFISLSPGTPPSTLSSSSYRRVMSSPSAMKLLPNMAVKRNHRGETLLHIASIKGDIPSVEYLLQNGSDPNVKDHAGWTPLHEACNHGHLKVVELLLQHKALVNTTGYQNDSPLHDAAKNGHVDIVKLLLSYGASRNAVNIFGLRPVDYTDDESMKSLLLLPEKNESSSASHCSVMNTGQRRDGPLVLIGSGLSSEQQKMLSELAVILKAKKYTEFDSTVTHVVVPGDAVQSTLKCMLGILNGCWILKFEWVKACLRRKVCEQEEKYEIPEGPRRSRLNREQLLPKLFDGCYFYLWGTFKHHPKDNLIKLVTAGGGQILSRKPKPDSDVTQTINTVAYHARPDSDQRFCTQYIIYEDLCNYHPERVRQGKVWKAPSSWFIDCVMSFELLPLDS

SEQ ID NO: 1417 - protein, 375 aa, Homo sapiens
MQKLQLCVYIYLFMLIVAGPVDLNENSEQKENVEKEGLCNACTWRQNTKSSRIEAIKIQILSKLRLETAPNISKDVIRQLLPKAPPLRELIDQYDVQRDDSSDGSLEDDDYHATTETIITMPTESDFLMQVDGKPKCCFFKFSSKIQYNKVVKAQLWIYLRPVETPTTVFVQILRLIKPMKDGTRYTGIRSLKLDMNPGTGIWQSIDVKTVLQNWLKQPESNLGIEIKALDENGHDLAVTFPGPGEDGLNPFLEVKVTDTPKRSRRDFGLDCDEHSTESRCCRYPLTVDFEAFGWDWIIAPKRYKANYCSGECEFVFLQKYPHTHLVHQANPRGSAGPCCTPTKMSPINMLYFNGKEQIIYGKIPAMVVDRCGCS

SEQ ID NO: 1418 - protein, 754 aa, Homo sapiens
MGIKVQRPRCFFDIAINNQPAGRVVFELFSDVCPKTCENFRCLCTGEKGTGKSTQKPLHYKSCLFHRVVKDFMVQGGDFSEGNGRGGESIYGGFFEDESFAVKHNKEFLLSMANRGKDTNGSQFFITTKPTPHLDGHHVVFGQVISGQEVVREIENQKTDAASKPFAEVRILSCGELIPKSKVKKEEKKRHKSSSSSSSSSSDSDSSSDSQSSSDSSDSESATEEKSKKRKKKHRKNSRKHKKEKKKRKKSKKSASSESEAENLEAQPQSTVRPEEIPPIPENRFLMRKSPPKADEKERKNRERERERECNPPNSQPASYQRRLLVTRSGRKIKGRGPRRYRTPSRSRSRDRFRRSETPPHWRQEMQRAQRMRVSSGERWIKGDKSELNEIKENQRSPVRVKERKITDHRNVSESPNRKNEKEKKVKDHKSNSKERDIRRNSEKDDKYKNKVKKRAKSKSRSKSKEKSKSKERDSKHNRNEEKRMRSRSKGRDHENVKEKEKQSDSKGKDQERSRSKEKSKQLESKSNEHDHSKSKEKDRRAQSRSRECDITKGKHSYNSRTRERSRSRDRSRRVRSRTHDRDRSRSKEYHRYREQEYRRRGRSRSRERRTPPGRSRSKDRRRRRRDSRSSEREESQSRNKDKYRNQESKSSHRKENSESEKRMYSKSRDHNSSNNSREKKADRDQSPFSKIKQSSQDNELKSSMLKNKEDEKIRSSVEKENQKSKGQENDHVHEKNKKFDHESSPGTDEDKSG

SEQ ID NO: 1419 - protein, 1572 aa, Homo sapiens
MASSAREHLLFVRRRNPQMRYTLSPENLQSLAAQSSMPENMTLQRANSDTDLVTSESRSSLTASMYEYTLGQAQNLIIFWDIKEEVDPSDWIGLYHIDENSPANFWDSKNRGVTGTQKGQIVWRIEPGPYFMEPEIKICFKYYHGISGALRATTPCITVKNPAVMMGAEGMEGGASGNLHSRKLVSFTLSDLRAVGLKKGMFFNPDPYLKMSIQPGKKSSFPTCAHHGQERRSTIISNTTNPIWHREKYSFFALLTDVLEIEIKDKFAKSRPIIKRFLGKLTIPVQRLLERQAIGDQMLSYNLGRRLPADHVSGYLQFKVEVTSSVHEDASPEAVGTILGVNSVNGDLGSPSDDEDMPGSHHDSQVCSNGPVSEDSAADGTPKHSFRTSSTLEIDTEELTSTSSRTSPPRGRQDSLNDYLDAIEHNGHSRPGTATCSERSMGASPKLRSSFPTDTRLNAMLHIDSDEEDHEFQQDLGYPSSLEEEGGLIMFSRASRADDGSLTSQTKLEDNPVENEEASTHEAASFEDKPENLPELAESSLPAGPAPEEGEGGPEPQPSADQGSAELCGSQEVDQPTSGADTGTSDASGGSRRAVSETESLDQGSEPSQVSSETEPSDPARTESVSEASTRPEGESDLECADSSCNESVTTQLSSVDTRCSSLESARFPETPAFSSQEEEDGACAAEPTSSGPAEGSQESVCTAGSLPVVQVPSGEDEGPGAESATVPDQEELGEVWQRRGSLEGAAAAAESPPQEEGSAGEAQGTCEGATAQEEGATGGSQANGHQPLRSLPSVRQDVSRYQRVDEALPPNWEARIDSHGRIFYVDHVNRTTTWQRPTAPPAPQVLQRSNSIQQMEQLNRRYQSIRRTMTNERPEENTNAIDGAGEEADFHQASADFRRENILPHSTSRSRITLLLQSPPVKFLISPEFFTVLHSNPSAYRMFTNNTCLKHMITKVRRDTHHFERYQHNRDLVGFLNMFANKQLELPRGWEMKHDHQGKAFFVDHNSRTTTFIDPRLPLQSSRPTSALVHRQHLTRQRSHSAGEVGEDSRHAGPPVLPRPSSTFNTVSRPQYQDMVPVAYNDKIVAFLRQPNIFEILQERQPDLTRNHSLREKIQFIRTEGTPGLVRLSSDADLVMLLSLFEEEIMSYVPPHALLHPSYCQSPRGSPVSSPQNSPGTQRANARAPAPYKRDFEAKLRNFYRKLETKGYGQGPGKLKLIIRRDHLLEDAFNQIMGYSRKDLQRNKLYVTFVGEEGLDYSGPSREFFFLVSRELFNPYYGLFEYSANDTYTVQISPMSAFVDNHHEWFRFSGRILGLALIHQYLLDAFFTRPFYKALLRILCDLSDLEYLDEEFHQSLQWMKDNDIHDILDLTFTVNEEVFGQITERELKPGGANIPVTEKNKKEYIERMVKWRIERGVVQQTESLVRGFYEVVDARLVSVFDARELELVIAGTAEIDLSDWRNNTEYRGGYHDNHIVIRWFWAAVERFNNEQRLRLLQFVTGTSSIPYEGFASLRGSNGPRRFCVEKWGKITALPRAHTCFNRLDLPPYPSFSMLYEKLLTAVEETSTFGLE

SEQ ID NO: 1420 - protein, 414 aa, Homo sapiens
MSKKISGGSVVEMQGDEMTRIIWELIKEKLIFPYVELDLHSYDLGIENRDATNDQVTKDAAEAIKKHNVGVKCATITPDEKRVEEFKLKQMWKSPNGTIRNILGGTVFREAIICKNIPRLVSGWVKPIIIGRHAYGDQYRATDFVVPGPGKVEITYTPSDGTQKVTYLVHNFEEGGGVAMGMYNQDKSIEDFAHSSFQMALSKGWPLYLSTKNTILKKYDGRFKDIFQEIYDKQYKSQFEAQKIWYEHRLIDDMVAQAMKSEGGFIWACKNYDGDVQSDSVAQGYGSLGMMTSVLVCPDGKTVEAEAAHGTVTRHYRMYQKGQETSTNPIASIFAWTRGLAHRAKLDNNKELAFFANALEEVSIETIEAGFMTKDLAACIKGLPNVQRSDYLNTFEFMDKLGENLKIKLAQAKL

SEQ ID NO: 1421 - protein, 1048 aa, Homo sapiens
MAFPPRRRLRLGPRGLPLLLSGLLLPLCRAFNLDVDSPAEYSGPEGSYFGFAVDFFVPSASSRMFLLVGAPKANTTQPGIVEGGQVLKCDWSSTRRCQPIEFDATGNRDYAKDDPLEFKSHQWFGASVRSKQDKILACAPLYHWRTEMKQEREPVGTCFLQDGTKTVEYAPCRSQDIDADGQGFCQGGFSIDFTKADRVLLGGPGSFYWQGQLISDQVAEIVSKYDPNVYSIKYNNQLATRTAQAIFDDSYLGYSVAVGDFNGDGIDDFVSGVPRAARTLGMVYIYDGKNMSSLYNFTGEQMAAYFGFSVAATDINGDDYADVFIGAPLFMDRGSDGKLQEVGQVSVSLQRASGDFQTTKLNGFEVFARFGSAIAPLGDLDQDGFNDIAIAAPYGGEDKKGIVYIFNGRSTGLNAVPSQILEGQWAARSMPPSFGYSMKGATDIDKNGYPDLIVGAFGVDRAILYRARPVITVNAGLEVYPSILNQDNKTCSLPGTALKVSCFNVRFCLKADGKGVLPRKLNFQVELLLDKLKQKGAIRRALFLYSRSPSHSKNMTISRGGLMQCEELIAYLRDESEFRDKLTPITIFMEYRLDYRTAADTTGLQPILNQFTPANISRQAHILLDCGEDNVCKPKLEVSVDSDQKKIYIGDDNPLTLIVKAQNQGEGAYEAELIVSIPLQADFIGVVRNNEALARLSCAFKTENQTRQVVCDLGNPMKAGTQLLAGLRFSVHQQSEMDTSVKFDLQIQSSNLFDKVSPVVSHKVDLAVLAAVEIRGVSSPDHVFLPIPNWEHKENPETEEDVGPVVQHIYELRNNGPSSFSKAMLHLQWPYKYNNNTLLYILHYDIDGPMNCTSDMEINPLRIKISSLQTTEKNDTVAGQGERDHLITKRDLALSEGDIHTLGCGVAQCLKIVCQVGRLDRGKSAILYVKSLLWTETFMNKENQNHSYSLKSSASFNVIEFPYKNLPIEDITNSTLVTTNVTWGIQPAPMPVPVWVIILAVLAGLLLLAVLVFVMYRMGFFKRVRPPQEEQEREQLQPHENGEGNSET

SEQ ID NO: 1422 - protein, 744 aa, Homo sapiens
MAVLPGPLQLLGVLLTISLSSIRLIQAGAYYGIKPLPPQIPPQMPPQIPQYQPLGQQVPHMPLAKDGLAMGKEMPHLQYGKEYPHLPQYMKEIQPAPRMGKEAVPKKGKEIPLASLRGEQGPRGEPGPRGPPGPPGLPGHGIPGIKGKPGPQGYPGVGKPGMPGMPGKPGAMGMPGAKGEIGQKGEIGPMGIPGPQGPPGPHGLPGIGKPGGPGLPGQPGPKGDRGPKGLPGPQGLRGPKGDKGFGMPGAPGVKGPPGMHGPPGPVGLPGVGKPGVTGFPGPQGPLGKPGAPGEPGPQGPIGVPGVQGPPGIPGIGKPGQDGIPGQPGFPGGKGEQGLPGLPGPPGLPGIGKPGFPGPKGDRGMGGVPGALGPRGEKGPIGAPGIGGPPGEPGLPGIPGPMGPPGAIGFPGPKGEGGIVGPQGPPGPKGEPGLQGFPGKPGFLGEVGPPGMRGLPGPIGPKGEAGQKGVPGLPGVPGLLGPKGEPGIPGDQGLQGPPGIPGIGGPSGPIGPPGIPGPKGEPGLPGPPGFPGIGKPGVAGLHGPPGKPGALGPQGQPGLPGPPGPPGPPGPPAVMPPTPPPQGEYLPDMGLGIDGVKPPHAYGAKKGKNGGPAYEMPAFTAELTAPFPPVGAPVKFNKLLYNGRQNYNPQTGIFTCEVPGVYYFAYHVHCKGGNVWVALFKNNEPVMYTYDEYKKGFLDQASGSAVLLLRPGDRVFLQMPSEQAAGLYAGQYVHSSFSGYLLYPM

SEQ ID NO: 1423 - protein, 478 aa, Homo sapiens
MGSRWSSEEERQPLLGPGLGPGLGASWRSREAAAAALPAAVPGPGRVYGRRWLVLLLFSLLAFVQGLVWNTWGPIQNSARQAYGFSSWDIALLVLWGPIGFLPCFAFMWLLDKRGLRITVLLTSFLMVLGTGLRCIPISDLILKRRLIHGGQMLNGLAGPTVMNAAPFLSTTWFSADERATATAIASMLSYLGGACAFLVGPLVVPAPNGTSPLLAAESSRAHIKDRIEAVLYAEFGVVCLIFSATLAYFPPRPPLPPSVAAASQRLSYRRSVCRLLSNFRFLMIALAYAIPLGVFAGWSGVLDLILTPAHVSQVDAGWIGFWSIVGGCVVGIAMARFADFIRGMLKLILLLLFSGATLSSTWFTLTCLNSITHLPLTTVTLYASCILLGVFLNSSVPIFFELFVETVYPVPEGITCGVVTFLSNMFMGVLLFFLTFYHTELSWFNWCLPGSCLLSLLLILCFRESYDRLYLDVVVSV

SEQ ID NO: 1424 - protein, 328 aa, Homo sapiens
MYTLHTKRVKAAARQMWTSNLSKVRQSLKNVYHKCKIRHQDSTGYPTVTSDDCNQDDDSYDGKMNLPVVLQDVKTAQVELFSQMTDIVHMIPKVQEKTDLYQKQMEVLETRMNVNEDKQCTTTKDILSMKEDIKALKKKVTELEIQNSCSTIHCLEILEGERGKEITELLYKLIQPATLKNTLASTDMEISSAEPEKVPSYPKSTDHLEKKTISPQMKTLKKRNHQNASRSFEKAKPNIYIYPDFSTWIKLTFVHGGKWTFFLSATKLEEFIQWLLSRPTILPEEPQVITQRYCPFTGPILSLTTICLSIFNNIYGFICSLKEEVTRL

SEQ ID NO: 1425 - protein, 1007 aa, Homo sapiens
MKMWLLVSHLVIISITTCLAVSEEDKGFGPIFEEQPINTIYPEESLEGKVSLNCRARASPFPVYKWRMNNGDVDLTSDRYSMVGGNLVINNPDKQKDAGIYYCLASNNYGMVRSTEATLSFGYLDPFPPEERPEVRVKEGKGMVLLCDPPYHFPDDLSYRWLLNEFPVFITMDKRRFVSQTNGNLYIANVEASDKGNYSCFVSSPSITKSVFSKFIPLIPIPERTTKPYPADIVVQFKDVYALMGQNVTLECFALGNPVPDIRWRKVLEPMPSTAEISTSGAVLKIFNIQLEDEGIYECEAENIRGKDKHQARIYVQAFPEWVEHINDTEVDIGSDLYWPCVATGKPIPTIRWLKNGYAYHKGELRLYDVTFENAGMYQCIAENTYGAIYANAELKILALAPTFEMNPMKKKILAAKGGRVIIECKPKAAPKPKFSWSKGTEWLVNSSRILIWEDGSLEINNITRNDGGIYTCFAENNRGKANSTGTLVITDPTRIILAPINADITVGENATMQCAASFDPALDLTFVWSFNGYVIDFNKENIHYQRNFMLDSNGELLIRNAQLKHAGRYTCTAQTIVDNSSASADLVVRGPPGPPGGLRIEDIRATSVALTWSRGSDNHSPISKYTIQTKTILSDDWKDAKTDPPIIEGNMEAARAVDLIPWMEYEFRVVATNTLGRGEPSIPSNRIKTDGAAPNVAPSDVGGGGGRNRELTITWAPLSREYHYGNNFGYIVAFKPFDGEEWKKVTVTNPDTGRYVHKDETMSPSTAFQVKVKAFNNKGDGPYSLVAVINSAQDAPSEAPTEVGVKVLSSSEISVHWEHVLEKIVESYQIRYWAAHDKEEAANRVQVTSQEYSARLENLLPDTQYFIEVGACNSAGCGPPSDMIEAFTKKAPPSQPPRIISSVRSGSRYIITWDHVVALSNESTVTGYKVLYRPDGQHDGKLYSTHKHSIEVPIPRDGEYVVEVRAHSDGGDGVVSQVKISGAPTLSPSLLGLLLPAFGILVYLEF

SEQ ID NO: 1426 - protein, 1270 aa, Homo sapiens
MDSLEEPQKKVFKARKTMRVSDRQQLEAVYKVKEELLKTDVKLLNGNHENGDLDPTSPLENMDYIKDKEEVNGIEEICFDPEGSKAEWKETPCILSVNVKNKQDDDLNCEPLSPHNITPEPVSKLPAEPVSGDPAPGDLDAGDPASGVLASGDSTSGDPTSSEPSSSDAASGDATSGDAPSGDVSPGDATSGDATADDLSSGDPTSSDPIPGEPVPVEPISGDCAADDIASSEITSVDLASGAPASTDPASDDLASGDLSSSELASDDLATGELASDELTSESTFDRTFEPKSVPVCEPVPEIDNIEPSSNKDDDFLEKNGADEKLEQIQSKDSLDEKNKADNNIDANEETLETDDTTICSDRPPENEKKVEEDIITELALGEDAISSSMEIDQGEKNEDETSADLVETINENVIEDNKSENILENTDSMETDEIIPILEKLAPSEDELTCFSKTSLLPIDETNPDLEEKMESSFGSPSKQESSESLPKEAFLVLSDEEDISGEKDESEVISQNETCSPAEVESNEKDNKPEEEEQVIHEDDERPSEKNEFSRRKRSKSEDMDNVQSKRRRYMEEEYEAEFQVKITAKGDINQKLQKVIQWLLEEKLCALQCAVFDKTLAELKTRVEKIECNKRHKTVLTELQAKIARLTKRFEAAKEDLKKRHEHPPNPPVSPGKTVNDVNSNNNMSYRNAGTVRQMLESKRNVSESAPPSFQTPVNTVSSTNLVTPPAVVSSQPKLQTPVTSGSLTATSVLPAPNTATVVATTQVPSGNPQPTISLQPLPVILHVPVAVSSQPQLLQSHPGTLVTNQPSGNVEFISVQSPPTVSGLTKNPVSLPSLPNPTKPNNVPSVPSPSIQRNPTASAAPLGTTLAVQAVPTAHSIVQATRTSLPTVGPSGLYSPSTNRGPIQMKIPISAFSTSSAAEQNSNTTPRIENQTNKTIDASVSKKAADSTSQCGKATGSDSSGVIDLTMDDEESGASQDPKKLNHTPVSTMSSSQPVSRPLQPIQPAPPLQPSGVPTSGPSQTTIHLLPTAPTTVNVTHRPVTQVTTRLPVPRAPANHQVVYTTLPAPPAQAPLRGTVMQAPAVRQVNPQNSVTVRVPQTTTYVVNNGLTLGSTGPQLTVHHRPPQVHTEPPRPVHPAPLPEAPQPQRLPPEAASTSLPQKPHLKLARVQSQNGIVLSWSVLEVDRSCATVDSYHLYAYHEEPSATVPSQWKKIGEVKALPLPMACTLTQFVSGSKYYFAVRAKDIYGRFGPFCDPQSTDVISSTQSS

SEQ ID NO: 1427 - protein, 156 aa, Homo sapiens
MQKKEKSFGIQMLSVQPDTKPKGCAGCNRKIKDRYLLKALDKYWHEDCLKCACCDCRLGEVGSTLYTKANLILCRRDYLRLFGVTGNCAACSKLIPAFEMVMRAKDNVYHLDCFACQLCNQRFCVGDKFFLKNNMILCQTDYEEGLMKEGYAPQVR

SEQ ID NO: 1428 - protein, 1073 aa, Homo sapiens
MKTLLLDLALWSLLFQPGWLSFSSQVSQNCHNGSYEISVLMMGNSAFAEPLKNLEDAVNEGLEIVRGRLQNAGLNVTVNATFMYSDGLIHNSGDCRSSTCEGLDLLRKISNAQRMGCVLIGPSCTYSTFQMYLDTELSYPMISAGSFGLSCDYKETLTRLMSPARKLMYFLVNFWKTNDLPFKTYSWSTSYVYKNGTETEDCFWYLNALEASVSYFSHELGFKVVLRQDKEFQDILMDHNRKSNVIIMCGGPEFLYKLKGDRAVAEDIVIILVDLFNDQYFEDNVTAPDYMKNVLVLTLSPGNSLLNSSFSRNLSPTKRDFALAYLNGILLFGHMLKIFLENGENITTPKFAHAFRNLTFEGYDGPVTLDDWGDVDSTMVLLYTSVDTKKYKVLLTYDTHVNKTYPVDMSPTFTWKNSKLPNDITGRGPQILMIAVFTLTGAVVLLLLVALLMLRKYRKDYELRQKKWSHIPPENIFPLETNETNHVSLKIDDDKRRDTIQRLRQCKYDKKRVILKDLKHNDGNFTEKQKIELNKLLQIDYYNLTKFYGTVKLDTMIFGVIEYCERGSLREVLNDTISYPDGTFMDWEFKISVLYDIAKGMSYLHSSKTEVHGRLKSTNCVVDSRMVVKITDFGCNSILPPKKDLWTAPEHLRQANISQKGDVYSYGIIAQEIILRKETFYTLSCRDRNEKIFRVENSNGMKPFRPDLFLETAEEKELEVYLLVKNCWEEDPEKRPDFKKIETTLAKIFGLFHDQKNESYMDTLIRRLQLYSRNLEHLVEERTQLYKAERDRADRLNFMLLPRLVVKSLKEKGFVEPELYEEVTIYFSDIVGFTTICKYSTPMEVVDMLNDIYKSFDHIVDHHDVYKVETIGDAYMVASGLPKRNGNRHAIDIAKMALEILSFMGTFELEHLPGLPIWIRIGVHSGPCAAGVVGIKMPRYCLFGDTVNTASRMESTGLPLRIHVSGSTIAILKRTECQFLYEVRGETYLKGRGNETTYWLTGMKDQKFNLPTPPTVENQQRLQAEFSDMIANSLQKRQAAGIRSQKPRRVASYKKGTLEYLQLNTTDKESTYF

SEQ ID NO: 1429 - protein, 1220 aa, Homo sapiens
MGDMANNSVAYSGVKNSLKEANHDGDFGITLAELRALMELRSTDALRKIQESYGDVYGICTKLKTSPNEGLSGNPADLERREAVFGKNFIPPKKPKTFLQLVWEALQDVTLIILEIAAIVSLGLSFYQPPEGDNALCGEVSVGEEEGEGETGWIEGAAILLSVVCVVLVTAFNDWSKEKQFRGLQSRIEQEQKFTVIRGGQVIQIPVADITVGDIAQVKYGDLLPADGILIQGNDLKIDESSLTGESDHVKKSLDKDPLLLSGTHVMEGSGRMVVTAVGVNSQTGIIFTLLGAGGEEEEKKDEKKKEKKNKKQDGAIENRNKAKAQDGAAMEMQPLKSEEGGDGDEKDKKKANLPKKEKSVLQGKLTKLAVQIGKAGLLMSAITVIILVLYFVIDTFWVQKRPWLAECTPIYIQYFVKFFIIGVTVLVVAVPEGLPLAVTISLAYSVKKMMKDNNLVRHLDACETMGNATAICSDKTGTLTMNRMTVVQAYINEKHYKKVPEPEAIPPNILSYLVTGISVNCAYTSKILPPEKEGGLPRHVGNKTECALLGLLLDLKRDYQDVRNEIPEEALYKVYTFNSVRKSMSTVLKNSDGSYRIFSKGASEIILKKCFKILSANGEAKVFRPRDRDDIVKTVIEPMASEGLRTICLAFRDFPAGEPEPEWDNENDIVTGLTCIAVVGIEDPVRPEVPDAIKKCQRAGITVRMVTGDNINTARAIATKCGILHPGEDFLCLEGKDFNRRIRNEKGEIEQERIDKIWPKLRVLARSSPTDKHTLVKGIIDSTVSDQRQVVAVTGDGTNDGPALKKADVGFAMGIAGTDVAKEASDIILTDDNFTSIVKAVMWGRNVYDSISKFLQFQLTVNVVAVIVAFTGACITQDSPLKAVQMLWVNLIMDTLASLALATEPPTESLLLRKPYGRNKPLISRTMMKNILGHAFYQLVVVFTLLFAGEKFFDIDSGRNAPLHAPPSEHYTIVFNTFVLMQLFNEINARKIHGERNVFEGIFNNAIFCTIVLGTFVVQIIIVQFGGKPFSCSELSIEQWLWSIFLGMGTLLWGQLISTIPTSRLKFLKEAGHGTQKEEIPEEELAEDVEEIDHAERELRRGQILWFRGLNRIQTQIRVVNAFRSSLYEGLEKPESRSSIHNFMTHPEFRIEDSEPHIPLIDDTDAEDDAPTKRNSSPPPSPNKNNNAVDSGIHLTIEMNKSATSSSPGSPLHSLETSL

SEQ ID NO: 1430 - protein, 588 aa, Homo sapiens
MAAEEEAAAGGKVLREENQCIAPVVSSRVSPGTRPTAMGSFSSHMTEFPRKRKGSDSDPSQEAHSQTEKRRRDKMNNLIEELSAMIPQCNPMARKLDKLTVLRMAVQHLRSLKGLTNSYVGSNYRPSFLQDNELRHLILKTAEGFLFVVGCERGKILFVSKSVSKILNYDQASLTGQSLFDFLHPKDVAKVKEQLSSFDISPREKLIDAKTGLQVHSNLHAGRTRVYSGSRRSFFCRIKSCKISVKEEHGCLPNSKKKEHRKFYTIHCTGYLRSWPPNIVGMEEERNSKKDNSNFTCLVAIGRLQPYIVPQNSGEINVKPTEFITRFAVNGKFVYVDQRATAILGYLPQELLGTSCYEYFHQDDHNNLTDKHKAVLQSKEKILTDSYKFRAKDGSFVTLKSQWFSFTNPWTKELEYIVSVNTLVLGHSEPGEASFLPCSSQSSEESSRQSCMSVPGMSTGTVLGAGSIGTDIANEILDLQRLQSSSYLDDSSPTGLMKDTHTVNCRSMSNKELFPPSPSEMGELEATRQNQSTVAVHSHEPLLSDGAQLDFDALCDNDDTAMAAFMNYLEAEGGLGDPGDFSDIQWTL

SEQ ID NO: 1431 - protein, 1024 aa, Homo sapiens
MGEDDAALRAGSRGLSDPWADSVGVRPRTTERHIAVHKRLVLAFAVSLVALLAVTMLAVLLSLRFDECGASATPGADGGPSGFPERGGNGSLPGSARRNHHAGGDSWQPEAGGVASPGTTSAQPPSEEEREPWEPWTQLRLSGHLKPLHYNLMLTAFMENFTFSGEVNVEIACRNATRYVVLHASRVAVEKVQLAEDRAFGAVPVAGFFLYPQTQVLVVVLNRTLDAQRNYNLKIIYNALIENELLGFFRSSYVLHGERRFLGVTQFSPTHARKAFPCFDEPIYKATFKISIKHQATYLSLSNMPVETSVFEEDGWVTDHFSQTPLMSTYYLAWAICNFTYRETTTKSGVVVRLYARPDAIRRGSGDYALHITKRLIEFYEDYFKVPYSLPKLDLLAVPKHPYAAMENWGLSIFVEQRILLDPSVSSISYLLDVTMVIVHEICHQWFGDLVTPVWWEDVWLKEGFAHYFEFVGTDYLYPGWNMEKQRFLTDVLHEVMLLDGLASSHPVSQEVLQATDIDRVFDWIAYKKGAALIRMLANFMGHSVFQRGLQDYLTIHKYGNAARNDLWNTLSEALKRNGKYVNIQEVMDQWTLQMGYPVITILGNTTAENRIIITQQHFIYDISAKTKALKLQNNSYLWQIPLTIVVGNRSHVSSEAIIWVSNKSEHHRITYLDKGSWLLGNINQTGYFRVNYDLRNWRLLIDQLIRNHEVLSVSNRAGLIDDAFSLARAGYLPQNIPLEIIRYLSEEKDFLPWHAASRALYPLDKLLDRMENYNIFNEYILKQVATTYIKLGWPKNNFNGSLVQASYQHEELRREVIMLACSFGNKHCHQQASTLISDWISSNRNRIPLNVRDIVYCTGVSLLDEDVWEFIWMKFHSTTAVSEKKILLEALTCSDDRNLLNRLLNLSLNSEVVLDQDAIDVIIHVARNPHGRDLAWKFFRDKWKILNTRYGEALFMNSKLISGVTEFLNTEGELKELKNFMKNYDGVAAASFSRAVETVEANVRWKMLYQDELFQWLGKALRH

SEQ ID NO: 1432 - protein, 478 aa, Homo sapiens
MPPMPSAPPVHPPPDGGWGWIVVGAAFISIGFSYAFPKAVTVFFKEIQQIFHTTYSEIAWISSIMLAVMYAGGPVSSVLVNKYGSRPVVIAGGLLCCLGMVLASFSSSVVQLYLTMGFITGLGLAFNLQPALTIIGKYFYRKRPMANGLAMAGSPVFLSSLAPFNQYLFNTFGWKGSFLILGSLLLNACVAGSLMRPLGPNQTTSKSKNKTGKTEDDSSPKKIKTKKSTWEKVNKYLDFSLFKHRGFLIYLSGNVIMFLGFFAPIIFLAPYAKDQGIDEYSAAFLLSVMAFVDMFARPSVGLIANSKYIRPRIQYFFSFAIMFNGVCHLLCPLAQDYTSLVLYAVFFGLGFGSVSSVLFETLMDLVGAPRFSSAVGLVTIVECGPVLLGPPLAGKLVDLTGEYKYMYMSCGAIVVAASVWLLIGNAINYRLLAKERKEENARQKTRESEPLSKSKHSEDVNVKVSNAQSVTSERETNI

SEQ ID NO: 1433 - protein, 386 aa, Homo sapiens
MKDCSNGCSAECTGEGGSKEVVGTFKAKDLIVTPATILKEKPDPNNLVFGTVFTDHMLTVEWSSEFGWEKPHIKPLQNLSLHPGSSALHYAVELFEGLKAFRGVDNKIRLFQPNLNMDRMYRSAVRATLPVFDKEELLECIQQLVKLDQEWVPYSTSASLYIRPTFIGTEPSLGVKKPTKALLFVLLSPVGPYFSSGTFNPVSLWANPKYVRAWKGGTGDCKMGGNYGSSLFAQCEAVDNGCQQVLWLYGEDHQITEVGTMNLFLYWINEDGEEELATPPLDGIILPGVTRRCILDLAHQWGEFKVSERYLTMDDLTTALEGNRVREMFGSGTACVVCPVSDILYKGETIHIPTMENGPKLASRILSKLTDIQYGREESDWTIVLS

SEQ ID NO: 1434 - protein, 703 aa, Homo sapiens
MLRGRSLSVTSLGGLPQWEVEELPVEELLLFEVAWEVTNKVGGIYTVIQTKAKTTADEWGENYFLIGPYFEHNMKTQVEQCEPVNDAVRRAVDAMNKHGCQVHFGRWLIEGSPYVVLFDIGYSAWNLDRWKGDLWEACSVGIPYHDREANDMLIFGSLTAWFLKEVTDHADGKYVVAQFHEWQAGIGLILSRARKLPIATIFTTHATLLGRYLCAANIDFYNHLDKFNIDKEAGERQIYHRYCMERASVHCAHVFTTVSEITAIEAEHMLKRKPDVVTPNGLNVKKFSAVHEFQNLHAMYKARIQDFVRGHFYGHLDFDLEKTLFLFIAGRYEFSNKGADIFLESLSRLNFLLRMHKSDITVMVFFIMPAKTNNFNVETLKGQAVRKQLWDVAHSVKEKFGKKLYDALLRGEIPDLNDILDRDDLTIMKRAIFSTQRQSLPPVTTHNMIDDSTDPILSTIRRIGLFNNRTDRVKVILHPEFLSSTSPLLPMDYEEFVRGCHLGVFPSYYEPWGYTPAECTVMGIPSVTTNLSGFGCFMQEHVADPTAYGIYIVDRRFRSPDDSCNQLTKFLYGFCKQSRRQRIIQRNRTERLSDLLDWRYLGRYYQHARHLTLSRAFPDKFHVELTSPPTTEGFKYPRPSSVPPSPSGSQASSPQSSDVEDEVEDERYDEEEEAERDRLNIKSPFSLSHVPHGKKKLHGEYKN

SEQ ID NO: 1435 - protein, 702 aa, Homo sapiens
MDQHQHLNKTAESASSEKKKTRRCNGFKMFLAALSFSYIAKALGGIIMKISITQIERRFDISSSLAGLIDGSFEIGNLLVIVFVSYFGSKLHRPKLIGIGCLLMGTGSILTSLPHFFMGYYRYSKETHINPSENSTSSLSTCLINQTLSFNGTSPEIVEKDCVKESGSHMWIYVFMGNMLRGIGETPIVPLGISYIDDFAKEGHSSLYLGSLNAIGMIGPVIGFALGSLFAKMYVDIGYVDLSTIRITPKDSRWVGAWWLGFLVSGLFSIISSIPFFFLPKNPNKPQKERKISLSLHVLKTNDDRNQTANLTNQGKNVTKNVTGFFQSLKSILTNPLYVIFLLLTLLQVSSFIGSFTYVFKYMEQQYGQSASHANFLLGIITIPTVATGMFLGGFIIKKFKLSLVGIAKFSFLTSMISFLFQLLYFPLICESKSVAGLTLTYDGNNSVASHVDVPLSYCNSECNCDESQWEPVCGNNGITYLSPCLAGCKSSSGIKKHTVFYNCSCVEVTGLQNRNYSAHLGECPRDNTCTRKFFIYVAIQVINSLFSATGGTTFILLTVKIVQPELKALAMGFQSMVIRTLGGILAPIYFGALIDKTCMKWSTNSCGAQGACRIYNSVFFGRVYLGLSIALRFPALVLYIVFIFAMKKKFQGKDTKASDNERKVMDEANLEFLNNGEHFVPSAGTDSKTCNLDMQDNAAAN

SEQ ID NO: 1436 - protein, 1549 aa, Homo sapiens
MSLSFCGNNISSYNINDGVLQNSCFVDALNLVPHVFLLFITFPILFIGWGSQSSKVQIHHNTWLHFPGHNLRWILTFALLFVHVCEIAEGIVSDSRRESRHLHLFMPAVMGFVATTTSIVYYHNIETSNFPKLLLALFLYWVMAFITKTIKLVKYCQSGLDISNLRFCITGMMVILNGLLMAVEINVIRVRRYVFFMNPQKVKPPEDLQDLGVRFLQPFVNLLSKATYWWMNTLIISAHKKPIDLKAIGKLPIAMRAVTNYVCLKDAYEEQKKKVADHPNRTPSIWLAMYRAFGRPILLSSTFRYLADLLGFAGPLCISGIVQRVNETQNGTNNTTGISETLSSKEFLENAYVLAVLLFLALILQRTFLQASYYVTIETGINLRGALLAMIYNKILRLSTSNLSMGEMTLGQINNLVAIETNQLMWFLFLCPNLWAMPVQIIMGVILLYNLLGSSALVGAAVIVLLAPIQYFIATKLAEAQKSTLDYSTERLKKTNEILKGIKLLKLYAWEHIFCKSVEETRMKELSSLKTFALYTSLSIFMNAAIPIAAVLATFVTHAYASGNNLKPAEAFASLSLFHILVTPLFLLSTVVRFAVKAIISVQKLNEFLLSDEIGDDSWRTGESSLPFESCKKHTGVQPKTINRKQPGRYHLDSYEQSTRRLRPAETEDIAIKVTNGYFSWGSGLATLSNIDIRIPTGQLTMIVGQVGCGKSSLLLAILGEMQTLEGKVHWSNVNESEPSFEATRSRNRYSVAYAAQKPWLLNATVEENITFGSPFNKQRYKAVTDACSLQPDIDLLPFGDQTEIGERGINLSGGQRQRICVARALYQNTNIVFLDDPFSALDIHLSDHLMQEGILKFLQDDKRTLVLVTHKLQYLTHADWIIAMKDGSVLREGTLKDIQTKDVELYEHWKTLMNRQDQELEKDMEADQTTLERKTLRRAMYSREAKAQMEDEDEEEEEEEDEDDNMSTVMRLRTKMPWKTCWRYLTSGGFFLLILMIFSKLLKHSVIVAIDYWLATWTSEYSINNTGKADQTYYVAGFSILCGAGIFLCLVTSLTVEWMGLTAAKNLHHNLLNKIILGPIRFFDTTPLGLILNRFSADTNIIDQHIPPTLESLTRSTLLCLSAIGMISYATPVFLVALLPLGVAFYFIQKYFRVASKDLQELDDSTQLPLLCHFSETAEGLTTIRAFRHETRFKQRMLELTDTNNIAYLFLSAANRWLEVRTDYLGACIVLTASIASISGSSNSGLVGLGLLYALTITNYLNWVVRNLADLEVQMGAVKKVNSFLTMESENYEGTMDPSQVPEHWPQEGEIKIHDLCVRYENNLKPVLKHVKAYIKPGQKVGICGRTGSGKSSLSLAFFRMVDIFDGKIVIDGIDISKLPLHTLRSRLSIILQDPILFSGSIRFNLDPECKCTDDRLWEALEIAQLKNMVKSLPGGLDAVVTEGGENFSVGQRQLFCLARAFVRKSSILIMDEATASIDMATENILQKVVMTAFADRTVVTIAHRVHTILTADLVIVMKRGNILEYDTPESLLAQENGVFASFVRADM

SEQ ID NO: 1437 - protein, 1549 aa, Homo sapiens
MSLSFCGNNISSYNINDGVLQNSCFVDALNLVPHVFLLFITFPILFIGWGSQSSKVQIHHNTWLHFPGHNLRWILTFALLFVHVCEIAEGIVSDSRRESRHLHLFMPAVMGFVATTTSIVYYHNIETSNFPKLLLALFLYWVMAFITKTIKLVKYCQSGLDISNLRFCITGMMVILNGLLMAVEINVIRVRRYVFFMNPQKVKPPEDLQDLGVRFLQPFVNLLSKATYWWMNTLIISAHKKPIDLKAIGKLPIAMRAVTNYVCLKDAYEEQKKKVADHPNRTPSIWLAMYRAFGRPILLSSTFRYLADLLGFAGPLCISGIVQRVNETQNGTNNTTGISETLSSKEFLENAYVLAVLLFLALILQRTFLQASYYVTIETGINLRGALLAMIYNKILRLSTSNLSMGEMTLGQINNLVAIETNQLMWFLFLCPNLWAMPVQIIMGVILLYNLLGSSALVGAAVIVLLAPIQYFIATKLAEAQKSTLDYSTERLKKTNEILKGIKLLKLYAWEHIFCKSVEETRMKELSSLKTFALYTSLSIFMNAAIPIAAVLATFVTHAYASGNNLKPAEAFASLSLFHILVTPLFLLSTVVRFAVKAIISVQKLNEFLLSDEIGDDSWRTGESSLPFESCKKHTGVQPKTINRKQPGRYHLDSYEQSTRRLRPAETEDIAIKVTNGYFSWGSGLATLSNIDIRIPTGQLTMIVGQVGCGKSSLLLAILGEMQTLEGKVHWSNVNESEPSFEATRSRNRYSVAYAAQKPWLLNATVEENITFGSPFNKQRYKAVTDACSLQPDIDLLPFGDQTEIGERGINLSGGQRQRICVARALYQNTNIVFLDDPFSALDIHLSDHLMQEGILKFLQDDKRTLVLVTHKLQYLTHADWIIAMKDGSVLREGTLKDIQTKDVELYEHWKTLMNRQDQELEKDMEADQTTLERKTLRRAMYSREAKAQMEDEDEEEEEEEDEDDNMSTVMRLRTKMPWKTCWRYLTSGGFFLLILMIFSKLLKHSVIVAIDYWLATWTSEYSINNTGKADQTYYVAGFSILCGAGIFLCLVTSLTVEWMGLTAAKNLHHNLLNKIILGPIRFFDTTPLGLILNRFSADTNIIDQHIPPTLESLTRSTLLCLSAIGMISYATPVFLVALLPLGVAFYFIQKYFRVASKDLQELDDSTQLPLLCHFSETAEGLTTIRAFRHETRFKQRMLELTDTNNIAYLFLSAANRWLEVRTDYLGACIVLTASIASISGSSNSGLVGLGLLYALTITNYLNWVVRNLADLEVQMGAVKKVNSFLTMESENYEGTMDPSQVPEHWPQEGEIKIHDLCVRYENNLKPVLKHVKAYIKPGQKVGICGRTGSGKSSLSLAFFRMVDIFDGKIVIDGIDISKLPLHTLRSRLSIILQDPILFSGSIRFNLDPECKCTDDRLWEALEIAQLKNMVKSLPGGLDAVVTEGGENFSVGQRQLFCLARAFVRKSSILIMDEATASIDMATENILQKVVMTAFADRTVVTIAHRVSSIMDAGLVLVFSEGILVECDTVPNLLAHKNGLFSTLVMTNK

SEQ ID NO: 1438 - protein, 422 aa, Homo sapiens
MVSESHHEALAAPPVTTVATVLPSNATEPASPGEGKEDAFSKLKEKFMNELHKIPLPPWALIAIAIVAVLLVLTCCFCICKKCLFKKKNKKKGKEKGGKNAINMKDVKDLGKTMKDQALKDDDAETGLTDGEEKEEPKEEEKLGKLQYSLDYDFQNNQLLVGIIQAAELPALDMGGTSDPYVKVFLLPDKKKKFETKVHRKTLNPVFNEQFTFKVPYSELGGKTLVMAVYDFDRFSKHDIIGEFKVPMNTVDFGHVTEEWRDLQSAEKEEQEKLGDICFSLRYVPTAGKLTVVILEAKNLKKMDVGGLSDPYVKIHLMQNGKRLKKKKTTIKKNTLNPYYNESFSFEVPFEQIQKVQVVVTVLDYDKIGKNDAIGKVFVGYNSTGAELRHWSDMLANPRRPIAQWHTLQVEEEVDAMLAVKK

SEQ ID NO: 1439 - protein, 685 aa, Homo sapiens
MKPSWLQCRKVTSAGGLGGPLPGSSPARGAGAALRALVVPGPRGGLGGRGCRALSSGSGSEYKTHFAASVTDPERFWGKAAEQISWYKPWTKTLENKHSPSTRFVEGMLNICYNAVDRHIENGKGDKIAIIYDSPVTNTKATFTYKEVLEQVSKLAGVLVKHGIKKGDTVVIYMPMIPQAMYTMLACARIGAIHSLIFGGFASKELSSRIDHVKPKVVVTASFGIEPGRRVEYVPLVEEALKIGQHKPDKILIYNRPNMEAVPLAPGRDLDWDEEMAKAQSHDCVPVLSEHPLYILYTSGTTGLPKGVIRPTGGYAVMLHWSMSSIYGLQPGEVWWAASDLGWVVGHSYICYGPLLHGNTTVLYEGKPVGTPDAGAYFRVLAEHGVAALFTAPTAIRAIRQQDPGAALGKQYSLTRFKTLFVAGERCDVETLEWSKNVFRVPVLDHWWQTETGSPITASCVGLGNSKTPPPGQAGKSVPGYNVMILDDNMQKLKARCLGNIVVKLPLPPGAFSGLWKNQEAFKHLYFEKFPGYYDTMDAGYMDEEGYLYVMSRVDDVINVAGHRISAGAIEESILSHGTVADCAVVGKEDPLKGHVPLALCVLRKDINATEEQVLEEIVKHVRQNIGPVAAFRNAVFVKQLPKTRSGKIPRSALSAIVNGKPYKITSTIEDPSIFGHVEEMLKQA

SEQ ID NO: 1440 - protein, 1030 aa, Homo sapiens
MKMADAKQKRNEQLKRWIGSETDLEPPVVKRQKTKVKFDDGAVFLAACSSGDTDEVLKLLHRGADINYANVDGLTALHQACIDDNVDMVKFLVENGANINQPDNEGWIPLHAAASCGYLDIAEFLIGQGAHVGAVNSEGDTPLDIAEEEAMEELLQNEVNRQGVDIEAARKEEERIMLRDARQWLNSGHINDVRHAKSGGTALHVAAAKGYTEVLKLLIQAGYDVNIKDYDGWTPLHAAAHWGKEEACRILVDNLCDMEMVNKVGQTAFDVADEDILGYLEELQKKQNLLHSEKRDKKSPLIESTANMDNNQSQKTFKNKETLIIEPEKNASRIESLEQEKVDEEEEGKKDESSCSSEEDEEDDSESEAETDKTKPLASVTNANTSSTQAAPVAVTTPTVSSGQATPTSPIKKFPTTATKISPKEEERKDESPATWRLGLRKTGSYGALAEITASKEGQKEKDTAGVTRSASSPRLSSSLDNKEKEKDSKGTRLAYVAPTIPRRLASTSDIEEKENRDSSSLRTSSSYTRRKWEDDLKKNSSVNEGSTYHKSCSFGRRQDDLISSSVPSTTSTPTVTSAAGLQKSLLSSTSTTTKITTGSSSAGTQSSTSNRLWAEDSTEKEKDSVPTAVTIPVAPTVVNAAASTTTLTTTTAGTVSSTTEVRERRRSYLTPVRDEESESQRKARSRQARQSRRSTQGVTLTDLQEAEKTIGRSRSTRTREQENEEKEKEEKEKQDKEKQEEKKESETSREDEYKQKYSRTYDETYQRYRPVSTSSSTTPSSSLSTMSSSLYASSQLNRPNSLVGITSAYSRGITKENEREGEKREEEKEGEDKSQPKSIRERRRPREKRRSTGVSFWTQDSDENEQEQQSDTEEGSNKKETQTDSISRYETSSTSAGDRYDSLLGRSGSYSYLEERKPYSSRLEKDDSTDFKKLYEQILAENEKLKAQLHDTNMELTDLKLQLEKATQRQERFADRSLLEMEKRERRALERRISEMEEELKMLPDLKADNQRLKDENGALIRVISKLSK

SEQ ID NO: 1441 - protein, 657 aa, Homo sapiens
MPRYTVHVRGEWLAVPCQDAQLTVGWLGREAVRRYIKNKPDNGGFTSVDDAHFLVRRCKGLGLLDNEDRLEVALENNEFVEVVIEGDAMSPDFIPSQPEGVYLYSKYREPEKYIELDGDRLTTEDLVNLGKGRYKIKLTPTAEKRVQKSREVIDSIIKEKTVVYGITTGFGKFARTVIPINKLQELQVNLVRSHSSGVGKPLSPERCRMLLALRINVLAKGYSGISLETLKQVIEMFNASCLPYVPEKGTVGASGDLAPLSHLALGLVGEGKMWSPKSGWADAKYVLEAHGLKPVILKPKEGLALINGTQMITSLGCEAVERASAIARQADIVAALTLEVLKGTTKAFDTDIHALRPHRGQIEVAFRFRSLLDSDHHPSEIAESHRFCDRVQDAYTLRCCPQVHGVVNDTIAFVKNIITTELNSATDNPMVFANRGETVSGGNFHGEYPAKALDYLAIGIHELAAISERRIERLCNPSLSELPAFLVAEGGLNSGFMIAHCTAAALVSENKALCHPSSVDSLSTSAATEDHVSMGGWAARKALRVIEHVEQVLAIELLAACQGIEFLRPLKTTTPLEKVYDLVRSVVRPWIKDRFMAPDIEAAHRLLLEQKVWEVAAPYIEKYRMEHIPESRPLSPTAFSLQFLHKKSTKIPESEDL

SEQ ID NO: 1442 - protein, 523 aa, Homo sapiens
MKKFKRRLSLTLRGSQTIDESLSELAEQMTIEENSSKDNEPIVKNGRPPTSHSMHSFLHQYTGSFKKPPLRRPHSVIGGSLGSFMAMPRNGSRLDIVHENLKMGSDGESDQASGTSSDEVQSPTGVCLRNRIHRRISMEDLNKRLSLPADIRIPDGYLEKLQINSPPFDQPMSRRSRRASLSEIGFGKMETYIKLEKLGEGTYATVYKGRSKLTENLVALKEIRLEHEEGAPCTAIREVSLLKDLKHANIVTLHDIVHTDKSLTLVFEYLDKDLKQYMDDCGNIMSMHNVKLFLYQILRGLAYCHRRKVLHRDLKPQNLLINEKGELKLADFGLARAKSVPTKTYSNEVVTLWYRPPDVLLGSSEYSTQIDMWGVGCIFFEMASGRPLFPGSTVEDELHLIFRLLGTPSQETWPGISSNEEFKNYNFPKYKPQPLINHAPRLDSEGIELITKFLQYESKKRVSAEEAMKHVYFRSLGPRIHALPESVSIFSLKEIQLQKDPGFRNSSYPETGHGKNRRQSMLF

SEQ ID NO: 1443 - protein, 477 aa, Homo sapiens
MPGSDTALTVDRTYSYPGRHHRCKSRVERHDMNTLSLPLNIRRGGSDTNLNFDVPDGILDFHKVKLTADSLKQKILKVTEQIKIEQTSRDGNVAEYLKLVNNADKQQAGRIKQVFEKKNQKSAHSIAQLQKKLEQYHRKLREIEQNGASRSSKDISKDHLKDIHRSLKDAHVKSRTAPHCMESSKSGMPGVSLTPPVFVFNKSREFANLIRNKFGSADNIAHLKNSLEEFRPEASARAYGGSATIVNKPKYGSDDECSSGTSGSADSNGNQSFGAGGASTLDSQGKLAVILEELREIKDTQAQLAEDIEALKVQFKREYGFISQTLQEERYRYERLEDQLHDLTDLHQHETANLKQELASIEEKVAYQAYERSRDIQEALESCQTRISKLELHQQEQQALQTDTVNAKVLLGRCINVILAFMTVILVCVSTIAKFVSPMMKSRCHILGTFFAVTLLAIFCKNWDHILCAIERMIIPR

SEQ ID NO: 1444 - protein, 596 aa, Homo sapiens
MAGNCGARGALSAHTLLFDLPPALLGELCAVLDSCDGALGWRGLAERLSSSWLDVRHIEKYVDQGKSGTRELLWSWAQKNKTIGDLLQVLQEMGHRRAIHLITNYGAVLSPSEKSYQEGGFPNILFKETANVTVDNVLIPEHNEKGILLKSSISFQNIIEGTRNFHKDFLIGEGEIFEVYRVEIQNLTYAVKLFKQEKKMQCKKHWKRFLSELEVLLLFHHPNILELAAYFTETEKFCLIYPYMRNGTLFDRLQCVGDTAPLPWHIRIGILIGISKAIHYLHNVQPCSVICGSISSANILLDDQFQPKLTDFAMAHFRSHLEHQSCTINMTSSSSKHLWYMPEEYIRQGKLSIKTDVYSFGIVIMEVLTGCRVVLDDPKHIQLRDLLRELMEKRGLDSCLSFLDKKVPPCPRNFSAKLFCLAGRCAATRAKLRPSMDEVLNTLESTQASLYFAEDPPTSLKSFRCPSPLFLENVPSIPVEDDESQNNNLLPSDEGLRIDRMTQKTPFECSQSEVMFLSLDKKPESKRNEEACNMPSSSCEESWFPKYIVPSQDLRPYKVNIDPSSEAPGHSCRSRPVESSCSSKFSWDEYEQYKKE

SEQ ID NO: 1445 - protein, 1472 aa, Homo sapiens
MKGSEVSLEKKKKIKMPVKRLREVVSQNHGDHLVLLKDELPCVPPALSANKRLPVGTGTSLNGTSRGSSDLTSARNCYQPLLENPMVSESDFSKDVAVQVLPLDKIEENNKQKANDIFISQYTMGQKDALRTVLKQKAQSMPVFKEVKVHLLEDAGIEKDAVTQETRISPSGIDSATTVAAATAAAIATAAPLIKVQSDLEAKVNSVTELLSKLQETDKHLQRVTEQQTSIQRKQEKLHCHDHEKQMNVFMEQHIRHLEKLQQQQIDIQTHFISAALKTSSFQPVSMPSSRAVEKYSVKPEHPNLGSCNPSLYNTFASKQAPLKEVEDTSFDKQKSPLETPAPRRFAPVPVSRDDELSKRENLLEEKENMEVSCHRGNVRLLEQILNNNDSLTRKSESSNTTSLTRSKIGWTPEKTNRFPSCEELETTKVTMQKSDDVLHDLGQKEKETNSMVQPKESLSMLKLPDLPQNSVKLQTTNTTRSVLKDAEKILRGVQNNKKVLEENLEAIIRAKDGAAMYSLINALSTNREMSEKIRIRKTVDEWIKTISAEIQGLLKATTVIQDEDYMLQVYGKPVYQGHRSTLKKGPYLRFNSPSPKSRPQRPKVIERVKGTKVKSIRTQTDFYATKPKKMDSKMKHSVPVLPHGDQQYLFSPSREMPTFSGTLEGHLIPMAILLGQTQSNSDTMPPAGVIVSKPHPVTVTTSIPPSSRKVETGVKKPNIAIVEMKSEKKDPPQLTVQVLPSVDIDSISNSSADVLSPLSSPKEASLPPVQTWIKTPEIMKVDEEEVKFPGTNFDEIIDVIQEEEKCDEIPDSEPILEFNRSVKADSTKYNGPPFPPVASTFQPTADILDKVIERKETLENSLIQWVEQEIMSRIISGLFPVQQQIAPSISVSVSETSEPLTSDIVEGTSSGALQLFVDAGVPVNSNVIKHFVNEALAETIAVMLGDREAKKQGPVATGVSGDASTNETYLPARVCTPLPTPQPTPPCSPSSPAKECVLVKTPDSSPCDSDHDMAFPVKEICAEKGDDMPAIMLVNTPTVTPTTTPPPAAAVFTPTLSDISIDKLKVSSPELPKPWGDGDLPLEEENPNSPQEELHPRAIVMSVAKDEEPESMDFPAQPPPPEPVPFMPFPAGTKAPSPSQMPGSDSSTLESTLSVTVTETETLDKPISEGEILFSCGQKLAPKILEDIGLYLTNLNDSLSSTLHDAVEMEDDPPSEGQVIRMSHKKFHADAILSFAKQNQESAVSQQAVYHSEDLENSVGELSEGQRPQLTAAAENILMGHSLYMQPPVTNTQSLDQQCDPKPLSRQFDTVSGSIYEDSCASHGPMSLGELELEPNSKLVLPTTLLTAQENDVNLPVAAEDFSQYQLKQNQDVKQVEHKPSQSYLRVRNKSDIAPSQQQVSPGDMDRTQIELNPYLTCVFSGGKAVPLSASQMPPAKMSVMLPSVNLEDCSQSLSLSTMQEDMESSGADTF

SEQ ID NO: 1446 - protein, 552 aa, Homo sapiens
MKKNRERFCNREREFVYKFKVGSQCLELRVPLKFPVQENASHLHGRLMLLHSLPCFIEKDLKEALTQFIEEESLSDYDRDAEASLAAVKSGEVDLHQLASTWAKAYAETTLEHARPEEPSWDEDFADVYHDLIHSPASETLLNLEHNYFVSISELIGERDVELKKLRERQGIEMEKVMQELGKSLTDQDVNSLAAQHFESQQDLENKWSNELKQSTAIQKQEYQEWVIKLHQDLKNPNNSSLSEEIKVQPSQFRESVEAIGRIYEEQRKLEESFTIHLGAQLKTMHNLRLLRADMLDFCKHKRNHRSGVKLHRLQTALSLYSTSLCGLVLLVDNRINSYSGIKRDFATVCQECTDFHFPRIEEQLEVVQQVVLYARTQRRSKLKESLDSGNQNGGNDDKTKNAERNYLNVLPGEFYITRHSNLSEIHVAFHLCVDDHVKSGNITARDPAIMGLRNILKVCCTHDITTISIPLLLVHDMSEEMTIPWCLRRAELVFKCVKGFMMEMASWDGGISRTVQFLVPQSISEEMFYQLSNMLPQIFRVSSTLTLTSKH

SEQ ID NO: 1447 - protein, 225 aa, Homo sapiens
MAAAGGGGGGAAAAGRAYSFKVVLLGEGCVGKTSLVLRYCENKFNDKHITTLQASFLTKKLNIGGKRVNLAIWDTAGQERFHALGPIYYRDSNGAILVYDITDEDSFQKVKNWVKELRKMLGNEICLCIVGNKIDLEKERHVSIQEAESYAESVGAKHYHTSAKQNKGIEELFLDLCKRMIETAQVDERAKGNGSSQPGTARRGVQIIDDEPQAQTSGGGCCSSG

SEQ ID NO: 1448 - protein, 1997 aa, Homo sapiens
MLSHGAGLALWITLSLLQTGLAEPERCNFTLAESKASSHSVSIQWRILGSPCNFSLIYSSDTLGAALCPTFRIDNTTYGCNLQDLQAGTIYNFRIISLDEERTVVLQTDPLPPARFGVSKEKTTSTSLHVWWTPSSGKVTSYEVQLFDENNQKIQGVQIQESTSWNEYTFFNLTAGSKYNIAITAVSGGKRSFSVYTNGSTVPSPVKDIGISTKANSLLISWSHGSGNVERYRLMLMDKGILVHGGVVDKHATSYAFHGLTPGYLYNLTVMTEAAGLQNYRWKLVRTAPMEVSNLKVTNDGSLTSLKVKWQRPPGNVDSYNITLSHKGTIKESRVLAPWITETHFKELVPGRLYQVTVSCVSGELSAQKMAVGRTFPDKVANLEANNNGRMRSLVVSWSPPAGDWEQYRILLFNDSVVLLNITVGKEETQYVMDDTGLVPGRQYEVEVIVESGNLKNSERCQGRTVPLAVLQLRVKHANETSLSIMWQTPVAEWEKYIISLADRDLLLIHKSLSKDAKEFTFTDLVPGRKYMATVTSISGDLKNSSSVKGRTVPAQVTDLHVANQGMTSSLFTNWTQAQGDVEFYQVLLIHENVVIKNESISSETSRYSFHSLKSGSLYSVVVTTVSGGISSRQVVVEGRTVPSSVSGVTVNNSGRNDYLSVSWLLAPGDVDNYEVTLSHDGKVVQSLVIAKSVRECSFSSLTPGRLYTVTITTRSGKYENHSFSQERTVPDKVQGVSVSNSARSDYLRVSWVHATGDFDHYEVTIKNKNNFIQTKSIPKSENECVFVQLVPGRLYSVTVTTKSGQYEANEQGNGRTIPEPVKDLTLRNRSTEDLHVTWSGANGDVDQYEIQLLFNDMKVFPPFHLVNTATEYRFTSLTPGRQYKILVLTISGDVQQSAFIEGFTVPSAVKNIHISPNGATDSLTVNWTPGGGDVDSYTVSAFRHSQKVDSQTIPKHVFEHTFHRLEAGEQYQIMIASVSGSLKNQINVVGRTVPASVQGVIADNAYSSYSLIVSWQKAAGVAERYDILLLTENGILLRNTSEPATTKQHKFEDLTPGKKYKIQILTVSGGLFSKEAQTEGRTVPAAVTDLRITENSTRHLSFRWTASEGELSWYNIFLYNPDGNLQERAQVDPLVQSFSFQNLLQGRMYKMVIVTHSGELSNESFIFGRTVPASVSHLRGSNRNTTDSLWFNWSPASGDFDFYELILYNPNGTKKENWKDKDLTEWRFQGLVPGRKYVLWVVTHSGDLSNKVTAESRTAPSPPSLMSFADIANTSLAITWKGPPDWTDYNDFELQWLPRDALTVFNPYNNRKSEGRIVYGLRPGRSYQFNVKTVSGDSWKTYSKPIFGSVRTKPDKIQNLHCRPQNSTAIACSWIPPDSDFDGYSIECRKMDTQEVEFSRKLEKEKSLLNIMMLVPHKRYLVSIKVQSAGMTSEVVEDSTITMIDRPPPPPPHIRVNEKDVLISKSSINFTVNCSWFSDTNGAVKYFTVVVREADGSDELKPEQQHPLPSYLEYRHNASIRVYQTNYFASKCAENPNSNSKSFNIKLGAEMESLGGKCDPTQQKFCDGPLKPHTAYRISIRAFTQLFDEDLKEFTKPLYSDTFFSLPITTESEPLFGAIEGVSAGLFLIGMLVAVVALLICRQKVSHGRERPSARLSIRRDRPLSVHLNLGQKGNRKTSCPIKINQFEGHFMKLQADSNYLLSKEYEELKDVGRNQSCDIALLPENRGKNRYNNILPYDATRVKLSNVDDDPCSDYINASYIPGNNFRREYIVTQGPLPGTKDDFWKMVWEQNVHNIVMVTQCVEKGRVKCDHYWPADQDSLYYGDLILQMLSESVLPEWTIREFKICGEEQLDAHRLIRHFHYTVWPDHGVPETTQSLIQFVRTVRDYINRSPGAGPTVVHCSAGVGRTGTFIALDRILQQLDSKDSVDIYGAVHDLRLHRVHMVQTECQYVYLHQCVRDVLRARKLRSEQENPLFPIYENVNPEYHRDPVYSRH

SEQ ID NO: 1449 - protein, 148 aa, Homo sapiens
MKALIVLGLVLLSVTVQGKVFERCELARTLKRLGMDGYRGISLANWMCLAKWESGYNTRATNYNAGDRSTDYGIFQINSRYWCNDGKTPGAVNACHLSCSALLQDNIADAVACAKRVVRDPQGIRAWVAWRNRCQNRDVRQYVQGCGV

SEQ ID NO: 1450 - protein, 539 aa, Homo sapiens
MPPAGGPRAPRPAALPRSLSRLRECPGRSRIVLALGATQMALGCLIVAVSFAALALTTSARVRHSCPFWAGFSVLLSGLIGVVSWKRPLSLVITFFMLLSAVCVMLNLAGSILSCQNAQLVNSLEGCQLIKFDSVEVCVCCELQHQSSGCSNLGETLKLNPLQENCNAVRLTLKDLLFSVCALNVLSTIVCALATAMCCMQMVSSDVLQMFLPQRSHPANPTCVTPHGTVLHQTLDFDEFIPPLPPPPYYPPEYTCTPSTEAQRGLHLDFAPSPFGTLYDVAINSPGLLYPAELPPPYEAVVGQPPASQVTSIGQQVAESSSGDPNTSAGFSTPVPADSTSLLVSEGTATPGSSPSPDGPVGAPAPSEPALPPGHVSPEDPGMGSQVQPGPGRVSRSTSDPTLCTSSMAGDASSHRPSCSQDLEAGLSEAVPGSASMSRSATAACRAQLSPAGDPDTWKTDQRPTPEPFPATSKERPRSLVDSKAYADARVLVAKFLEHSHCALPTEAQHMVGAMRLAVTNEERLEEEAVFGADVLDQV

SEQ ID NO: 1451 - protein, 814 aa, Homo sapiens
MHLEGRDGRRYPGAPAVELLQTSVPSGLAELVAGKRRLPRGAGGADPSHSCPRGAAGQSSWAPAGQEFASFLTKGRSHSSLPQMSSSRSKDSCFTENTPLLRNSLQEKGSRCIPVYHPEFITAEESWEDSSADWERRYLLSREVSGLSASASSEKGDLLDSPHIRLRLSKLRRCVQWLKVMGLFAFVVLCSILFSLYPDQGKLWQLLALSPLENYSVNLSSHVDSTLLQVDLAGALVASGPSRPGREEHIVVELTQADALGSRWRRPQQVTHNWTVYLNPRRSEHSVMSRTFEVLTRETVSISIRASLQQTQAVPLLMAHQYLRGSVETQVTIATAILAGVYALIIFERPSLTHVVEWIDFETLALLFGMMILVAIFSETGFFDYCAVKAYRLSRGRVWAMIIMLCLIAAVLSAFLDNVTTMLLFTPVTIRLCEVLNLDPRQVLIAEVIFTNIGGAATAIGDPPNVIIVSNQELRKMGLDFAGFTAHMFIGICLVLLVCFPLLRLLYWNRKLYNKEPSEIVELKHEIHVWRLTAQRISPASREETAVRRLLLGKVLALEHLLARRLHTFHRQISQEDKNWETNIQELQKKHRISDGILLAKCLTVLGFVIFMFFLNSFVPGIHLDLGWIAILGAIWLLILADIHDFEIILHRVEWATLLFFAALFVLMEALAHLHLIEYVGEQTALLIKMVPEEQRLIAAIVLVVWVSALASSLIDNIPFTATMIPVLLNLSHDPEVGLPAPPLMYALAFGACLGGNGTLIGASANVVCAGIAEQHGYGFSFMEFFRLGFPMMVVSCTVGMCYLLVAHVVVGWN

SEQ ID NO: 1452 - protein, 500 aa, Homo sapiens
MSNSVPLLCFWSLCYCFAAGSPVPFGPEGRLEDKLHKPKATQTEVKPSVRFNLRTSKDPEHEGCYLSVGHSQPLEDCSFNMTAKTFFIIHGWTMSGIFENWLHKLVSALHTREKDANVVVVDWLPLAHQLYTDAVNNTRVVGHSIARMLDWLQEKDDFSLGNVHLIGYSLGAHVAGYAGNFVKGTVGRITGLDPAGPMFEGADIHKRLSPDDADFVDVLHTYTRSFGLSIGIQMPVGHIDIYPNGGDFQPGCGLNDVLGSIAYGTITEVVKCEHERAVHLFVDSLVNQDKPSFAFQCTDSNRFKKGICLSCRKNRCNSIGYNAKKMRNKRNSKMYLKTRAGMPFRVYHYQMKIHVFSYKNMGEIEPTFYVTLYGTNADSQTLPLEIVERIEQNATNTFLVYTEEDLGDLLKIQLTWEGASQSWYNLWKEFRSYLSQPRNPGRELNIRRIRVKSGETQRKLTFCTEDPENTSISPGRELWFRKCRDGWRMKNETSPTVELP

SEQ ID NO: 1453 - protein, 490 aa, Homo sapiens
MGPVMPPSKKPESSGISVSSGLSQCYGGSGFSKALQEDDDLDFSLPDIRLEEGAMEDEELTNLNWLHESKNLLKSFGESVLRSVSPVQDLDDDTPPSPAHSDMPYDARQNPNCKPPYSFSCLIFMAIEDSPTKRLPVKDIYNWILEHFPYFANAPTGWKNSVRHNLSLNKCFKKVDKERSQSIGKGSLWCIDPEYRQNLIQALKKTPYHPHPHVFNTPPTCPQAYQSTSGPPIWPGSTFFKRNGALLQDPDIDAASAMMLLNTPPEIQAGFPPGVIQNGARVLSRGLFPGVRPLPITPIGVTAAMRNGITSCRMRTESEPSCGSPVVSGDPKEDHNYSSAKSSNARSTSPTSDSISSSSSSADDHYEFATKGSQEGSEGSEGSFRSHESPSDTEEDDRKHSQKEPKDSLGDSGYASQHKKRQHFAKARKVPSDTLPLKKRRTEKPPESDDEEMKEAAGSLLHLAGIRSCLNNITNRTAKGQKEQKETTKN

SEQ ID NO: 1454 - protein, 440 aa, Homo sapiens
MGQSQSGGHGPGGGKKDDKDKKKKYEPPVPTRVGKKKKKTKGPDAASKLPLVTPHTQCRLKLLKLERIKDYLLMEEEFIRNQEQMKPLEEKQEEERSKVDDLRGTPMSVGTLEEIIDDNHAIVSTSVGSEHYVSILSFVDKDLLEPGCSVLLNHKVHAVIGVLMDDTDPLVTVMKVEKAPQETYADIGGLDNQIQEIKESVELPLTHPEYYEEMGIKPPKGVILYGPPGTGKTLLAKAVANQTSATFLRVVGSELIQKYLGDGPKLVRELFRVAEEHAPSIVFIDEIDAIGTKRYDSNSGGEREIQRTMLELLNQLDGFDSRGDVKVIMATNRIETLDPALIRPGRIDRKIEFPLPDEKTKKRIFQIHTSRMTLADDVTLDDLIMAKDDLSGADIKAICTEAGLMALRERRMKVTNEDFKKSKENVLYKKQEGTPEGLYL

SEQ ID NO: 1455 - protein, 646 aa, Homo sapiens
MAAESGSDFQQRRRRRRDPEEPEKTELSERELAVAVAVSQENDEENEERWVGPLPVEATLAKKRKVLEFERVYLDNLPSASMYERSYMHRDVITHVVCTKTDFIITASHDGHVKFWKKIEEGIEFVKHFRSHLGVIESIAVSSEGALFCSVGDDKAMKVFDVVNFDMINMLKLGYFPGQCEWIYCPGDAISSVAASEKSTGKIFIYDGRGDNQPLHIFDKLHTSPLTQIRLNPVYKAVVSSDKSGMIEYWTGPPHEYKFPKNVNWEYKTDTDLYEFAKCKAYPTSVCFSPDGKKIATIGSDRKVRIFRFVTGKLMRVFDESLSMFTELQQMRQQLPDMEFGRRMAVERELEKVDAVRLINIVFDETGHFVLYGTMLGIKVINVETNRCVRILGKQENIRVMQLALFQGIAKKHRAATTIEMKASENPVLQNIQADPTIVCTSFKKNRFYMFTKREPEDTKSADSDRDVFNEKPSKEEVMAATQAEGPKRVSDSAIIHTSMGDIHTKLFPVECPKTVENFCVHSRNGYYNGHTFHRIIKGFMIQTGDPTGTGMGGESIWGGEFEDEFHSTLRHDRPYTLSMANAGSNTNGSQFFITVVPTPWLDNKHTVFGRVTKGMEVVQRISNVKVNPKTDKPYEDVSIINITVK

SEQ ID NO: 1456 - protein, 205 aa, Homo sapiens
MVNLAAMVWRRLLRKRWVLALVFGLSLVYFLSSTFKQEERAVRDRNLLQVHDHNQPIPWKVQFNLGNSSRPSNQCRNSIQGKHLITDELGYVCERKDLLVNGCCNVNVPSTKQYCCDGCWPNGCCSAYEYCVSCCLQPNKQLLLERFLNRAAVAFQNLFMAVEDHFELCLAKCRTSSQSVQHENTYRDPIAKYCYGESPPELFPA

SEQ ID NO: 1457 - protein, 888 aa, Homo sapiens
MAGAAAESGRELWTFAGSRDPSAPRLAYGYGPGSLRELRAREFSRLAGTVYLDHAGATLFSQSQLESFTSDLMENTYGNPHSQNISSKLTHDTVEQVRYRILAHFHTTAEDYTVIFTAGSTAALKLVAEAFPWVSQGPESSGSRFCYLTDSHTSVVGMRNVTMAINVISTPVRPEDLWSAEERSASASNPDCQLPHLFCYPAQSNFSGVRYPLSWIEEVKSGRLHPVSTPGKWFVLLDAASYVSTSPLDLSAHQADFVPISFYKIFGFPTGLGALLVHNRAAPLLRKTYFGGGTASAYLAGEDFYIPRQSVAQRFEDGTISFLDVIALKHGFDTLERLTGGMENIKQHTFTLAQYTYVALSSLQYPNGAPVVRIYSDSEFSSPEVQGPIINFNVLDDKGNIIGYSQVDKMASLYNIHLRTGCFCNTGACQRHLGISNEMVRKHFQAGHVCGDNMDLIDGQPTGSVRISFGYMSTLDDVQAFLRFIIDTRLHSSGDWPVPQAHADTGETGAPSADSQADVIPAVMGRRSLSPQEDALTGSRVWNNSSTVNAVPVAPPVCDVARTQPTPSEKAAGVLEGALGPHVVTNLYLYPIKSCAAFEVTRWPVGNQGLLYDRSWMVVNHNGVCLSQKQEPRLCLIQPFIDLRQRIMVIKAKGMEPIEVPLEENSERTQIRQSRVCADRVSTYDCGEKISSWLSTFFGRPCHLIKQSSNSQRNAKKKHGKDQLPGTMATLSLVNEAQYLLINTSSILELHRQLNTSDENGKEELFSLKDLSLRFRANIIINGKRAFEEEKWDEISIGSLRFQVLGPCHRCQMICIDQQTGQRNQHVFQKLSESRETKVNFGMYLMHASLDLSSPCFLSVGSQVLPVLKENVEGHDLPASEKHQDVTS

SEQ ID NO: 1458 - protein, 368 aa, Homo sapiens
MSAQSVEEDSILIIPTPDEEEKILRVKLEEDPDGEEGSSIPWNHLPDPEIFRQRFRQFGYQDSPGPREAVSQLRELCRLWLRPETHTKEQILELVVLEQFVAILPKELQTWVRDHHPENGEEAVTVLEDLESELDDPGQPVSLRRRKREVLVEDMVSQEEAQGLPSSELDAVENQLKWASWELHSLRHCDDDGRTENGALAPKQELPSALESHEVPGTLNMGVPQIFKYGETCFPKGRFERKRNPSRKKQHICDECGKHFSQGSALILHQRIHSGEKPYGCVECGKAFSRSSILVQHQRVHTGEKPYKCLECGKAFSQNSGLINHQRIHTGEKPYECVQCGKSYSQSSNLFRHQRRHNAEKLLNVVKV

SEQ ID NO: 1459 - protein, 1482 aa, Homo sapiens
MRKDRLLHLCLVLLLILLSASDSNSTEPQYMVLVPSLLHTEAPKKGCVLLSHLNETVTVSASLESGRENRSLFTDLVAEKDLFHCVSFTLPRISASSEVAFLSIQIKGPTQDFRKRNTVLVLNTQSLVFVQTDKPMYKPGQTVRFRVVSVDENFRPRNELIPLIYLENPRRNRIAQWQSLKLEAGINQLSFPLSSEPIQGSYRVVVQTESGGRIQHPFTVEEFVLPKFEVKVQVPKIISIMDEKVNITVCGEYTYGKPVPGLATVSLCRKLSRVLNCDKQEVCEEFSQQLNSNGCITQQVHTKMLQITNTGFEMKLRVEARIREEGTDLEVTANRISEITNIVSKLKFVKVDSHFRQGIPFFAQVLLVDGKGVPIPNKLFFISVNDANYYSNATTNEQGLAQFSINTTSISVNKLFVRVFTVHPNLCFHYSWVAEDHQGAQHTANRVFSLSGSYIHLEPVAGTLPCGHTETITAHYTLNRQAMGELSELSFHYLIMAKGVIVRSGTHTLPVESGDMKGSFALSFPVESDVAPIARMFIFAILPDGEVVGDSEKFEIENCLANKVDLSFSPAQSPPASHAHLQVAAAPQSLCALRAVDQSVLLMKPEAELSVSSVYNLLTVKDLTNFPDNVDQQEEEQGHCPRPFFIHNGAIYVPLSSNEADIYSFLKGMGLKVFTNSKIRKPKSCSVIPSVSAGAVGQGYYGAGLGVVERPYVPQLGTYNVIPLNNEQSSGPVPETVRSYFPETWIWELVAVNSSGVAEVGVTVPDTITEWKAGAFCLSEDAGLGISSTASLRAFQPFFVELTMPYSVIRGEVFTLKATVLNYLPKCIRVSVQLKASPAFLASQNTKGEESYCICGNERQTLSWTVTPKTLGNVNFSVSAEAMQSLELCGNEVVEVPEIKRKDTVIKTLLVEAEGIEQEKTFSSMTCASGANVSEQLSLKLPSNVVKESARASFSVLGDILGSAMQNIQNLLQMPYGCGEQNMVLFAPNIYVLNYLNETQQLTQEIKAKAVGYLITGYQRQLNYKHQDGSYSTFGERYGRNQGNTWLTAFVLKTFAQARSYIFIDEAHITQSLTWLSQMQKDNGCFRSSGSLLNNAIKGGVEDEATLSAYVTIALLEIPLPVTNPIVRNALFCLESAWNVAKEGTHGSHVYTKALLAYAFSLLGKQNQNREILNSLDKEAVKEDNLVHWERPQRPKAPVGHLYQTQAPSAEVEMTSYVLLAYLTAQPAPTSGDLTSATNIVKWIMKQQNAQGGFSSTQDTVVALHALSRYGAATFTRTEKTAQVTVQDSQTFSTNFQVDNNNLLLLQQISLPELPGEYVITVTGERCVYLQTSMKYNILPEKEDSPFALKVQTVPQTCDGHKAHTSFQISLTISYTGNRPASNMVIVDVKMVSGFIPLKPTVKMLERSSSVSRTEVSNNHVLIYVEQVTNQTLSFSFMVLQDIPVGDLKPAIVKVYDYYETDESVVAEYIAPCSTDTEHGNV

SEQ ID NO: 1460 - protein, 194 aa, Homo sapiens
MHDSNNVEKDITPSELPANPGCLHSKEHSIKATLIWRLFFLIMFLTIIVCGMVAALSAIRANCHQEPSVCLQAACPESWIGFQRKCFYFSDDTKNWTSSQRFCDSQDADLAQVESFQELNFLLRYKGPSDHWIGLSREQGQPWKWINGTEWTRQLVMKEDGANLYVAKVSQVPRMNPRPVMVSYPGSRRVCLFE

SEQ ID NO: 1461 - protein, 1613 aa, Homo sapiens
MGAVLRSLLACSFCVLLRAAPLLLYANRRDLRLVDATNGKENATIVVGGLEDAAAVDFVFSHGLIYWSDVSEEAIKRTEFNKTESVQNVVVSGLLSPDGLACDWLGEKLYWTDSETNRIEVSNLDGSLRKVLFWQELDQPRAIALDPSSGFMYWTDWGEVPKIERAGMDGSSRFIIINSEIYWPNGLTLDYEEQKLYWADAKLNFIHKSNLDGTNRQAVVKGSLPHPFALTLFEDILYWTDWSTHSILACNKYTGEGLREIHSDIFSPMDIHAFSQQRQPNATNPCGIDNGGCSHLCLMSPVKPFYQCACPTGVKLLENGKTCKDGATELLLLARRTDLRRISLDTPDFTDIVLQLEDIRHAIAIDYDPVEGYIYWTDDEVRAIRRSFIDGSGSQFVVTAQIAHPDGIAVDWVARNLYWTDTGTDRIEVTRLNGTMRKILISEDLEEPRAIVLDPMVGYMYWTDWGEIPKIERAALDGSDRVVLVNTSLGWPNGLALDYDEGKIYWGDAKTDKIEVMNTDGTGRRVLVEDKIPHIFGFTLLGDYVYWTDWQRRSIERVHKRSAEREVIIDQLPDLMGLKATNVHRVIGSNPCAEENGGCSHLCLYRPQGLRCACPIGFELISDMKTCIVPEAFLLFSRRADIRRISLETNNNNVAIPLTGVKEASALDFDVTDNRIYWTDISLKTISRAFMNGSALEHVVEFGLDYPEGMAVDWLGKNLYWADTGTNRIEVSKLDGQHRQVLVWKDLDSPRALALDPAEGFMYWTEWGGKPKIDRAAMDGSERTTLVPNVGRANGLTIDYAKRRLYWTDLDTNLIESSNMLGLNREVIADDLPHPFGLTQYQDYIYWTDWSRRSIERANKTSGQNRTIIQGHLDYVMDILVFHSSRQSGWNECASSNGHCSHLCLAVPVGGFVCGCPAHYSLNADNRTCSAPTTFLLFSQKSAINRMVIDEQQSPDIILPIHSLRNVRAIDYDPLDKQLYWIDSRQNMIRKAQEDGSQGFTVVVSSVPSQNLEIQPYDLSIDIYSRYIYWTCEATNVINVTRLDGRSVGVVLKGEQDRPRAVVVNPEKGYMYFTNLQERSPKIERAALDGTEREVLFFSGLSKPIALALDSRLGKLFWADSDLRRIESSDLSGANRIVLEDSNILQPVGLTVFENWLYWIDKQQQMIEKIDMTGREGRTKVQARIAQLSDIHAVKELNLQEYRQHPCAQDNGGCSHICLVKGDGTTRCSCPMHLVLLQDELSCGEPPTCSPQQFTCFTGEIDCIPVAWRCDGFTECEDHSDELNCPVCSESQFQCASGQCIDGALRCNGDANCQDKSDEKNCEVLCLIDQFRCANGQCIGKHKKCDHNVDCSDKSDELDCYPTEEPAPQATNTVGSVIGVIVTIFVSGTVYFICQRMLCPRMKGDGETMTNDYVVHGPASVPLGYVPHPSSLSGSLPGMSRGKSMISSLSIMGGSSGPPYDRAHVTGASSSSSSSTKGTYFPAILNPPPSPATERSHYTMEFGYSSNSPSTHRSYSYRPYSYRHFAPPTTPCSTDVCDSDYAPSRRMTSVATAKGYTSDLNYDSEPVPPPPTPRSQYLSAEENYESCPPSPYTERSYSHHLYPPPPSPCTDSS

SEQ ID NO: 1462 - protein, 121 aa, Homo sapiens
MGRIFLDHIGGTRLFSCANCDTILTNRSELISTRFTGATGRAFLFNKVVNLQYSEVQDRVMLTGRHMVRDVSCKNCNSKLGWIYEFATEDSQRYKEGRVILERALVRESEGFEEHVPSDNS

SEQ ID NO: 1463 - protein, 586 aa, Homo sapiens
MATATPVPPRMGSRAGGPTTPLSPTRLSRLQEKEELRELNDRLAVYIDKVRSLETENSALQLQVTEREEVRGRELTGLKALYETELADARRALDDTARERAKLQIELGKCKAEHDQLLLNYAKKESDLNGAQIKLREYEAALNSKDAALATALGDKKSLEGDLEDLKDQIAQLEASLAAAKKQLADETLLKVDLENRCQSLTEDLEFRKSMYEEEINETRRKHETRLVEVDSGRQIEYEYKLAQALHEMREQHDAQVRLYKEELEQTYHAKLENARLSSEMNTSTVNSAREELMESRMRIESLSSQLSNLQKESRACLERIQELEDLLAKEKDNSRRMLTDKEREMAEIRDQMQQQLNDYEQLLDVKLALDMEISAYRKLLEGEEERLKLSPSPSSRVTVSRASSSRSVRTTRGKRKRVDVEESEASSSVSISHSASATGNVCIEEIDVDGKFIRLKNTSEQDQPMGGWEMIRKIGDTSVSYKYTSRYVLKAGQTVTIWAANAGVTASPPTDLIWKNQNSWGTGEDVKVILKNSQGEEVAQRSTVFKTTIPEEEEEEEEAAGVVVEEELFHQQGTPRASNRSCAIM

SEQ ID NO: 1464 - protein, 1016 aa, Homo sapiens
MEAPEYLDLDEIDFSDDISDNRSQGNRLQKLGLEDTDREDAMGFGSHRAKLTVVAALGACHCPENEYSVTSLKTIPELCRRCDTQNEDRSVSSSSWNCGISTLITNTQKPTGIADVYSKFRPVKRVSPLKHQPETLENNESDDQKNQKVVEYQKGGESDLGPQPQELGPGDGVGGPPGKSSEPSTSLGELEHYDLDMDEILDVPYIKSSQQLASFTKVTSEKRILGLCTTINGLSGKACSTGSSESSSSNMAPFCVLSPVKSPHLRKASAVIHDQHKLSTEETEISPPLVKCGSAYEPENQSKDFLNKTFSDPHGRKVEKTTPDCQLRAFHLQSSAAESKPEEQVSGLNRTSSQGPEERSEYLKKVKSILNIVKEGQISLLPHLAADNLDKIHDENGNNLLHIAASQGHAECLQHLTSLMGEDCLNERNTEKLTPAGLAIKNGQLECVRWMVSETEAIAELSCSKDFPSLIHYAGCYGQEKILLWLLQFMQEQGISLDEVDQDGNSAVHVASQHGYLGCIQTLVEYGANVTMQNHAGEKPSQSAERQGHTLCSRYLVVVETCMSLASQVVKLTKQLKEQTVERVTLQNQLQQFLEAQKSEGKSLPSSPSSPSSPASRKSQWKSPDADDDSVAKSKPGVQEGIQVLGSLSASSRARPKAKDEDSDKILRQLLGKEISENVCTQEKLSLEFQDAQASSRNSKKIPLEKRELKLARLRQLMQRSLSESDTDSNNSEDPKTTPVRKADRPRPQPIVESVESMDSAESLHLMIKKHTLASGGRRFPFSIKASKSLDGHSPSPTSESSEPDLESQYPGSGSIPPNQPSGDPQQPSPDSTAAQKVATSPKSALKSPSSKRRTSQNLKLRVTFEEPVVQMEQPSLELNGEKDKDKGRTLQRTSTSNESGDQLKRPFGAFRSIMETLSGNQNNNNNYQAANQLKTSTLPLTSLGRKTDAKGNPASSASKGKNKAEMYSSCINLSSNMLIEEHLCNDTRHNDINRKMKKSYSIKHIAEPESKELFL

SEQ ID NO: 1465 - protein, 919 aa, Homo sapiens
MEAPEYLDLDEIDFSDDISYSVTSLKTIPELCRRCDTQNEDRSVSSSSWNCGISTLITNTQKPTGIADVYSKFRPVKRVSPLKHQPETLENNESDDQKNQKVVEYQKGGESDLGPQPQELGPGDGVGGPPGKSSEPSTSLGELEHYDLDMDEILDVPYIKSSQQLASFTKVTSEKRILGLCTTINGLSGKACSTGSSESSSSNMAPFCVLSPVKSPHLRKASAVIHDQHKLSTEETEISPPLVKCGSAYEPENQSKDFLNKTFSDPHGRKVEKTTPDCQLRAFHLQSSAAESKPEEQVSGLNRTSSQGPEERSEYLKKVKSILNIVKEGQISLLPHLAADNLDKIHDENGNNLLHIAASQGHAECLQHLTSLMGEDCLNERNTEKLTPAGLAIKNGQLECVRWMVSETEAIAELSCSKDFPSLIHYAGCYGQEKILLWLLQFMQEQGISLDEVDQDGNSAVHVASQHGYLGCIQTLVEYGANVTMQNHAGEKPSQSAERQGHTLCSRYLVVVETCMSLASQVVKLTKQLKEQTVERVTLQNQLQQFLEAQKSEGKSLPSSPSSPSSPASRKSQWKSPDADDDSVAKSKPGVQEGIQVLGSLSASSRARPKAKDEDSDKILRQLLGKEISENVCTQEKLSLEFQDAQASSRNSKKIPLEKRELKLARLRQLMQRSLSESDTDSNNSEDPKTTPVRKADRPRPQPIVESVESMDSAESLHLMIKKHTLASGGRRFPFSIKASKSLDGHSPSPTSESSEPDLESQYPGSGSIPPNQPSGDPQQPSPDSTAAQKVATSPKSALKSPSSKRRTSQNLKLRVTFEEPVVQMEQPSLELNGEKDKDKGRTLQRTSTSNESGDQLKRPFGAFRSIMETLSGNQNNNNNYQAANQLKTSTLPLTSLGRKTDAKGNPASSASKGKNKAA

SEQ ID NO: 1466 - protein, 774 aa, Homo sapiens
MEPEREGTERHPRKVRESRQAPNKLVGAAEAMKAGWDLEESQPEAKKARLSTILFTDNCEVTHDQLCELLKYAVLGKSNVPKPSWCQLFHQNHLNNVVVFVLQGMSQLHFYRFYLEFGCLRKAFRHKFRLPPPSSDFLADVVGLQTEQRAGDLPKTMEGPLPSNAKAAINLQDDPIIQKYGSKKVGLTRCLLTKEEMRTFHFPLQGFPDCENFLLTKCNGSIADNSPLFGLDCEMCLTSKGRELTRISLVAEGGCCVMDELVKPENKILDYLTSFSGITKKILNPVTTKLKDVQRQLKALLPPDAVLVGHSLDLDLRALKMIHPYVIDTSLLYVREQGRRFKLKFLAKVILGKDIQCPDRLGHDATEDARTILELARYFLKHGPKKIAELNLEALANHQEIQAAGQEPKNTAEVLQHPNTSVLECLDSVGQKLLFLTRETDAGELPSSRNCQTIKCLSNKEVLEQARVEIPLFPFSIVQFSFKAFSPVLTEEMNKRMRIKWTEISTVYAGPFSKNCNLRALKRLFKSFGPVQSMTFVLETRQPHLCIQYEVLEAAQLAIESLDGILVDGICIKVQRPVTELTLDCDTLVNELEGDSENQGSIYLSGVSETFKEQLLQEPRLFLGLEAVILPKDLKSGKQKKYCFLKFKSFGSAQQALNILTGKDWKLKGRHALTPRHLHAWLRGLPPESTRLPGLRVVPPPFEQEALQTLKLDHPKIAAWRWSRKIGKLYNSLCPGTLCLILLPGTKSTHGSLSGLGLMGIKEEEESAGPGLCS

SEQ ID NO: 1467 - protein, 743 aa, Homo sapiens
MEPEREGTERHPRKVRESRQAPNKLVGAAEAMKAGWDLEESQPEAKKARLSTILFTDNCEVTHDQLCELLKYAVLGKSNVPKPSWCQLFHQNHLNNVVVFVLQGMSQLHFYRFYLEFGCLRKAFRHKFRLPPPSSDFLADVVGLQTEQRAGDLPKTMEGPLPSNAKAAINLQDDPIIQKYGSKKVGLTRCLLTKEEMRTFHFPLQGFPDCENFLLTKCNGSIADNSPLFGLDCEMCLTSKGRELTRISLVAEGGCCVMDELVKPENKILDYLTSFSGITKKILNPVTTKLKDVQRQLKALLPPDAVLVGHSLDLDLRALKMIHPYVIDTSLLYVREQGRRFKLKFLAKVILGKDIQCPDRLGHDATEDARTILELARYFLKHGPKKIAELNLEALANHQEIQAAGQEPKNTAEVLQHPNTSVLECLDSVGQKLLFLTRETDAGELPSSRNCQTIKCLSNKEVLEQARVEIPLFPFSIVQFSFKAFSPVLTEEMNKRMRIKWTEISTVYAGPFSKNCNLRALKRLFKSFGPVQSMTFVLETRQVQRPVTELTLDCDTLVNELEGDSENQGSIYLSGVSETFKEQLLQEPRLFLGLEAVILPKDLKSGKQKKYCFLKFKSFGSAQQALNILTGKDWKLKGRHALTPRHLHAWLRGLPPESTRLPGLRVVPPPFEQEALQTLKLDHPKIAAWRWSRKIGKLYNSLCPGTLCLILLPGTKSTHGSLSGLGLMGIKEEEESAGPGLCS

SEQ ID NO: 1468 - protein, 959 aa, Homo sapiens
MVAAPCARRLARRSHSALLAALTVLLLQTLVVWNFSSLDSGAGERRGGAAVGGGEQPPPAPAPRRERRDLPAEPAAARGGGGGGGGGGGGRGPQARARGGGPGEPRGQQPASRGALPARALDPHPSPLITLETQDGYFSHRPKEKVRTDSNNENSVPKDFENVDNSNFAPRTQKQKHQPELAKKPPSRQKELLKRKLEQQEKGKGHTFPGKGPGEVLPPGDRAAANSSHGKDVSRPPHARKTGGSSPETKYDQPPKCDISGKEAISALSRAKSKHCRQEIGETYCRHKLGLLMPEKVTRFCPLEGKANKNVQWDEDSVEYMPANPVRIAFVLVVHGRASRQLQRMFKAIYHKDHFYYIHVDKRSNYLHRQVLQVSRQYSNVRVTPWRMATIWGGASLLSTYLQSMRDLLEMTDWPWDFFINLSAADYPIRTNDQLVAFLSRYRDMNFLKSHGRDNARFIRKQGLDRLFLECDAHMWRLGDRRIPEGIAVDGGSDWFLLNRRFVEYVTFSTDDLVTKMKQFYSYTLLPAESFFHTVLENSPHCDTMVDNNLRITNWNRKLGCKCQYKHIVDWCGCSPNDFKPQDFHRFQQTARPTFFARKFEAVVNQEIIGQLDYYLYGNYPAGTPGLRSYWENVYDEPDGIHSLSDVTLTLYHSFARLGLRRAETSLHTDGENSCRYYPMGHPASVHLYFLADRFQGFLIKHHATNLAVSKLETLETWVMPKKVFKIASPPSDFGRLQFSEVGTDWDAKERLFRNFGGLLGPMDEPVGMQKWGKGPNVTVTVIWVDPVNVIAATYDILIESTAEFTHYKPPLNLPLRPGVWTVKILHHWVPVAETKFLVAPLTFSNRQPIKPEEALKLHNGPLRNAYMEQSFQSLNPVLSLPINPAQVEQARRNAASTGTALEGWLDSLVGGMWTAMDICATGPTACPVMQTCSQTAWSSFSPDPKSELGAVKPDGRLR

SEQ ID NO: 1469 - protein, 4116 aa, Homo sapiens
MGATGRLELTLAAPPHPGPAFQRSKARETQGEEEGSEMQIAKSDSIHHMSHSQGQPELPPLPASANEEPSGLYQTVMSHSFYPPLMQRTSWTLAAPFKEQHHHRGPSDSIANNYSLMAQDLKLKDLLKVYQPATISVPRDRTGQGLPSSGNRSSSEPMRKKTKFSSRNKEDSTRIKLAFKTSIFSPMKKEVKTSLTFPGSRPMSPEQQLDVMLQQEMEMESKEKKPSESDLERYYYYLTNGIRKDMIAPEEGEVMVRISKLISNTLLTSPFLEPLMVVLVQEKENDYYCSLMKSIVDYILMDPMERKRLFIESIPRLFPQRVIRAPVPWHSVYRSAKKWNEEHLHTVNPMMLRLKELWFAEFRDLRFVRTAEILAGKLPLQPQEFWDVIQKHCLEAHQTLLNKWIPTCAQLFTSRKEHWIHFAPKSNYDSSRNIEEYFASVASFMSLQLRELVIKSLEDLVSLFMIHKDGNDFKEPYQEMKFFIPQLIMIKLEVSEPIIVFNPSFDGCWELIRDSFLEIIKNSNGIPKLKYIPLKFSFTAAAADRQCVKAAEPGEPSMHAAATAMAELKGYNLLLGTVNAEEKLVSDFLIQTFKVFQKNQVGPCKYLNVYKKYVDLLDNTAEQNIAAFLKENHDIDDFVTKINAIKKRRNEIASMNITVPLAMFCLDATALNHDLCERAQNLKDHLIQFQVDVNRDTNTSICNQYSHIADKVSEVPANTKELVSLIEFLKKSSAVTVFKLRRQLRDASERLEFLMDYADLPYQIEDIFDNSRNLLLHKRDQAEMDLIKRCSEFELRLEGYHRELESFRKREVMTTEEMKHNVEKLNELSKNLNRAFAEFELINKEEELLEKEKSTYPLLQAMLKNKVPYEQLWSTAYEFSIKSEEWMNGPLFLLNAEQIAEEIGNMWRTTYKLIKTLSDVPAPRRLAENVKIKIDKFKQYIPILSISCNPGMKDRHWQQISEIVGYEIKPTETTCLSNMLEFGFGKFVEKLEPIGAAASKEYSLEKNLDRMKLDWVNVTFSFVKYRDTDTNILCAIDDIQMLLDDHVIKTQTMCGSPFIKPIEAECRKWEEKLIRIQDNLDAWLKCQATWLYLEPIFSSEDIIAQMPEEGRKFGIVDSYWKSLMSQAVKDNRILVAADQPRMAEKLQEANFLLEDIQKGLNDYLEKKRLFFPRFFFLSNDELLEILSETKDPLRVQPHLKKCFEGIAKLEFTDNLEIVGMISSEKETVPFIQKIYPANAKGMVEKWLQQVEQMMLASMREVIGLGIEAYVKVPRNHWVLQWPGQVVICVSSIFWTQEVSQALAENTLLDFLKKSNDQIAQIVQLVRGKLSSGARLTLGALTVIDVHARDVVAKLSEDRVSDLNDFQWISQLRYYWVAKDVQVQIITTEALYGYEYLGNSPRLVITPLTDRCYRTLMGALKLNLGGAPEGPAGTGKTETTKDLAKALAKQCVVFNCSDGLDYKAMGKFFKGLAQAGAWACFDEFNRIEVEVLSVVAQQILSIQQAIIRKLKTFIFEGTELSLNPTCAVFITMNPGYAGRAELPDNLKALFRTVAMMVPDYALIGEISLYSMGFLDSRSLAQKIVATYRLCSEQLSSQHHYDYGMRAVKSVLTAAGNLKLKYPEENESVLLLRALLDVNLAKFLAQDVPLFQGIISDLFPGVVLPKPDYEVFLKVLNDNIKKMKLQPVPWFIGKIIQIYEMMLVRHGYMIVGDPMGGKTSAYKVLAAALGDLHAANQMEEFAVEYKIINPKAITMGQLYGCFDQVSHEWMDGVLANAFREQASSLSDDRKWIIFDGPVDAIWIENMNTVLDDNKKLCLMSGEIIQMNSKMSLIFEPADLEQASPATVSRCGMIYMEPHQLGWKPLKDSYMDTLPSSLTKEHKELVNDMFMWLVQPCLEFGRLHCKFVVQTSPIHLAFSMMRLYSSLLDEIRAVEEEEMELGEGLSSQQIFLWLQGLFLFSLVWTVAGTINADSRKKFDVFFRNLIMGMDDNHPRPKSVKLTKNNIFPERGSIYDFYFIKQASGHWETWTQYITKEEEKVPAGAKVSELIIPTMETARQSFFLKTYLDHEIPMLFVGPTGTGKSAITNNFLLHLPKNTYLPNCINFSARTSANQTQDIIMSKLDRRRKGLFGPPIGKKAVVFVDDLNMPAKEVYGAQPPIELLRQWIDHGYWFDKKDTTRLDIVDMLLVTAMGPPGGGRNDITGRFTRHLNIISINAFEDDILTKIFSSIVDWHFGKGFDVMFLRYGKMLVQATKTIYRDAVENFLPTPSKSHYVFNLRDFSRVIQGVLLCPHTHLQDVEKCIRLWIHEVYRVFYDRLIDKEDRQVFFNMVKETTSNCFKQTIEKVLIHLSPTGKIVDDNIRSLFFGDYFKPESDQKIYDEITDLKQLTVVMEHYLEEFNNISKAPMSLVMFRFAIEHISRICRVLKQDKGHLLLVGIGGSGRQSAAKLSTFMNAYELYQIEITKNYAGNDWREDLKKIILQVGVATKSTVFLFADNQIKDESFVEDINMLLNTGDVPNIFPADEKADIVEKMQTAARTQGEKVEVTPLSMYNFFIERVINKISFSLAMSPIGDAFRNRLRMFPSLINCCTIDWFQSWPTDALELVANKFLEDVELDDNIRVEVVSMCKYFQESVKKLSLDYYNKLRRHNYVTPTSYLELILTFKTLLNSKRQEVAMMRNRYLTGLQKLDFAASQVAVMQRELTALQPQLILTSEETAKMMVKIEAETREADGKKLLVQADEKEANVAAAIAQGIKNECEGDLAEAMPALEAALAALDTLNPADISLVKSMQNPPGPVKLVMESICIMKGMKPERKPDPSGSGKMIEDYWGVSKKILGDLKFLESLKTYDKDNIPPLTMKRIRERFINHPEFQPAVIKNVSSACEGLCKWVRAMEVYDRVAKVVAPKRERLREAEGKLAAQMQKLNQKRAELKLVVDRLQALNDDFEEMNTKKKDLEENIEICSQKLVRAEKLISGLGGEKDRWTEAARQLGIRYTNLTGDVLLSSGTVAYLGAFTVDYRVQCQNQWLAECKDKVIPGFSDFSLSHTLGDPIKIRAWQIAGLPVDSFSIDNGIIVSNSRRWALMIDPHGQANKWIKNMEKANKLAVIKFSDSNYMRMLENALQLGTPVLIENIGEELDASIEPILLKATFKQQGVEYMRLGENIIEYSRDFKLYITTRLRNPHYLPEVAVKVCLLNFMITPLGLQDQLLGIVAAKEKPELEEKKNQLIVESAKNKKHLKEIEDKILEVLSMSKGNILEDETAIKVLSSSKVLSEEISEKQKVASMTETQIDETRMGYKPVAVHSATIFFCISDLANIEPMYQYSLTWFINLYMHSLTHSTKSEELNLRIKYIIDHFTLSIYNNVCRSLFEKDKLLFSLLLTIGIMKQKKEITEEVWYFLLTGGIALDNPYPNPAPQWLSEKAWAEIVRASALPKLHGLMEHLEQNLGEWKLIYDSAWPHEEQLPGSWKFSQGLEKMVILRCLRPDKMVPAVREFIAEHMGKLYIEAPTFDLQGSYNDSSCCAPLIFVLSPSADPMAGLLKFADDLGMGGTRTQTISLGQGQGPIAAKMINNAIKDGTWVVLQNCHLAASWMPTLEKICEEVIVPESTNARFRLWLTSYPSEKFPVSILQNGIKMTNEPPKGLRANLLRSYLNDPISDPVFFQSCAKAVMWQKMLFGLCFFHAVVQERRNFGPLGWNIPYEFNESDLRISMWQIQMFLNDYKEVPFDALTYLTGECNYGGRVTDDKDRRLLLSLLSMFYCKEIEEDYYSLAPGDTYYIPPHGSYQSYIDYLRNLPITAHPEVFGLHENADITKDNQETNQLFEGVLLTLPRQSGGSGKSPQEVVEELAQDILSKLPRDFDLEEVMKLYPVVYEESMNTVLRQELIRFNRLTKVVRRSLINLGRAIKGQVLMSSELEEVFNSMLVGKVPAMWAAKSYPSLKPLGGYVADLLARLTFFQEWIDKGPPVVFWISGFYFTQSFLTGVSQNYARKYTIPIDHIGFEFEVTPQETVMENNPEDGAYIKGLFLEGARWDRKTMQIGESLPKILYDPLPIIWLKPGESAMFLHQDIYVCPVYKTSARRGTLSTTGHSTNYVLSIELPTDMPQKHWINRGVASLCQLDN

SEQ ID NO: 1470 - protein, 1156 aa, Homo sapiens
MFPAAPSPRTPGTGSRRGPLAGLGPGSTPRTASRKGLPLGSAVSSPVLFSPVGRRSSLSSRGTPTRMFPHHSITESVNYDVKTFGSSLPVKVMEALTLAEVDDQLTINIDEGGWACLVCKEKLIIWKIALSPITKLSVCKELQLPPSDFHWSADLVALSYSSPSGEAHSTQAVAVMVATREGSIRYWPSLAGEDTYTEAFVDSGGDKTYSFLTAVQGGSFILSSSGSQLIRLIPESSGKIHQHILPQGQGMLSGIGRKVSSLFGILSPSSDLTLSSVLWDRERSSFYSLTSSNISKWELDDSSEKHAYSWDINRALKENITDAIWGSESNYEAIKEGVNIRYLDLKQNCDGLVILAAAWHSADNPCLIYYSLITIEDNGCQMSDAVTVEVTQYNPPFQSEDLILCQLTVPNFSNQTAYLYNESAVYVCSTGTGKFSLPQEKIVFNAQGDSVLGAGACGGVPIIFSRNSGLVSITSRENVSILAEDLEGSLASSVAGPNSESMIFETTTKNETIAQEDKIKLLKAAFLQYCRKDLGHAQMVVDELFSSHSDLDSDSELDRAVTQISVDLMDDYPASDPRWAESVPEEAPGFSNTSLIILHQLEDKMKAHSFLMDFIHQVGLFGRLGSFPVRGTPMATRLLLCEHAEKLSAAIVLKNHHSRLSDLVNTAILIALNKREYEIPSNLTPADVFFREVSQVDTICECLLEHEEQVLRDAPMDSIEWAEVVINVNNILKDMLQAASHYRQNRNSLYRREESLEKEPEYVPWTATSGPGGIRTVIIRQHEIVLKVAYPQADSNLRNIVTEQLVALIDCFLDGYVSQLKSVDKSSNRERYDNLEMEYLQKRSDLLSPLLSLGQYLWAASLAEKYCDFDILVQMCEQTDNQSRLQRYMTQFADQNFSDFLFRWYLEKGKRGKLLSQPISQHGQLANFLQAHEHLSWLHEINSQELEKAHATLLGLANMETRYFAKKKTLLGLSKLAALASDFSEDMLQEKIEEMAEQERFLLHQETLPEQLLAEKQLNLSAMPVLTAPQLIGLYICEENRRANEYDFKKALDLLEYIDEEEDININDLKLEILCKALQRDNWSSSDGKDDPIEVSKDSIFVKILQKLLKDGIQLSEYLPEVKDLLQADQLGSLKSNPYFEFVLKANYEYYVQGQI

SEQ ID NO: 1471 - protein, 661 aa, Homo sapiens
MEGAAAPVAGDRPDLGLGAPGSPREAVAGATAALEPRKPHGVKRHHHKHNLKHRYELQETLGKGTYGKVKRATERFSGRVVAIKSIRKDKIKDEQDMVHIRREIEIMSSLNHPHIISIYEVFENKDKIVIIMEYASKGELYDYISERRRLSERETRHFFRQIVSAVHYCHKNGVVHRDLKLENILLDDNCNIKIADFGLSNLYQKDKFLQTFCGSPLYASPEIVNGRPYRGPEVDSWALGVLLYTLVYGTMPFDGFDHKNLIRQISSGEYREPTQPSDARGLIRWMLMVNPDRRATIEDIANHWWVNWGYKSSVCDCDALHDSESPLLARIIDWHHRSTGLQADTEAKMKGLAKPTTSEVMLERQRSLKKSKKENDFAQSGQDAVPESPSKLSSKRPKGILKKRSNSEHRSHSTGFIEGVVGPALPSTFKMEQDLCRTGVLLPSSPEAEVPGKLSPKQSATMPKKGILKKTQQRESGYYSSPERSESSELLDSNDVMGSSIPSPSPPDPARVTSHSLSCRRKGILKHSSKYSAGTMDPALVSPEMPTLESLSEPGVPAEGLSRSYSRPSSVISDDSVLSSDSFDLLDLQENRPARQRIRSCVSAENFLQIQDFEGLQNRPRPQYLKRYRNRLADSSFSLLTDMDDVTQVYKQALEICSKLN

SEQ ID NO: 1472 - protein, 2813 aa, Homo sapiens
MIPARFAGVLLALALILPGTLCAEGTRGRSSTARCSLFGSDFVNTFDGSMYSFAGYCSYLLAGGCQKRSFSIIGDFQNGKRVSLSVYLGEFFDIHLFVNGTVTQGDQRVSMPYASKGLYLETEAGYYKLSGEAYGFVARIDGSGNFQVLLSDRYFNKTCGLCGNFNIFAEDDFMTQEGTLTSDPYDFANSWALSSGEQWCERASPPSSSCNISSGEMQKGLWEQCQLLKSTSVFARCHPLVDPEPFVALCEKTLCECAGGLECACPALLEYARTCAQEGMVLYGWTDHSACSPVCPAGMEYRQCVSPCARTCQSLHINEMCQERCVDGCSCPEGQLLDEGLCVESTECPCVHSGKRYPPGTSLSRDCNTCICRNSQWICSNEECPGECLVTGQSHFKSFDNRYFTFSGICQYLLARDCQDHSFSIVIETVQCADDRDAVCTRSVTVRLPGLHNSLVKLKHGAGVAMDGQDVQLPLLKGDLRIQHTVTASVRLSYGEDLQMDWDGRGRLLVKLSPVYAGKTCGLCGNYNGNQGDDFLTPSGLAEPRVEDFGNAWKLHGDCQDLQKQHSDPCALNPRMTRFSEEACAVLTSPTFEACHRAVSPLPYLRNCRYDVCSCSDGRECLCGALASYAAACAGRGVRVAWREPGRCELNCPKGQVYLQCGTPCNLTCRSLSYPDEECNEACLEGCFCPPGLYMDERGDCVPKAQCPCYYDGEIFQPEDIFSDHHTMCYCEDGFMHCTMSGVPGSLLPDAVLSSPLSHRSKRSLSCRPPMVKLVCPADNLRAEGLECTKTCQNYDLECMSMGCVSGCLCPPGMVRHENRCVALERCPCFHQGKEYAPGETVKIGCNTCVCQDRKWNCTDHVCDATCSTIGMAHYLTFDGLKYLFPGECQYVLVQDYCGSNPGTFRILVGNKGCSHPSVKCKKRVTILVEGGEIELFDGEVNVKRPMKDETHFEVVESGRYIILLLGKALSVVWDRHLSISVVLKQTYQEKVCGLCGNFDGIQNNDLTSSNLQVEEDPVDFGNSWKVSSQCADTRKVPLDSSPATCHNNIMKQTMVDSSCRILTSDVFQDCNKLVDPEPYLDVCIYDTCSCESIGDCACFCDTIAAYAHVCAQHGKVVTWRTATLCPQSCEERNLRENGYECEWRYNSCAPACQVTCQHPEPLACPVQCVEGCHAHCPPGKILDELLQTCVDPEDCPVCEVAGRRFASGKKVTLNPSDPEHCQICHCDVVNLTCEACQEPGGLVVPPTDAPVSPTTLYVEDISEPPLHDFYCSRLLDLVFLLDGSSRLSEAEFEVLKAFVVDMMERLRISQKWVRVAVVEYHDGSHAYIGLKDRKRPSELRRIASQVKYAGSQVASTSEVLKYTLFQIFSKIDRPEASRITLLLMASQEPQRMSRNFVRYVQGLKKKKVIVIPVGIGPHANLKQIRLIEKQAPENKAFVLSSVDELEQQRDEIVSYLCDLAPEAPPPTLPPDMAQVTVGPGLLGVSTLGPKRNSMVLDVAFVLEGSDKIGEADFNRSKEFMEEVIQRMDVGQDSIHVTVLQYSYMVTVEYPFSEAQSKGDILQRVREIRYQGGNRTNTGLALRYLSDHSFLVSQGDREQAPNLVYMVTGNPASDEIKRLPGDIQVVPIGVGPNANVQELERIGWPNAPILIQDFETLPREAPDLVLQRCCSGEGLQIPTLSPAPDCSQPLDVILLLDGSSSFPASYFDEMKSFAKAFISKANIGPRLTQVSVLQYGSITTIDVPWNVVPEKAHLLSLVDVMQREGGPSQIGDALGFAVRYLTSEMHGARPGASKAVVILVTDVSVDSVDAAADAARSNRVTVFPIGIGDRYDAAQLRILAGPAGDSNVVKLQRIEDLPTMVTLGNSFLHKLCSGFVRICMDEDGNEKRPGDVWTLPDQCHTVTCQPDGQTLLKSHRVNCDRGLRPSCPNSQSPVKVEETCGCRWTCPCVCTGSSTRHIVTFDGQNFKLTGSCSYVLFQNKEQDLEVILHNGACSPGARQGCMKSIEVKHSALSVELHSDMEVTVNGRLVSVPYVGGNMEVNVYGAIMHEVRFNHLGHIFTFTPQNNEFQLQLSPKTFASKTYGLCGICDENGANDFMLRDGTVTTDWKTLVQEWTVQRPGQTCQPILEEQCLVPDSSHCQVLLLPLFAECHKVLAPATFYAICQQDSCHQEQVCEVIASYAHLCRTNGVCVDWRTPDFCAMSCPPSLVYNHCEHGCPRHCDGNVSSCGDHPSEGCFCPPDKVMLEGSCVPEEACTQCIGEDGVQHQFLEAWVPDHQPCQICTCLSGRKVNCTTQPCPTAKAPTCGLCEVARLRQNADQCCPEYECVCDPVSCDLPPVPHCERGLQPTLTNPGECRPNFTCACRKEECKRVSPPSCPPHRLPTLRKTQCCDEYECACNCVNSTVSCPLGYLASTATNDCGCTTTTCLPDKVCVHRSTIYPVGQFWEEGCDVCTCTDMEDAVMGLRVAQCSQKPCEDSCRSGFTYVLHEGECCGRCLPSACEVVTGSPRGDSQSSWKSVGSQWASPENPCLINECVRVKEEVFIQQRNVSCPQLEVPVCPSGFQLSCKTSACCPSCRCERMEACMLNGTVIGPGKTVMIDVCTTCRCMVQVGVISGFKLECRKTTCNPCPLGYKEENNTGECCGRCLPTACTIQLRGGQIMTLKRDETLQDGCDTHFCKVNERGEYFWEKRVTGCPPFDEHKCLAEGGKIMKIPGTCCDTCEEPECNDITARLQYVKVGSCKSEVEVDIHYCQGKCASKAMYSIDINDVQDQCSCCSPTRTEPMQVALHCTNGSVVYHEVLNAMECKCSPRKCSK

SEQ ID NO: 1473 - protein, 487 aa, Homo sapiens
MASSAEGDEGTVVALAGVLQSGFQELSLNKLATSLGASEQALRLIISIFLGYPFALFYRHYLFYKETYLIHLFHTFTGLSIAYFNFGNQLYHSLLCIVLQFLILRLMGRTITAVLTTFCFQMAYLLAGYYYTATGNYDIKWTMPHCVLTLKLIGLAVDYFDGGKDQNSLSSEQQKYAIRGVPSLLEVAGFSYFYGAFLVGPQFSMNHYMKLVQGELIDIPGKIPNSIIPALKRLSLGLFYLVGYTLLSPHITEDYLLTEDYDNHPFWFRCMYMLIWGKFVLYKYVTCWLVTEGVCILTGLGFNGFEEKGKAKWDACANMKVWLFETNPRFTGTIASFNINTNAWVARYIFKRLKFLGNKELSQGLSLLFLALWHGLHSGYLVCFQMEFLIVIVERQAARLIQESPTLSKLAAITVLQPFYYLVQQTIHWLFMGYSMTAFCLFTWDKWLKVYKSIYFLGHIFFLSLLFILPYIHKAMVPRKEKLKKME

SEQ ID NO: 1474 - protein, 1147 aa, Homo sapiens
MDIRKFFGVIPSGKKLVSETVKKNEKTKSDEETLKAKKGIKEIKVNSSRKEDDFKQKQPSKKKRIIYDSDSESEETLQVKNAKKPPEKLPVSSKPGKISRQDPVTYISETDEEDDFMCKKAASKSKENGRSTNSHLGTSNMKKNEENTKTKNKPLSPIKLTPTSVLDYFGTGSVQRSNKKMVASKRKELSQNTDESGLNDEAIAKQLQLDEDAELERQLHEDEEFARTLAMLDEEPKTKKARKDTEAGETFSSVQANLSKAEKHKYPHKVKTAQVSDERKSYSPRKQSKYESSKESQQHSKSSADKIGEVSSPKASSKLAIMKRKEESSYKEIEPVASKRKENAIKLKGETKTPKKTKSSPAKKESVSPEDSEKKRTNYQAYRSYLNREGPKALGSKEIPKGAENCLEGLIFVITGVLESIERDEAKSLIERYGGKVTGNVSKKTNYLVMGRDSGQSKSDKAAALGTKIIDEDGLLNLIRTMPGKKSKYEIAVETEMKKESKLERTPQKNVQGKRKISPSKKESESKKSRPTSKRDSLAKTIKKETDVFWKSLDFKEQVAEETSGDSKARNLADDSSENKVENLLWVDKYKPTSLKTIIGQQGDQSCANKLLRWLRNWQKSSSEDKKHAKFGKFSGKDDGSSFKAALLSGPPGVGKTTTASLVCQELGYSYVELNASDTRSKSSLKAIVAESLNNTSIKGFYSNGAASSVSTKHALIMDEVDGMAGNEDRGGIQELIGLIKHTKIPIICMCNDRNHPKIRSLVHYCFDLRFQRPRVEQIKGAMMSIAFKEGLKIPPPAMNEIILGANQDIRQVLHNLSMWCARSKALTYDQAKADSHRAKKDIKMGPFDVARKVFAAGEETAHMSLVDKSDLFFHDYSIAPLFVQENYIHVKPVAAGGDMKKHLMLLSRAADSICDGDLVDSQIRSKQNWSLLPAQAIYASVLPGELMRGYMTQFPTFPSWLGKHSSTGKHDRIVQDLALHMSLRTYSSKRTVNMDYLSLLRDALVQPLTSQGVDGVQDVVALMDTYYLMKEDFENIMEISSWGGKPSPFSKLDPKVKAAFTRAYNKEAHLTPYSLQAIKASRHSTSPSLDSEYNEELNEDDSQSDEKDQDAIETDAMIKKKTKSSKPSKPEKDKEPRKGKGKSSKK

SEQ ID NO: 1475 - protein, 709 aa, Homo sapiens
MSGSRKEFDVKQILKIRWRWFGHQASSPNSTVDSQQGEFWNRGQTGANGGRKFLDPCSLQLPLASIGYRRSSQLDFQNSPSWPMASTSEVPAFEFTAEDCGGAHWLDRPEVDDGTSEEENESDSSSCRTSNSSQTLSSCHTMEPCTSDEFFQALNHAEQTFKKMENYLRHKQLCDVILVAGDRRIPAHRLVLSSVSDYFAAMFTNDVREARQEEIKMEGVEPNSLWSLIQYAYTGRLELKEDNIECLLSTACLLQLSQVVEACCKFLMKQLHPSNCLGIRSFADAQGCTDLHKVAHNYTMEHFMEVIRNQEFVLLPASEIAKLLASDDMNIPNEETILNALLTWVRHDLEQRRKDLSKLLAYIRLPLLAPQFLADMENNVLFRDDIECQKLIMEAMKYHLLPERRPMLQSPRTKPRKSTVGTLFAVGGMDSTKGATSIEKYDLRTNMWTPVANMNGRRLQFGVAVLDDKLYVVGGRDGLKTLNTVECYNPKTKTWSVMPPMSTHRHGLGVAVLEGPMYAVGGHDGWSYLNTVERWDPQARQWNFVATMSTPRSTVGVAVLSGKLYAVGGRDGSSCLKSVECFDPHTNKWTLCAQMSKRRGGVGVTTWNGLLYAIGGHDAPASNLTSRLSDCVERYDPKTDMWTAVASMSISRDAVGVCLLGDKLYAVGGYDGQAYLNTVEAYDPQTNEWTQVAPLCLGRAGACVVTVKL

SEQ ID NO: 1476 - protein, 694 aa, Homo sapiens
MNVIYFPLHIFVVYSRAYTSLVLVGCTNLCAVLFARCLDDHLVSLRMSGSRKEFDVKQILKIRWRWFGHQASSPNSTVDSQQGEFWNRGQTGANGGRKFLDPCSLQLPLASIGYRRSSQLDFQNSPSWPMASTSEVPAFEFTAEDCGGAHWLDRPEVDDGTSEEENESDSSSCRLVLSSVSDYFAAMFTNDVREARQEEIKMEGVEPNSLWSLIQYAYTGRLELKEDNIECLLSTACLLQLSQVVEACCKFLMKQLHPSNCLGIRSFADAQGCTDLHKVAHNYTMEHFMEVIRNQEFVLLPASEIAKLLASDDMNIPNEETILNALLTWVRHDLEQRRKDLSKLLAYIRLPLLAPQFLADMENNVLFRDDIECQKLIMEAMKYHLLPERRPMLQSPRTKPRKSTVGTLFAVGGMDSTKGATSIEKYDLRTNMWTPVANMNGRRLQFGVAVLDDKLYVVGGRDGLKTLNTVECYNPKTKTWSVMPPMSTHRHGLGVAVLEGPMYAVGGHDGWSYLNTVERWDPQARQWNFVATMSTPRSTVGVAVLSGKLYAVGGRDGSSCLKSVECFDPHTNKWTLCAQMSKRRGGVGVTTWNGLLYAIGGHDAPASNLTSRLSDCVERYDPKTDMWTAVASMSISRDAVGVCLLGDKLYAVGGYDGQAYLNTVEAYDPQTNEWTQVAPLCLGRAGACVVTVKL

SEQ ID NO: 1477 - protein, 1770 aa, Homo sapiens
MPRRRKNLGGNPFRKTANPKEVVVSSVASREEPTTTLPSMGETKVDQEELFTSISEIFSDLDPDVVYLMLSECDFKVENAMDCLLELSATDTKIEESSSQSFVASENQVGAAESKIMEKRPEEESEDSKMDSFLDMQLTEDLDSLIQNAFEKLNSSPDDQVYSFLPSQDVNSFNDSSEFINPDSSNMTPIFSTQNMNLNGENLENSGSTLSLNPLPSHSVLNESKCFIKDNTLALESNYPEDSLLSSSLNVASDSIAGCSSLNQKQKELLESECVEAQFSEAPVDLDASEPQACLNLPGLDLPGTGGDQKSTRVSDVFLPSEGFNFKPHKHPELPTKGKDVSYCPVLAPLPLLLPPPPPPPMWNPMIPAFDLFQGNHGFVAPVVTTAAHWRSVNYTFPPSVISHTSPTKVWRNKDGTSAYQVQETPVSQVVRKKTSYVGLVLVLLRGLPGSGKSFLARTLQEDNPSGVILSTDDYFYINGQYQFDVKYLGEAHEWNQNRAKEAFEKKISPIIIDNTNLQAWEMKPYVALSQKHKYKVLFREPDTWWKFKPKELARRNIHGVSKEKITRMLEHYQRFVSVPIIMSSSVPEKIERIELCAYSCEDRSTSPRDDEDIISEKEENILSLSLKHLEFTEEKNLDVTKETMLPENVAYLSNADLNKRRKEISDMNPSIQSALILETPHMYFSDSESKLQATDKSENEQIEMVAVKGYSKTDTDSSMERVSPSTCCSENNQEDCDLANSGPLQNEKSSPGEIVEERATVTKKAFGKQKSKSTLEKFPRHELSNFVGDWPVDKTIGQRTKRNRKTEKTSSVQSDKKYNYPQSHKLVNSVSVNTDCVQQRGSPHESVEDGRKSQCDDASEPLNSYKYDAYKNIDKNSFNIMGDWPSSDSLAQREHRSRMPKTGLSEPNLEIGTNDKMNEISLSTAHEACWGTSSQKLKTLGSSNLGSSEMLLSEMTCESQTCLSKKSHGQHTSLPLTFTNSAPTVSGVVEPQTLAECQEQMPKRDPGKEVGMCTQTEPQDFALLWKIEKNKISISDSIKVLTGRLDGFKPKVFNINTKSDVQEAIPYRVMYDKSTFVEESELTSADESENLNILCKLFGSFSLEALKDLYERCNKDIIWATSLLLDSETKLCEDTEFENFQKSCDGSQIGPFSLGLNLKEIISQRGTLENSNSPVPEFSHGIGISNADSQSTCDAERGNSEQAEMRAVTPENHESMTSIFPSAAVGLKNNNDILPNSQEELLYSSKQSFPGILKATTPKDMSETEKNLVVTETGDNIHSPSHFSDIFNFVSSTSNLELNEEIYFTDSLEIKRNENFPKDYVKFSDEEEFMNEDEKEMKEILMAGSSLSAGVSGEDKTEILNPTPAMAKSLTIDCLELALPPELAFQLNELFGPVGIDSGSLTVEDCVVHIDLNLAKVIHEKWKESVMERQRQEEVSCGKFMQDPSLVGHTGLDNPEQKSSQRTGKKLLKTLTASEMLPLLDHWNTQTKKVSLREIMSEEIALQEKHNLKRETLMFEKDCATKLKEKQLFKIFPAINQNFLVDIFKDHNYSLEHTVQFLNCVLEGDPVKTVVAQEFVHQNENVTSHTGQKSKEKKPKKLKETEETPSELSFQDFEYPDYDDYRAEAFLHQQKRMECYSKAKEAYRIGKKNVATFYAQQGTLHEQKMKEANHLAAIEIFEKVNASLLPQNVLDLHGLHVDEALEHLMRVLEKKTEEFKQNGGKPYLSVITGRGNHSQGGVARIKPAVIKYLISHSFRFSEIKPGCLKVMLK

SEQ ID NO: 1478 - protein, 345 aa, Homo sapiens
MLMFDPVPVKQEAMDPVSVSYPSNYMESMKPNKYGVIYSTPLPEKFFQTPEGLSHGIQMEPVDLTVNKRSSPPSAGNSPSSLKFPSSHRRASPGLSMPSSSPPIKKYSPPSPGVQPFGVPLSMPPVMAAALSRHGIRSPGILPVIQPVVVQPVPFMYTSHLQQPLMVSLSEEMENSSSSMQVPVIESYEKPISQKKIKIEPGIEPQRTDYYPEEMSPPLMNSVSPPQALLQENHPSVIVQPGKRPLPVESPDTQRKRRIHRCDYDGCNKVYTKSSHLKAHRRTHTGEKPYKCTWEGCTWKFARSDELTRHFRKHTGIKPFQCPDCDRSFSRSDHLALHRKRHMLV

SEQ ID NO: 1479 - protein, 1168 aa, Homo sapiens
MEPITFTARKHLLSNEVSVDFGLQLVGSLPVHSLTTMPMLPWVVAEVRRLSRQSTRKEPVTKQVRLCVSPSGLRCEPEPGRSQQWDPLIYSSIFECKPQRVHKLIHNSHDPSYFACLIKEDAVHRQSICYVFKADDQTKVPEIISSIRQAGKIARQEELHCPSEFDDTFSKKFEVLFCGRVTVAHKKAPPALIDECIEKFNHVSGSRGSESPRPNPPHAAPTGSQEPVRRPMRKSFSQPGLRSLAFRKELQDGGLRSSGFFSSFEESDIENHLISGHNIVQPTDIEENRTMLFTIGQSEVYLISPDTKKIALEKNFKEISFCSQGIRHVDHFGFICRESSGGGGFHFVCYVFQCTNEALVDEIMMTLKQAFTVAAVQQTAKAPAQLCEGCPLQSLHKLCERIEGMNSSKTKLELQKHLTTLTNQEQATIFEEVQKLRPRNEQRENELIISFLRCLYEEKQKEHIHIGEMKQTSQMAAENIGSELPPSATRFRLDMLKNKAKRSLTESLESILSRGNKARGLQEHSISVDLDSSLSSTLSNTSKEPSVCEKEALPISESSFKLLGSSEDLSSDSESHLPEEPAPLSPQQAFRRRANTLSHFPIECQEPPQPARGSPGVSQRKLMRYHSVSTETPHERKDFESKANHLGDSGGTPVKTRRHSWRQQIFLRVATPQKACDSSSRYEDYSELGELPPRSPLEPVCEDGPFGPPPEEKKRTSRELRELWQKAILQQILLLRMEKENQKLQASENDLLNKRLKLDYEEITPCLKEVTTVWEKMLSTPGRSKIKFDMEKMHSAVGQGVPRHHRGEIWKFLAEQFHLKHQFPSKQQPKDVPYKELLKQLTSQQHAILIDLGRTFPTHPYFSAQLGAGQLSLYNILKAYSLLDQEVGYCQGLSFVAGILLLHMSEEEAFKMLKFLMFDMGLRKQYRPDMIILQIQMYQLSRLLHDYHRDLYNHLEEHEIGPSLYAAPWFLTMFASQFPLGFVARVFDMIFLQGTEVIFKVALSLLGSHKPLILQHENLETIVDFIKSTLPNLGLVQMEKTINQVFEMDIAKQLQAYEVEYHVLQEELIDSSPLSDNQRMDKLEKTNSSLRKQNLDLLEQLQVANGRIQSLEATIEKLLSSESKLKQAMLTLELERSALLQTVEELRRRSAEPSDREPECTQPEPTGD

SEQ ID NO: 1480 - protein, 802 aa, Homo sapiens
MFISGRRTADKWRAEERLQCPAGSARAALARCADGGAVGPFKCVFVGEMAAQVGAVRVVRAVAAQEEPDKEGKEKPHAGVSPRGVKRQRRSSSGGSQEKRGRPSQEPPLAPPHRRRRSRQHPGPLPPTNAAPTVPGPVEPLLLPPPPPPSLAPAGPAVAAPLPAPSTSALFTFSPLTVSAAGPKHKGHKERHKHHHHRGPDGDPSSCGTDLKHKDKQENGERTGGVPLIKAPKRETPDENGKTQRADDFVLKKIKKKKKKKHREDMRGRRLKMYNKEVQTVCAGLTRISKEILTQGQINSTSGLNKESFRYLKDEQLCRLNLGMQEYRVPQGVQTPFMTHQEHSIRRNFLKTGTKFSNFIHEEHQSNGGALVLHAYMDELSFLSPMEMERFSEEFLALTFSENEKNAAYYALAIVHGAAAYLPDFLDYFAFNFPNTPVKMEILGKKDIETTTISNFHTQVNRTYCCGTYRAGPMRQISLVGAVDEEVGDYFPEFLDMLEESPFLKMTLPWGTLSSLRLQCRSQSDDGPIMWVRPGEQMIPTADMPKSPFKRRRSMNEIKNLQYLPRTSEPREVLFEDRTRAHADHVGQGFDWQSTAAVGVLKAVQFGEWSDQPRITKDVICFHAEDFTDVVQRLQLDLHEPPVSQCVQWVDEAKLNQMRREGIRYARIQLCDNDIYFIPRNVIHQFKTVSAVCSLAWHIRLKQYHPVVEATQNTESNSNMDCGLTGKRELEVDSQCVRIKTESEEACTEIQLLTTASSSFPPASELNLQQDQKTQPIPVLKVESRLDSDQQHNLQEHSTTSV

SEQ ID NO: 1481 - protein, 767 aa, Homo sapiens
MSFDPNLLHNNGHNGYPNGTSAALRETGVIEKLLTSYGFIQCSERQARLFFHCSQYNGNLQDLKVGDDVEFEVSSDRRTGKPIAVKLVKIKQEILPEERMNGQEVFYLTYTPEDVEGNVQLETGDKINFVIDNNKHTGAVSARNIMLLKKKQARCQGVVCAMKEAFGFIERGDVVKEIFFHYSEFKGDLETLQPGDDVEFTIKDRNGKEVATDVRLLPQGTVIFEDISIEHFEGTVTKVIPKVPSKNQNDPLPGRIKVDFVIPKELPFGDKDTKSKVTLLEGDHVRFNISTDRRDKLERATNIEVLSNTFQFTNEAREMGVIAAMRDGFGFIKCVDRDVRMFFHFSEILDGNQLHIADEVEFTVVPDMLSAQRNHAIRIKKLPKGTVSFHSHSDHRFLGTVEKEATFSNPKTTSPNKGKEKEAEDGIIAYDDCGVKLTIAFQAKDVEGSTSPQIGDKVEFSISDKQRPGQQVATCVRLLGRNSNSKRLLGYVATLKDNFGFIETANHDKEIFFHYSEFSGDVDSLELGDMVEYSLSKGKGNKVSAEKVNKTHSVNGITEEADPTIYSGKVIRPLRSVDPTQTEYQGMIEIVEEGDMKGEVYPFGIVGMANKGDCLQKGESVKFQLCVLGQNAQTMAYNITPLRRATVECVKDQFGFINYEVGDSKKLFFHVKEVQDGIELQAGDEVEFSVILNQRTGKCSACNVWRVCEGPKAVAAPRPDRLVNRLKNITLDDASAPRLMVLRQPRGPDNSMGFGAERKIRQAGVID

SEQ ID NO: 1482 - protein, 399 aa, Homo sapiens
MKRTHLFIVGIYFLSSCRAEEGLNFPTYDGKDRVVSLSEKNFKQVLKKYDLLCLYYHEPVSSDKVTQKQFQLKEIVLELVAQVLEHKAIGFVMVDAKKEAKLAKKLGFDEEGSLYILKGDRTIEFDGEFAADVLVEFLLDLIEDPVEIISSKLEVQAFERIEDYIKLIGFFKSEDSEYYKAFEEAAEHFQPYIKFFATFDKGVAKKLSLKMNEVDFYEPFMDEPIAIPNKPYTEEELVEFVKEHQRPTLRRLRPEEMFETWEDDLNGIHIVAFAEKSDPDGYEFLEILKQVARDNTDNPDLSILWIDPDDFPLLVAYWEKTFKIDLFRPQIGVVNVTDADSVWMEIPDDDDLPTAEELEDWIEDVLSGKINTEDDDEDDDDDDNSDEEDNDDSDDDDDE

SEQ ID NO: 1483 - protein, 737 aa, Homo sapiens
MPDHDSTALLSRQTKRRRVDIGVKRTVGTASAFFAKARATFFSAMNPQGSEQDVEYSVVQHADGEKSNVLRKLLKRANSYEDAMMPFPGATIISQLLKNNMNKNGGTEPSFQASGLSSTGSEVHQEDICSNSSRDSPPECLSPFGRPTMSQFDMDRLCDEHLRAKRARVENIIRGMSHSPSVALRGNENEREMAPQSVSPRESYRENKRKQKLPQQQQQSFQQLVSARKEQKREERRQLKQQLEDMQKQLRQLQEKFYQIYDSTDSENDEDGNLSEDSMRSEILDARAQDSVGRSDNEMCELDPGQFIDRARALIREQEMAENKPKREGNNKERDHGPNSLQPEGKHLAETLKQELNTAMSQVVDTVVKVFSAKPSRQVPQVFPPLQIPQARFAVNGENHNFHTANQRLQCFGDVIIPNPLDTFGNVQMASSTDQTEALPLVVRKNSSDQSASGPAAGGHHQPLHQSPLSATTGFTTSTFRHPFPLPLMAYPFQSPLGAPSGSFSGKDRASPESLDLTRDTTSLRTKMSSHHLSHHPCSPAHPPSTAEGLSLSLIKSECGDLQDMSEISPYSGSAMQEGLSPNHLKKAKLMFFYTRYPSSNMLKTYFSDVKFNRCITSQLIKWFSNFREFYYIQMEKYARQAINDGVTSTEELSITRDCELYRALNMHYNKANDFEVPERFLEVAQITLREFFNAIIAGKDVDPSWKKAIYKVICKLDSEVPEIFKSPNCLQELLHE

SEQ ID NO: 1484 - protein, 350 aa, Homo sapiens
MIRQERSTSYQELSEELVQVVENSELADEQDKETVRVQGPGILPGLDSESASSSIRFSKACLKNVFSVLLIFIYLLLMAVAVFLVYRTITDFREKLKHPVMSVSYKEVDRYDAPGIALYPGQAQLLSCKHHYEVIPPLTSPGQPGDMNCTTQRINYTDPFSNQTVKSALIVQGPREVKKRELVFLQFRLNKSSEDFSAIDYLLFSSFQEFLQSPNRVGFMQACESAYSSWKFSGGFRTWVKMSLVKTKEEDGREAVEFRQETSVVNYIDQRPAAKKSAQLFFVVFEWKDPFIQKVQDIVTANPWNTIALLCGAFLALFKAAEFAKLSIKWMIKIRKRYLKRRGQATSHIS

SEQ ID NO: 1485 - protein, 493 aa, Homo sapiens
MLPRWELALYLLASLGFHFYSFYEVYKVSREHEEELDQEFELETDTLFGGLKKDATDFEWSFWMEWGKQWLVWLLLGHMVVSQMATLLARKHRPWILMLYGMWACWCVLGTPGVAMVLLHTTISFCVAQFRSQLLTWLCSLLLLSTLRLQGVEEVKRRWYKTENEYYLLQFTLTVRCLYYTSFSLELCWQQLPAASTSYSFPWMLAYVFYYPVLHNGPILSFSEFIKQMQQQEHDSLKASLCVLALGLGRLLCWWWLAELMAHLMYMHAIYSSIPLLETVSCWTLGGLALAQVLFFYVKYLVLFGVPALLMRLDGLTPPALPRCVSTMFSFTGMWRYFDVGLHNFLIRYVYIPVGGSQHGLLGTLFSTAMTFAFVSYWHGGYDYLWCWAALNWLGVTVENGVRRLVETPCIQDSLARYFSPQARRRFHAALASCSTSMLILSNLVFLGGNEVGKTYWNRIFIQGWPWVTLSVLGFLYCYSHVGIAWAQTYATD

SEQ ID NO: 1486 - protein, 486 aa, Homo sapiens
MSSSSPPAGAASAAISASEKVDGFTRKSVRKAQRQKRSQGSSQFRSQGSQAELHPLPQLKDATSNEQQELFCQKLQQCCILFDFMDSVSDLKSKEIKRATLNELVEYVSTNRGVIVESAYSDIVKMISANIFRTLPPSDNPDFDPEEDEPTLEASWPHIQLVYEFFLRFLESPDFQPSIAKRYIDQKFVQQLLELFDSEDPRERDFLKTVLHRIYGKFLGLRAFIRKQINNIFLRFIYETEHFNGVAELLEILGSIINGFALPLKAEHKQFLMKVLIPMHTAKGLALFHAQLAYCVVQFLEKDTTLTEPVIRGLLKFWPKTCSQKEVMFLGEIEEILDVIEPTQFKKIEEPLFKQISKCVSSSHFQVAERALYFWNNEYILSLIEENIDKILPIMFASLYKISKEHWNPTIVALVYNVLKTLMEMNGKLFDDLTSSYKAERQREKKKELEREELWKKLEELKLKKALEKQNSAYNMHSILSNTSAE

SEQ ID NO: 1487 - protein, 557 aa, Homo sapiens
MAYSEEHKGMPCGFIRQNSGNSISLDFEPSIEYQFVERLEERYKCAFCHSVLHNPHQTGCGHRFCQHCILSLRELNTVPICPVDKEVIKSQEVFKDNCCKREVLNLYVYCSNAPGCNAKVILGRYQDHLQQCLFQPVQCSNEKCREPVLRKDLKEHLSASCQFRKEKCLYCKKDVVVINLQNHEENLCPEYPVFCPNNCAKIILKTEVDEHLAVCPEAEQDCPFKHYGCAVTDKRRNLQQHEHSALREHMRLVLEKNVQLEEQISDLHKSLEQKESKIQQLAETIKKLEKEFKQFAQLFGKNGSFLPNIQVFASHIDKSAWLEAQVHQLLQMVNQQQNKFDLRPLMEAVDTVKQKITLLENNDQRLAVLEEETNKHDTHINIHKAQLSKNEERFKLLEGTCYNGKLIWKVTDYKMKKREAVDGHTVSIFSQSFYTSRCGYRLCARAYLNGDGSGRGSHLSLYFVVMRGEFDSLLQWPFRQRVTLMLLDQSGKKNIMETFKPDPNSSSFKRPDGEMNIASGCPRFVAHSVLENAKNAYIKDDTLFLKVAVDLTDLEDL

SEQ ID NO: 1488 - protein, 453 aa, Homo sapiens
MDWKEVLRRRLATPNTCPNKKKSEQELKDEEMDLFTKYYSEWKGGRKNTNEFYKTIPRFYYRLPAEDEVLLQKLREESRAVFLQRKSRELLDNEELQNLWFLLDKHQTPPMIGEEAMINYENFLKVGEKAGAKCKQFFTAKVFAKLLHTDSYGRISIMQFFNYVMRKVWLHQTRIGLSLYDVAGQGYLRESDLENYILELIPTLPQLDGLEKSFYSFYVCTAVRKFFFFLDPLRTGKIKIQDILACSFLDDLLELRDEELSKESQETNWFSAPSALRVYGQYLNLDKDHNGMLSKEELSRYGTATMTNVFLDRVFQECLTYDGEMDYKTYLDFVLALENRKEPAALQYIFKLLDIENKGYLNVFSLNYFFRAIQELMKIHGQDPVSFQDVKDEIFDMVKPKDPLKISLQDLINSNQGDTVTTILIDLNGFWTYENREALVANDSENSADLDDT

SEQ ID NO: 1489 - protein, 1144 aa, Homo sapiens
MKLSRQFTVFGSAIFCVVIFSLYLMLDRGHLDYPRNPRREGSFPQGQLSMLQEKIDHLERLLAENNEIISNIRDSVINLSESVEDGPKSSQSNFSQGAGSHLLPSQLSLSVDTADCLFASQSGSHNSDVQMLDVYSLISFDNPDGGVWKQGFDITYESNEWDTEPLQVFVVPHSHNDPGWLKTFNDYFRDKTQYIFNNMVLKLKEDSRRKFIWSEISYLSKWWDIIDIQKKDAVKSLIENGQLEIVTGGWVMPDEATPHYFALIDQLIEGHQWLENNIGVKPRSGWAIDPFGHSPTMAYLLNRAGLSHMLIQRVHYAVKKHFALHKTLEFFWRQNWDLGSVTDILCHMMPFYSYDIPHTCGPDPKICCQFDFKRLPGGRFGCPWGVPPETIHPGNVQSRARMLLDQYRKKSKLFRTKVLLAPLGDDFRYCEYTEWDLQFKNYQQLFDYMNSQSKFKVKIQFGTLSDFFDALDKADETQRDKGQSMFPVLSGDFFTYADRDDHYWSGYFTSRPFYKRMDRIMESHLRAAEILYYFALRQAHKYKINKFLSSSLYTALTEARRNLGLFQHHDAITGTAKDWVVVDYGTRLFHSLMVLEKIIGNSAFLLILKDKLTYDSYSPDTFLEMDLKQKSQDSLPQKNIIRLSAEPRYLVVYNPLEQDRISLVSVYVSSPTVQVFSASGKPVEVQVSAVWDTANTISETAYEISFRAHIPPLGLKVYKILESASSNSHLADYVLYKNKVEDSGIFTIKNMINTEEGITLENSFVLLRFDQTGLMKQMMTKEDGKHHEVNVQFSWYGTTIKRDKSGAYLFLPDGNAKPYVYTTPPFVRVTHGRIYSEVTCFFDHVTHRVRLYHIQGIEGQSVEVSNIVDIRKVYNREIAMKISSDIKSQNRFYTDLNGYQIQPRMTLSKLPLQANVYPMTTMAYIQDAKHRLTLLSAQSLGVSSLNSGQIEVIMDRRLMQDDNRGLEQGIQDNKITANLFRILLEKRSAVNTEEEKKSVSYPSLLSHITSSLMNHPVIPMANKFSSPTLELQGEFSPLQSSLPCDIHLVNLRTIQSKVGNGHSNEAALILHRKGFDCRFSSKGTGLFCSTTQGKILVQKLLNKFIVESLTPSSLSLMHSPPGTQNISEINLSPMEISTFRIQLR

SEQ ID NO: 1490 - protein, 686 aa, Homo sapiens
MGCFCAVPEEFYCEVLLLDESKLTLTTQQQGIKKSTKGSVVLDHVFHHVNLVEIDYFGLRYCDRSHQTYWLDPAKTLAEHKELINTGPPYTLYFGIKFYAEDPCKLKEEITRYQFFLQVKQDVLQGRLPCPVNTAAQLGAYAIQSELGDYDPYKHTAGYVSEYRFVPDQKEELEEAIERIHKTLMGQIPSEAELNYLRTAKSLEMYGVDLHPVYGENKSEYFLGLTPVGVVVYKNKKQVGKYFWPRITKVHFKETQFELRVLGKDCNETSFFFEARSKTACKHLWKCSVEHHTFFRMPENESNSLSRKLSKFGSIRYKHRYSGRTALQMSRDLSIQLPRPDQNVTRSRSKTYPKRIAQTQPAESNSISRITANMENGENEGTIKIIAPSPVKSFKKAKNENSPDTQRSKSHAPWEENGPQSGLYNSPSDRTKSPKFPYTRRRNPSCGSDNDSVQPVRRRKAHNSGEDSDLKQRRRSRSRCNTSSGSESENSNREYRKKRNRIRQENDMVDSAPQWEAVLRRQKEKNQADPNNRRSRHRSRSRSPDIQAKEELWKHIQKELVDPSGLSEEQLKEIPYTKIETQGDPIRIRHSHSPRSYRQYRRSQCSDGERSVLSEVNSKTDLVPPLPVTRSSDAQGSGDATVHQRRNGSKDSLMEEKPQTSTNNLAGKHTAKTIKTIQASRLKTET

SEQ ID NO: 1491 - protein, 643 aa, Homo sapiens
MVDAGGVENITQLPQELPQMMAAAADGLGSIAIDTTQLNMSVTDPTAWATAMNNLGMVPVGLPGQQLVSDSICVPGFDPSLNMMTGITPINPMIPGLGLVPPPPPTEVAVVKEIIHCKSCTLFPQNPNLPPPSTRERPPGCKTVFVGGLPENATEEIIQEVFEQCGDITAIRKSKKNFCHIRFAEEFMVDKAIYLSGYRMRLGSSTDKKDSGRLHVDFAQARDDFYEWECKQRMRAREERHRRKLEEDRLRPPSPPAIMHYSEHEAALLAEKLKDDSKFSEAITVLLSWIERGEVNRRSANQFYSMVQSANSHVRRLMNEKATHEQEMEEAKENFKNALTGILTQFEQIVAVFNASTRQKAWDHFSKAQRKNIDIWRKHSEELRNAQSEQLMGIRREEEMEMSDDENCDSPTKKMRVDESALAAQAYALKEENDSLRWQLDAYRNEVELLKQEKEQLFRTEENLTKDQQLQFLQQTMQGMQQQLLTIQEELNNKKSELEQAKEEQSHTQALLKVLQEQLKGTKELVETNGHSHEDSNEINVLTVALVNQDRENNIEKRSQGLKSEKEALLIGIISTFLHVHPFGANIEYLWSYMQQLDSKISANEIEMLLMRLPRMFKQEFTGVGATLEKRWKLCAFEGIKTT

SEQ ID NO: 1492 - protein, 1164 aa, Homo sapiens
MAGAGGQHHPPGAAGGAAAGAGAAVTSAAASAGPGEDSSDSEAEQEGPQKLIRKVSTSGQIRTKTSIKEGQLLKQTSSFQRWKKRYFKLRGRTLYYAKDSKSLIFDEVDLSDASVAEASTKNANNSFTIITPFRRLMLCAENRKEMEDWISSLKSVQTREPYEVAQFNVEHFSGMHNWYACSHARPTFCNVCRESLSGVTSHGLSCEVCKFKAHKRCAVRATNNCKWTTLASIGKDIIEDEDGVAMPHQWLEGNLPVSAKCAVCDKTCGSVLRLQDWKCLWCKTMVHTACKDLYHPICPLGQCKVSIIPPIALNSTDSDGFCRATFSFCVSPLLVFVNSKSGDNQGVKFLRRFKQLLNPAQVFDLMNGGPHLGLRLFQKFDNFRILVCGGDGSVGWVLSEIDKLNLNKQCQLGVLPLGTGNDLARVLGWGGSYDDDTQLPQILEKLERASTKMLDRWSIMTYELKLPPKASLLPGPPEASEEFYMTIYEDSVATHLTKILNSDEHAVVISSAKTLCETVKDFVAKVEKTYDKTLENAVVADAVASKCSVLNEKLEQLLQALHTDSQAAPVLPGLSPLIVEEDAVESSSEESLGESKEQLGDDVTKPSSQKAVKPREIMLRANSLKKAVRQVIEEAGKVMDDPTVHPCEPANQSSDYDSTETDESKEEAKDDGAKESITVKTAPRSPDARASYGHSQTDSVPGPAVAASKENLPVLNTRIICPGLRAGLAASIAGSSIINKMLLANIDPFGATPFIDPDLDSVDGYSEKCVMNNYFGIGLDAKISLEFNNKREEHPEKCRSRTKNLMWYGVLGTRELLQRSYKNLEQRVQLECDGQYIPLPSLQGIAVLNIPSYAGGTNFWGGTKEDDIFAAPSFDDKILEVVAIFDSMQMAVSRVIKLQHHRIAQCRTVKITIFGDEGVPVQVDGEAWVQPPGIIKIVHKNRAQMLTRDRAFESTLKSWEDKQKCDSGKPVLRTHLYIHHAIDLATEEVSQMQLCSQAAEELITRICDAATIHCLLEQELAHAVNACSHALNKANPRCPESLTRDTATEIAINVKALYNETESLLVGRVPLQLESPHEERVSNALHSVEVELQKLTEIPWLYYILHPNEDEEPPMDCTKRNNRSTVFRIVPKFKKEKVQKQKTSSQPGSGDTESGSCEANSPGN

SEQ ID NO: 1493 - protein, 584 aa, Homo sapiens
MTTSSIRRQMKNIVNNYSEAEIKVREATSNDPWGPSSSLMTEIADLTYNVVAFSEIMSMVWKRLNDHGKNWRHVYKALTLLDYLIKTGSERVAQQCRENIFAIQTLKDFQYIDRDGKDQGINVREKSKQLVALLKDEERLKAERAQALKTKERMAQVATGMGSNQITFGRGSSQPNLSTSHSEQEYGKAGGSPASYHGSTSPRVSSELEQARPQTSGEEELQLQLALAMSREVAEQEERLRRGDDLRLQMALEESRRDTVKIPKKKEHGSLPQQTTLLDLMDALPSSGPAAQKAEPWGPSASTNQTNPWGGPAAPASTSDPWPSFGTKPAASIDPWGVPTGATVQSVPKNSDPWAASQQPASSAGKRASDAWGAVSTTKPVSVSGSFELFSNLNGTIKDDFSEFDNLRTSKKTAESVTSLPSQNNGTTSPDPFESQPLTVASSKPSSARKTPESFLGPNAALVNLDSLVTRPAPPAQSLNPFLAPGAPATSAPVNPFQVNQPQPLTLNQLRGSPVLGTSTSFGPGPGVESMAVASMTSAAPQPALGATGSSLTPLGPAMMNMVGSVGIPPSAAQATGTTNPFLL

SEQ ID NO: 1494 - protein, 1068 aa, Homo sapiens
MRSAAKPWNPAIRAGGHGPDRVRPLPAASSGMKSSKSSTSLAFESRLSRLKRASSEDTLNKPGSTAASGVVRLKKTATAGAISELTESRLRSGTGAFTTTKRTGIPAPREFSVTVSRERSVPRGPSNPRKSVSSPTSSNTPTPTKHLRTPSTKPKQENEGGEKAALESQVRELLAEAKAKDSEINRLRSELKKYKEKRTLNAEGTDALGPNVDGTSVSPGDTEPMIRALEEKNKNFQKELSDLEEENRVLKEKLIYLEHSPNSEGAASHTGDSSCPTSITQESSFGSPTGNQMSSDIDEYKKNIHGNALRTSGSSSSDVTKASLSPDASDFEHITAETPSRPLSSTSNPFKSSKCSTAGSSPNSVSELSLASLTEKIQKMEENHHSTAEELQATLQELSDQQQMVQELTAENEKLVDEKTILETSFHQHRERAEQLSQENEKLMNLLQERVKNEEPTTQEGKIIELEQKCTGILEQGRFEREKLLNIQQQLTCSLRKVEEENQGALEMIKRLKEENEKLNEFLELERHNNNMMAKTLEECRVTLEGLKMENGSLKSHLQGEKQKATEASAVEQTAESCEVQEMLKVARAEKDLLELSCNELRQELLKANGEIKHVSSLLAKVEKDYSYLKEICDHQAEQLSRTSLKLQEKASESDAEIKDMKETIFELEDQVEQHRAVKLHNNQLISELESSVIKLEEQKSDLERQLKTLTKQMKEETEEWRRFQADLQTAVVVANDIKCEAQQELRTVKRKLLEEEEKNARLQKELGDVQGHGRVVTSRAAPPPVDEEPESSEVDAAGRWPGVCVSRTSPTPPESATTVKSLIKSFDLGRPGGAGQNISVHKTPRSPLSGIPVRTAPAAAVSPMQRHSTYSSVRPASRGVTQRLDLPDLPLSDILKGRTETLKPDPHLRKSPSLESLSRPPSLGFGDTRLLSASTRAWKPQSKLSVERKDPLAALAREYGGSKRNALLKWCQKKTQGYANIDITNFSSSWSDGLAFCALLHTYLPAHIPYQELNSQEKKRNLLLAFEAAESVGIKPSLELSEMLYTDRPDWQSVMQYVAQIYKYFET

SEQ ID NO: 1495 - protein, 1106 aa, Homo sapiens
MSGTSSHESFYDSLSDMQEESKNTDFFPGLSAFLSQEEINKSLDLARRAIADSETEDFDSEKEISQIFSTSPASLCEHPSHKETKLGEHASRRPQDNRSTPVQPLAEKQTKSISSPVSKRKPAMSPLLTRPSYIRSLRKAEKRGAKTPSTNVKPKTPHQRKGGPQSQLCDKAANLIEELTSIFKAAKPRNRSPNGESSSPDSGYLSPKNQPSALLSASASQSPMEDQGEMEREVKSPGARHCYQDNQDLAVPHNRKSHPQPHSALHFPAAPRFIQKLRSQEVAEGSRVYLECRVTGNPTPRVRWFCEGKELHNTPDIQIHCEGGDLHTLIIAEAFEDDTGRYTCLATNPSGSDTTSAEVFIEGASSTDSDSESLAFKSRAGAMPQAQKKTTSVSLTIGSSSPKTGVTTAVIQPLSVPVQQVHSPTSYLCRPDGTTTAYFPPVFTKELQNTAVAEGQVVVLECRVRGAPPLQVQWFRQGSEIQDSPDFRILQKKPRSTAEPEEICTLVIAETFPEDAGIFTCSARNDYGSATSTAQLVVTSANTENCSYESMGESNNDHFQHFPPPPPILETSSLELASKKPSEIQQVNNPELGLSRAALQMQFNAAERETNGVHPSRGVNGLINGKANSNKSLPTPAVLLSPTKEPPPLLAKPKLGFPKKASRTARIASDEEIQGTKDAVIQDLERKLRFKEDLLNNGQPRLTYEERMARRLLGADSATVFNIQEPEEETANQEYKVSSCEQRLISEIEYRLERSPVDESGDEVQYGDVPVENGMAPFFEMKLKHYKIFEGMPVTFTCRVAGNPKPKIYWFKDGKQISPKSDHYTIQRDLDGTCSLHTTASTLDDDGNYTIMAANPQGRISCTGRLMVQAVNQRGRSPRSPSGHPHVRRPRSRSRDSGDENEPIQERFFRPHFLQAPGDLTVQEGKLCRMDCKVSGLPTPDLSWQLDGKPVRPDSAHKMLVRENGVHSLIIEPVTSRDAGIYTCIATNRAGQNSFSLELVVAAKEAHKPPVFIEKLQNTGVADGYPVRLECRVLGVPPPQIFWKKENESLTHSTDRVSMHQDNHGYICLLIQGATKEDAGWYTVSAKNEAGIVSCTARLDVYISRH

SEQ ID NO: 1496 - protein, 866 aa, Homo sapiens
MESEQLFHRGYYRNSYNSITSASSDEELLDGAGVIMDFQTSEDDNLLDGDTAVGTHYTMTNGGSINSSTHLLDLLDEPIPGVGTYDDFHTIDWVREKCKDRERHRRINSKKKESAWEMTKSLYDAWSGWLVVTLTGLASGALAGLIDIAADWMTDLKEGICLSALWYNHEQCCWGSNETTFEERDKCPQWKTWAELIIGQAEGPGSYIMNYIMYIFWALSFAFLAVSLVKVFAPYACGSGIPEIKTILSGFIIRGYLGKWTLMIKTITLVLAVASGLSLGKEGPLVHVACCCGNIFSYLFPKYSTNEAKKREVLSAASAAGVSVAFGAPIGGVLFSLEEVSYYFPLKTLWRSFFAALVAAFVLRSINPFGNSRLVLFYVEYHTPWYLFELFPFILLGVFGGLWGAFFIRANIAWCRRRKSTKFGKYPVLEVIIVAAITAVIAFPNPYTRLNTSELIKELFTDCGPLESSSLCDYRNDMNASKIVDDIPDRPAGIGVYSAIWQLCLALIFKIIMTVFTFGIKVPSGLFIPSMAIGAIAGRIVGIAVEQLAYYHHDWFIFKEWCEVGADCITPGLYAMVGAAACLGGVTRMTVSLVVIVFELTGGLEYIVPLMAAVMTSKWVGDAFGREGIYEAHIRLNGYPFLDAKEEFTHTTLAADVMRPRRNDPPLAVLTQDNMTVDDIENMINETSYNGFPVIMSKESQRLVGFALRRDLTIAIESARKKQEGIVGSSRVCFAQHTPSLPAESPRPLKLRSILDMSPFTVTDHTPMEIVVDIFRKLGLRQCLVTHNGIVLGIITKKNILEHLEQLKQHVEPLAPPWHYNKKRYPPAYGPDGKPRPRFNNVQLNLTDEEREETEEEVYLLNSTTL

SEQ ID NO: 1497 - protein, 982 aa, Homo sapiens
MSSKMVISEPGLNWDISPKNGLKTFFSRENYKDHSMAPSLKELRVLSNRRIGENLNASASSVENEPAVSSATQAKEKVKTTIGMVLLPKPRVPYPRFSRFSQREQRSYVDLLVKYAKIPANSKAVGINKNDYLQYLDMKKHVNEEVTEFLKFLQNSAKKCAQDYNMLSDDARLFTEKILRACIEQVKKYSEFYTLHEVTSLMGFFPFRVEMGLKLEKTLLALGSVKYVKTVFPSMPIKLQLSKDDIATIETSEQTAEAMHYDISKDPNAEKLVSRYHPQIALTSQSLFTLLNNHGPTYKEQWEIPVCIQVIPVAGSKPVKVIYINSPLPQKKMTMRERNQIFHEVPLKFMMSKNTSVPVSAVFMDKPEEFISEMDMSCEVNECRKIESLENLYLDFDDDVTELETFGVTTTKVSKSPSPASTSTVPNMTDAPTAPKAGTTTVAPSAPDISANSRSLSQILMEQLQKEKQLVTGMDGGPEECKNKDDQGFESCEKVSNSDKPLIQDSDLKTSDALQLENSQEIETSNKNDMTIDILHADGERPNVLENLDNSKEKTVGSEAAKTEDTVLCSSDTDEECLIIDTECKNNSDGKTAVVGSNLSSRPASPNSSSGQASVGNQTNTACSPEESCVLKKPIKRVYKKFDPVGEILKMQDELLKPISRKVPELPLMNLENSKQPSVSEQLSGPSDSSSWPKSGWPSAFQKPKGRLPYELQDYVEDTSEYLAPQEGNFVYKLFSLQDLLLLVRCSVQRIETRPRSKKRKKIRRQFPVYVLPKVEYQACYGVEALTESELCRLWTESLLHSNSSFYVGHIDAFTSKLFLLEEITSEELKEKLSALKISNLFNILQHILKKLSSLQEGSYLLSHAAEDSSLLIYKASDGKVTRTAYNLYKTHCGLPGVPSSLSVPWVPLDPSLLLPYHIHHGRIPCTFPPKSLDTTTQQKIGGTRMPTRSHRNPVSMETKSSCLPAQQVETEGVAPHKRKIT

SEQ ID NO: 1498 - protein, 556 aa, Homo sapiens
MNEGAPGDSDLETEARVPWSIMGHCLRTGQARMSATPTPAGEGARRDELFGILQILHQCILSSGDAFVLTGVCCSWRQNGKPPYSQKEDKEVQTGYMNAQIEIIPCKICGDKSSGIHYGVITCEGCKGFFRRSQQSNATYSCPRQKNCLIDRTSRNRCQHCRLQKCLAVGMSRDAVKFGRMSKKQRDSLYAEVQKHRMQQQQRDHQQQPGEAEPLTPTYNISANGLTELHDDLSNYIDGHTPEGSKADSAVSSFYLDIQPSPDQSGLDINGIKPEPICDYTPASGFFPYCSFTNGETSPTVSMAELEHLAQNISKSHLETCQYLREELQQITWQTFLQEEIENYQNKQREVMWQLCAIKITEAIQYVVEFAKRIDGFMELCQNDQIVLLKAGSLEVVFIRMCRAFDSQNNTVYFDGKYASPDVFKSLGCEDFISFVFEFGKSLCSMHLTEDEIALFSAFVLMSADRSWLQEKVKIEKLQQKIQLALQHVLQKNHREDGILTKLICKVSTLRALCGRHTEKLMAFKAIYPDIVRLHFPPLYKELFTSEFEPAMQIDG

SEQ ID NO: 1499 - protein, 446 aa, Homo sapiens
MSRPPPTGKMPGAPETAPGDGAGASRQRKLEALIRDPRSPINVESLLDGLNSLVLDLDFPALRKNKNIDNFLNRYEKIVKKIRGLQMKAEDYDVVKVIGRGAFGEVQLVRHKASQKVYAMKLLSKFEMIKRSDSAFFWEERDIMAFANSPWVVQLFYAFQDDRYLYMVMEYMPGGDLVNLMSNYDVPEKWAKFYTAEVVLALDAIHSMGLIHRDVKPDNMLLDKHGHLKLADFGTCMKMDETGMVHCDTAVGTPDYISPEVLKSQGGDGFYGRECDWWSVGVFLYEMLVGDTPFYADSLVGTYSKIMDHKNSLCFPEDAEISKHAKNLICAFLTDREVRLGRNGVEEIRQHPFFKNDQWHWDNIRETAAPVVPELSSDIDSSNFDDIEDDKGDVETFPIPKAFVGNQLPFIGFTYYRENLLLSDSPSCRETDSIQSRKNEESQEVC

SEQ ID NO: 1500 - protein, 1006 aa, Homo sapiens
MSNSRNNRVMVEGVGARVVRGPDWKWGKQDGGEGHVGTVRSFESPEEVVVVWDNGTAANYRCSGAYDLRILDSAPTGIKHDGTMCDTCRQQPIIGIRWKCAECTNYDLCTVCYHGDKHHLRHRFYRITTPGSERVLLESRRKSKKITARGIFAGARVVRGVDWQWEDQDGGNGRRGKVTEIQDWSASSPHSAAYVLWDNGAKNLYRVGFEGMSDLKCVQDAKGGSFYRDHCPVLGEQNGNRNPGGLQIGDLVNIDLDLEIVQSLQHGHGGWTDGMFETLTTTGTVCGIDEDHDIVVQYPSGNRWTFNPAVLTKANIVRSGDAAQGAEGGTSQFQVGDLVQVCYDLERIKLLQRGHGEWAEAMLPTLGKVGRVQQIYSDSDLKVEVCGTSWTYNPAAVSKVASAGSAISNASGERLSQLLKKLFETQESGDLNEELVKAAANGDVAKVEDLLKRPDVDVNGQCAGHTAMQAASQNGHVDILKLLLKQNVDVEAEDKDGDRAVHHAAFGDEGAVIEVLHRGSADLNARNKRRQTPLHIAVNKGHLQVVKTLLDFGCHPSLQDSEGDTPLHDAISKKRDDILAVLLEAGADVTITNNNGFNALHHAALRGNPSAMRVLLSKLPRPWIVDEKKDDGYTALHLAALNNHVEVAELLVHQGNANLDIQNVNQQTALHLAVERQHTQIVRLLVRAGAKLDIQDKDGDTPLHEALRHHTLSQLRQLQDMQDVGKVDAAWEPSKNTLIMGLGTQGAEKKSAASIACFLAANGADLSIRNKKGQSPLDLCPDPNLCKALAKCHKEKVSGQVGSRSPSMISNDSETLEECMVCSDMKRDTLFGPCGHIATCSLCSPRVKKCLICKEQVQSRTKIEECVVCSDKKAAVLFQPCGHMCACENCANLMKKCVQCRAVVERRVPFIMCCGGKSSEDATDDISSGNIPVLQKDKDNTNVNADVQKLQQQLQDIKEQTMCPVCLDRLKNMIFLCGHGTCQLCGDRMSECPICRKAIERRILLY

SEQ ID NO: 1501 - protein, 707 aa, Homo sapiens
MSPHGDGRGQAQGRAVRVGLRRSGGIRGGVAVFAAVAAVFTFTLPPSVPGGDSGELITAAHELGVAHPPGYPLFTLVAKLAITLFPFGSIAYRVNLLCGLFGAVAASLLFFTVFRLSGSSAGGILAAGVFSFSRLTWQWSIAAEVFSLNNLFVGLLMALTVHFEEAATAKERSKVAKIGAFCCGLSLCNQHTIILYVLCIIPWILFQLLKKKELSLGSLLKLSLYFSAGLLPYVHLPISSYLNHARWTWGDQTTLQGFLTHFLREEYGTFSLAKSEIGSSMSEILLSQVTNMRTELSFNIQALAVCANICLATKDRQNPSLVWLFTGMFCIYSLFFAWRANLDISKPLFMGVVERFWMQSNAVVAVLAGIGLAAVVSETNRVLNSNGLQCLEWLSATLFVVYQIYSNYSVCDQRTNYVIDKFAKNLLTSMPHDAIILLRGDLPGNSLRYMHYCEGLRPDISLVDQEMMTYEWYLPKMAKHLPGVNFPGNRWNPVEGILPSGMVTFNLYHFLEVNKQKETFVCIGIHEGDPTWKKNYSLWPWGSCDKLVPLEIVFNPEEWIKLTKSIYNWTEEYGRFDPSSWESVANEEMWQARMKTPFFIFNLAETAHMPSKVKAQLYAQAYDLYKEIVYLQKEHPVNWHKNYAIACERMLRLQARDADPEVLLSETIRHFRLYSQKAPNDPQQADILGALKHLRKELQSLRNRKNV

SEQ ID NO: 1502 - protein, 570 aa, Homo sapiens
MENLKSGVYPLKEASGCPGADRNLLVYSFYEKGPLTFRDVAIEFSLEEWQCLDTAQQDLYRKVMLENYRNLVFLAGIAVSKPDLITCLEQGKEPWNMKRHAMVDQPPVTYSHFAQDLWPEQGIKDSFQEVILRRYGKCGHEDLQLRTGCKSVDECNLHKECYDELNQCLTTTQSEIFQYDKYVNVFYKFSNPNIQKIRHTGKKPFKCKKCDKSFCMLLHLTQHKRIHIRENSYQCEECGKVFNWFSTLTRHRRIHTGEKPYKCEQCGKAFKQSSTLTTHKIIHTGEKPYRCEECGKTFNRSSHLTTHKRIHTGEKPYRCEECGRAFNRSSHLTTHKIIHTGEKPYKCEECGKAFNQSSTLTTHKIIHAGEKPYKCEECGKAFYRFSYLTKHKIIHTGEKFYKCEECGKGFNWSSTLTKHKRIHTGEKPYKCEQCGKAFNESSNLTAHKIIHTGEKPYKCEECGKAFNRSPKLTAHKVIHSGEKPYKCEECGKAFNQFSNLTKHKITHIGDTSYKYLECDKAFSQSSTLTKHKVIHTGEKPYNCEEYGKAFNQSSNLIEQSNSYWRETLQM

SEQ ID NO: 1503 - protein, 2429 aa, Homo sapiens
MDMSDPNFWTVLSNFTLPHLRSGNRLRRTQSCRTSNRKSLIGNGQSPALPRPHSPLSAHAGNSPQDSPRNFSPSASAHFSFARRTDGRRWSLASLPSSGYGTNTPSSTVSSSCSSQEKLHQLPYQPTPDELHFLSKHFCTTESIATENRCRNTPMRPRSRSLSPGRSPACCDHEIIMMNHVYKERFPKATAQMEERLKEIITSYSPDNVLPLADGVLSFTHHQIIELARDCLDKSHQGLITSRYFLELQHKLDKLLQEAHDRSESGELAFIKQLVRKILIVIARPARLLECLEFDPEEFYYLLEAAEGHAKEGQGIKTDIPRYIISQLGLNKDPLEEMAHLGNYDSGTAETPETDESVSSSNASLKLRRKPRESDFETIKLISNGAYGAVYFVRHKESRQRFAMKKINKQNLILRNQIQQAFVERDILTFAENPFVVSMYCSFETRRHLCMVMEYVEGGDCATLMKNMGPLPVDMARMYFAETVLALEYLHNYGIVHRDLKPDNLLVTSMGHIKLTDFGLSKVGLMSMTTNLYEGHIEKDAREFLDKQVCGTPEYIAPEVILRQGYGKPVDWWAMGIILYEFLVGCVPFFGDTPEELFGQVISDEINWPEKDEAPPPDAQDLITLLLRQNPLERLGTGGAYEVKQHRFFRSLDWNSLLRQKAEFIPQLESEDDTSYFDTRSEKYHHMETEEEDDTNDEDFNVEIRQFSSCSHRFSKVFSSIDRITQNSAEEKEDSVDKTKSTTLPSTETLSWSSEYSEMQQLSTSNSSDTESNRHKLSSGLLPKLAISTEGEQDEAASCPGDPHEEPGKPALPPEECAQEEPEVTTPASTISSSTLSVGSFSEHLDQINGRSECVDSTDNSSKPSSEPASHMARQRLESTEKKKISGKVTKSLSASALSLMIPGDMFAVSPLGSPMSPHSLSSDPSSSRDSSPSRDSSAASASPHQPIVIHSSGKNYGFTIRAIRVYVGDSDIYTVHHIVWNVEEGSPACQAGLKAGDLITHINGEPVHGLVHTEVIELLLKSGNKVSITTTPFENTSIKTGPARRNSYKSRMVRRSKKSKKKESLERRRSLFKKLAKQPSPLLHTSRSFSCLNRSLSSGESLPGSPTHSLSPRSPTPSYRSTPDFPSGTNSSQSSSPSSSAPNSPAGSGHIRPSTLHGLAPKLGGQRYRSGRRKSAGNIPLSPLARTPSPTPQPTSPQRSPSPLLGHSLGNSKIAQAFPSKMHSPPTIVRHIVRPKSAEPPRSPLLKRVQSEEKLSPSYGSDKKHLCSRKHSLEVTQEEVQREQSQREAPLQSLDENVCDVPPLSRARPVEQGCLKRPVSRKVGRQESVDDLDRDKLKAKVVVKKADGFPEKQESHQKSHGPGSDLENFALFKLEEREKKVYPKAVERSSTFENKASMQEAPPLGSLLKDALHKQASVRASEGAMSDGRVPAEHRQGGGDFRRAPAPGTLQDGLCHSLDRGISGKGEGTEKSSQAKELLRCEKLDSKLANIDYLRKKMSLEDKEDNLCPVLKPKMTAGSHECLPGNPVRPTGGQQEPPPASESRAFVSSTHAAQMSAVSFVPLKALTGRVDSGTEKPGLVAPESPVRKSPSEYKLEGRSVSCLKPIEGTLDIALLSGPQASKTELPSPESAQSPSPSGDVRASVPPVLPSSSGKKNDTTSARELSPSSLKMNKSYLLEPWFLPPSRGLQNSPAVSLPDPEFKRDRKGPHPTARSPGTVMESNPQQREGSSPKHQDHTTDPKLLTCLGQNLHSPDLARPRCPLPPEASPSREKPGLRESSERGPPTARSERSAARADTCREPSMELCFPETAKTSDNSKNLLSVGRTHPDFYTQTQAMEKAWAPGGKTNHKDGPGEARPPPRDNSSLHSAGIPCEKELGKVRRGVEPKPEALLARRSLQPPGIESEKSEKLSSFPSLQKDGAKEPERKEQPLQRHPSSIPPPPLTAKDLSSPAARQHCSSPSHASGREPGAKPSTAEPSSSPQDPPKPVAAHSESSSHKPRPGPDPGPPKTKHPDRSLSSQKPSVGATKGKEPATQSLGGSSREGKGHSKSGPDVFPATPGSQNKASDGIGQGEGGPSVPLHTDRAPLDAKPQPTSGGRPLEVLEKPVHLPRPGHPGPSEPADQKLSAVGEKQTLSPKHPKPSTVKDCPTLCKQTDNRQTDKSPSQPAANTDRRAEGKKCTEALYAPAEGDKLEAGLSFVHSENRLKGAERPAAGVGKGFPEARGKGPGPQKPPTEADKPNGMKRSPSATGQSSFRSTALPEKSLSCSSSFPETRAGVREASAASSDTSSAKAAGGMLELPAPSNRDHRKAQPAGEGRTHMTKSDSLPSFRVSTLPLESHHPDPNTMGGASHRDRALSVTATVGETKGKDPAPAQPPPARKQNVGRDVTKPSPAPNTDRPISLSNEKDFVVRQRRGKESLRSSPHKKAL

SEQ ID NO: 1504 - protein, 1115 aa, Homo sapiens
MPEDQVGKLEATENTISAMAAAAAEQQQFYLLLGNLLSPDNVVRKQAEETYENIPGQSKITFLLQAIRNTTAAEEARQMAAVLLRRLLSSAFDEVYPALPSDVQTAIKSELLMIIQMETQSSMRKKVCDIAAELARNLIDEDGNNQWPEGLKFLFDSVSSQNVGLREAALHIFWNFPGIFGNQQQHYLDVIKRMLVQCMQDQEHPSIRTLSARATAAFILANEHNVALFKHFADLLPGFLQAVNDSCYQNDDSVLKSLVEIADTVPKYLRPHLEATLQLSLKLCGDTSLNNMQRQLALEVIVTLSETAAAMLRKHTNIVAQTIPQMLAMMVDLEEDEDWANADELEDDDFDSNAVAGESALDRMACGLGGKLVLPMIKEHIMQMLQNPDWKYRHAGLMALSAIGEGCHQQMEGILNEIVNFVLLFLQDPHPRVRYAACNAVGQMATDFAPGFQKKFHEKVIAALLQTMEDQGNQRVQAHAAAALINFTEDCPKSLLIPYLDNLVKHLHSIMVLKLQELIQKGTKLVLEQVVTSIASVADTAEEKFVPYYDLFMPSLKHIVENAVQKELRLLRGKTIECISLIGLAVGKEKFMQDASDVMQLLLKTQTDFNDMEDDDPQISYMISAWARMCKILGKEFQQYLPVVMGPLMKTASIKPEVALLDTQDMENMSDDDGWEFVNLGDQQSFGIKTAGLEEKSTACQMLVCYAKELKEGFVEYTEQVVKLMVPLLKFYFHDGVRVAAAESMPLLLECARVRGPEYLTQMWHFMCDALIKAIGTEPDSDVLSEIMHSFAKCIEVMGDGCLNNEHFEELGGILKAKLEEHFKNQELRQVKRQDEDYDEQVEESLQDEDDNDVYILTKVSDILHSIFSSYKEKVLPWFEQLLPLIVNLICPHRPWPDRQWGLCIFDDVIEHCSPASFKYAEYFLRPMLQYVCDNSPEVRQAAAYGLGVMAQYGGDNYRPFCTEALPLLVRVIQSADSKTKENVNATENCISAVGKIMKFKPDCVNVEEVLPHWLSWLPLHEDKEEAVQTFNYLCDLIESNHPIVLGPNNTNLPKIFSIIAEGEMHEAIKHEDPCAKRLANVVRQVQTSGGLWTECIAQLSPEQQAAIQELLNSA

SEQ ID NO: 1505 - protein, 1186 aa, Homo sapiens [sequence omitted]

SEQ ID NO: 1506 - protein, 1618 aa, Homo sapiens
MDGQTLRKAERSWSCSREKKEGYAKDMVTDFDEKHDEYLILLQQRNRILKHLKSKDPVQLRLEHLEQGFSVYVNGANSELKSSPRKAIHSDFSRSASHTEGTHDYGRRTLFREAEEALRRSSRTAPSKVQRRGWHQKSVQIRTEAGPRLHIEPPVDYSDDFELCGDVTLQANNTSEDRPQELRRSLELSVNLQRKQKDCSSDEYDSIEEDILSEPEPEDPALVGHPRHDRPPSSGDWTQKDVHGEQETEGRSSPGPDTLVVLEFNPASKSHKRERNLSAKRKDNAEVFVPTKPEPNLTPQAPAVFPDQERMCSRPGSRRERPLSATRKTLCEAEYPEEDASAVLQAIQVENAALQRALLSRKAEQPASPLQDAEGPPAKPWTSLLEEKEETLELLPITTATTTQEPAGAAGGARAINQAMDRIGLLGSRQQQKLLKVLQAVESDSAHLGRVVSPTKEQVSDTEDKQRMRADEIKDAIYVTMEILSNWGNSWWVGLTEVEFFDLNDTKLYVSPHDVDIRNTATPGELGRLVNRNLAGKKDSSPWTCPFHPPLQLFFVIRNTRQLGDFHLAKIKVRNYWTADGDLDIGAKNVKLYVNRNLIFNGKLDKGDREAPADHSILVDQKNEKSEQLEEAMNAHSEESKGTHEMAGASGDKELGLGCSPPAETLADAKLSSQGNVSGKRKNSTNCRKDSLSQLEEYLRLSAVPTSMGDMPSAPATSPPVKCPPVHEEPSLIQQLENLMGRKICEPPGKTPSWLQPSPTGKDRKQGGRKPKPLWLSPEKPLAWKGRLPSDDVIGEGPGETEARDKGLRHEPGWGTSRSVNTKERPQRATTKVHSDDSDIFNQPPNRERPASGRRGSRKDAGSSSHGDDQPASREDTWSSRTPSRSRWRSEQEHTLHESWSSLSAFDRSHRGRISNTELPGDILDELLQQKSSRHSDLPPSKKGEQPGLSRGQDGYSGETDAGGDFKIPVLPYGQRLVIDIKSTWGDRHYVGLNGIEIFSSKGEPVQISNIKADPPDINILPAYGKDPRVVTNLIDGVNRTQDDMHVWLAPFTRGRSHSITIDFTHPCHVALIRIWNYNKSRIHSFRGVKDITMLLDTQCIFEGEIAKASGTLAGAPEHFGDTILFTTDDDILEAIFYSDEMFDLDVGSLDSLQDEEAMRRPSTADGEGDERPFTQAGLGADERIPELELPSSSPVPQVTTPEPGIYHGICLQLNFTASWGDLHYLGLTGLEVVGKEGQALPIHLHQISASPRDLNELPEYSDDSRALDKLIDGTNITMEDEHMWLIPFSPGLDHVVTIRLDRAESIAGLRFWNYNKSPEDTYRGAKIVHVSLDGLCVSPPEGFLIRKGPGNCHFDFAQEILFVDYLRAQLLPQPARRLDMRSLECASMDYEAPLMPCGFIFQFQLLTSWGDPYYIGLTGLELYDERGEKIPLSENNIAAFPDSVNSLEGVGGDVRTPDKLIDQVNDTSDGRHMWLAPILPGLVNRVYVIFDLPTTVSMIKLWNYAKTPHRGVKEFGLLVDDLLVYNGILAMVSHLVGGILPTCEPTVPYHTILFTEDRDIRHQEKHTTISNQAEDQDVQMMNENQIITNAKRKQSVVDPALRPKTCISEKETRRRRC

SEQ ID NO: 1507 - protein, 1118 aa, Homo sapiens
MARSPGRAYALLLLLICFNVGSGLHLQVLSTRNENKLLPKHPHLVRQKRAWITAPVALREGEDLSKKNPIAKIHSDLAEERGLKITYKYTGKGITEPPFGIFVFNKDTGELNVTSILDREETPFFLLTGYALDARGNNVEKPLELRIKVLDINDNEPVFTQDVFVGSVEELSAAHTLVMKINATDADEPNTLNSKISYRIVSLEPAYPPVFYLNKDTGEIYTTSVTLDREEHSSYTLTVEARDGNGEVTDKPVKQAQVQIRILDVNDNIPVVENKVLEGMVEENQVNVEVTRIKVFDADEIGSDNWLANFTFASGNEGGYFHIETDAQTNEGIVTLIKEVDYEEMKNLDFSVIVANKAAFHKSIRSKYKPTPIPIKVKVKNVKEGIHFKSSVISIYVSESMDRSSKGQIIGNFQAFDEDTGLPAHARYVKLEDRDNWISVDSVTSEIKLAKLPDFESRYVQNGTYTVKIVAISEDYPRKTITGTVLINVEDINDNCPTLIEPVQTICHDAEYVNVTAEDLDGHPNSGPFSFSVIDKPPGMAEKWKIARQESTSVLLQQSEKKLGRSEIQFLISDNQGFSCPEKQVLTLTVCECLHGSGCREAQHDSYVGLGPAAIALMILAFLLLLLVPLLLLMCHCGKGAKGFTPIPGTIEMLHPWNNEGAPPEDKVVPSFLPVDQGGSLVGRNGVGGMAKEATMKGSSSASIVKGQHEMSEMDGRWEEHRSLLSGRATQFTGATGAIMTTETTKTARATGASRDMAGAQAAAVALNEEFLRNYFTDKAASYTEEDENHTAKDCLLVYSQEETESLNASIGCCSFIEGELDDRFLDDLGLKFKTLAEVCLGQKIDINKEIEQRQKPATETSMNTASHSLCEQTMVNSENTYSSGSSFPVPKSLQEANAEKVTQEIVTERSVSSRQAQKVATPLPDPMASRNVIATETSYVTGSTMPPTTVILGPSQPQSLIVTERVYAPASTLVDQPYANEGTVVVTERVIQPHGGGSNPLEGTQHLQDVPYVMVRERESFLAPSSGVQPTLAMPNIAVGQNVTVTERVLAPASTLQSSYQIPTENSMTARNTTVSGAGVPGPLPDFGLEESGHSNSTITTSSTRVTKHSTVQHSYS

SEQ ID NO: 1508 - protein, 638 aa, Homo sapiens
MESERDMYRQFQDWCLRTYGDSGKTKTVTRKKYERIVQLLNGSESSSTDNAKFKFWVKSKGFQLGQPDEVRGGGGGAKQVLYVPVKTTDGVGVDEKLSLRRVAVVEDFFDIIYSMHVETGPNGEQIRKHAGQKRTYKAISESYAFLPREAVTRFLMSCSECQKRMHLNPDGTDHKDNGKPPTLVTSMIDYNMPITMAYMKHMKLQLLNSQQDEDESSIESDEFDMSDSTRMSAVNSDLSSNLEERMQSPQNLHGQQDDDSAAESFNGNETLGHSSIASGGTHSREMGDSNSDGKTGLEQDEQPLNLSDSPLSAQLTSEYRIDDHNSNGKNKYKNLLISDLKMEREARENGSKSPAHSYSSYDSGKNESVDRGAEDLSLNRGDEDEDDHEDHDDSEKVNETDGVEAERLKAFNMFVRLFVDENLDRMVPISKQPKEKIQAIIDSCRRQFPEYQERARKRIRTYLKSCRRMKRSGFEMSRPIPSHLTSAVAESILASACESESRNAAKRMRLERQQDESAPADKQCKPEATQATYSTSAVPGSQDVLYINGNGTYSYHSYRGLGGGLLNLNDASSSGPTDLSMKRQLATSSGSSSSSNSRPQLSPTEINAVRQLVAGYRESAAFLLRSADELENLILQQN

SEQ ID NO: 1509 - protein, 896 aa, Homo sapiens
MNYVGQLAGQVIVTVKELYKGINQATLSGCIDVIVVQQQDGSYQCSPFHVRFGKLGVLRSKEKVIDIEINGSAVDLHMKLGDNGEAFFVEETEEEYEKLPAYLATSPIPTEDQFFKDIDTPLVKSGGDETPSQSSDISHVLETETIFTPSSVKKKKRRRKKYKQDSKKEEQAASAAAEDTCDVGVSSDDDKGAQAARGSSNASLKEEECKEPLLFHSGDHYPLSDGDWSPLETTYPQTACPKSDSELEVKPAESLLRSESHMEWTWGGFPESTKVSKRERSDHHPRTATITPSENTHFRVIPSEDNLISEVEKDASMEDTVCTIVKPKPRALGTQMSDPTSVAELLEPPLESTQISSMLDADHLPNAALAEAPSESKPAAKVDSPSKKKGVHKRSQHQGPDDIYLDDLKGLEPEVAALYFPKSESEPGSRQWPESDTLSGSQSPQSVGSAAADSGTECLSDSAMDLPDVTLSLCGGLSENGEISKEKFMEHIITYHEFAENPGLIDNPNLVIRIYNRYYNWALAAPMILSLQVFQKSLPKATVESWVKDKMPKKSGRWWFWRKRESMTKQLPESKEGKSEAPPASDLPSSSKEPAGARPAENDSSSDEGSQELEESITVDPIPTEPLSHGSTTSYKKSLRLSSDQIAKLKLHDGPNDVVFSITTQYQGTCRCAGTIYLWNWNDKIIISDIDGTITKSDALGQILPQLGKDWTHQGIAKLYHSINENGYKFLYCSARAIGMADMTRGYLHWVNDKGTILPRGPLMLSPSSLFSAFHREVIEKKPEKFKIECLNDIKNLFAPSKQPFYAAFGNRPNDVYAYTQVGVPDCRIFTVNPKGELIQERTKGNKSSYHRLSELVEHVFPLLSKEQNSAFPCPEFSSFCYWRDPIPEVDLDDLS

SEQ ID NO: 1510 - protein, 657 aa, Homo sapiens
MSPTPPLFSLPEARTRFTKSTREALNNKNIKPLLSTFSQVPGSENEKKCTLDQAFRGILEEEIINHSSCENVLAIISLAIGGVTEGICTASTPFVLLGDVLDCLPLDQCDTIFTFVEKNVATWKSNTFYSAGKNYLLRMCNDLLRRLSKSQNTVFCGRIQLFLARLFPLSEKSGLNLQSQFNLENVTVFNTNEQESTLGQKHTEDREEGMDVEEGEMGDEEAPTTCSIPIDYNLYRKFWSLQDYFRNPVQCYEKISWKTFLKYSEEVLAVFKSYKLDDTQASRKKMEELKTGGEHVYFAKFLTSEKLMDLQLSDSNFRRHILLQYLILFQYLKGQVKFKSSNYVLTDEQSLWIEDTTKSVYQLLSENPPDGERFSKMVEHILNTEENWNSWKNEGCPSFVKERTSDTKPTRIIRKRTAPEDFLGKGPTKKILMGNEELTRLWNLCPDNMEACKSETREHMPTLEEFFEEAIEQADPENMVENEYKAVNNSNYGWRALRLLARRSPHFFQPTNQQFKSLPEYLENMVIKLAKELPPPSEEIKTGEDEDEEDNDALLKENESPDVRRDKPVTGEQIEVFANKLGEQWKILAPYLEMKDSEIRQIECDSEDMKMRAKQLLVAWQDQEGVHATPENLINALNKSGLSDLAESLTNDNETNS

SEQ ID NO: 1511 - protein, 1589 aa, Homo sapiens
MSLPFYQRCHQHYDLSYRNKDVRSTVSHYQREKKRSAVYTQGSTAYSSRSSAAHRRESEAFRRASASSSQQQASQHALSSEVSRKAASAYDYGSSHGLTDSSLLLDDYSSKLSPKPKRAKHSLLSGEEKENLPSDYMVPIFSGRQKHVSGITDTEEERIKEAAAYIAQRNLLASEEGITTSKQSTASKQTTASKQSTASKQSTASKQSTASRQSTASRQSVVSKQATSALQQEETSEKKSRKVVIREKAERLSLRKTLEETETYHAKLNEDHLLHAPEFIIKPRSHTVWEKENVKLHCSIAGWPEPRVTWYKNQVPINVHANPGKYIIESRYGMHTLEINGCDFEDTAQYRASAMNVKGELSAYASVVVKRYKGEFDETRFHAGASTMPLSFGVTPYGYASRFEIHFDDKFDVSFGREGETMSLGCRVVITPEIKHFQPEIQWYRNGVPLSPSKWVQTLWSGERATLTFSHLNKEDEGLYTIRVRMGEYYEQYSAYVFVRDADAEIEGAPAAPLDVKCLEANKDYIIISWKQPAVDGGSPILGYFIDKCEVGTDSWSQCNDTPVKFARFPVTGLIEGRSYIFRVRAVNKMGIGFPSRVSEPVAALDPAEKARLKSRPSAPWTGQIIVTEEEPSEGIVPGPPTDLSVTEATRSYVVLSWKPPGQRGHEGIMYFVEKCEAGTENWQRVNTELPVKSPRFALFDLAEGKSYCFRVRCSNSAGVGEPSEATEVTVVGDKLDIPKAPGKIIPSRNTDTSVVVSWEESKDAKELVGYYIEASVAGSGKWEPCNNNPVKGSRFTCHGLVTGQSYIFRVRAVNAAGLSEYSQDSEAIEVKAAIAPPSPPCDITCLESFRDSMVLGWKQPDKIGGAEITGYYVNYREVIDGVPGKWREANVKAVSEEAYKISNLKENMVYQFQVAAMNMAGLGAPSAVSECFKCEEWTIAVPGPPHSLKCSEVRKDSLVLQWKPPVHSGRTPVTGYFVDLKEAKAKEDQWRGLNEAAIKNVYLKVRGLKEGVSYVFRVRAINQAGVGKPSDLAGPVVAETRPGTKEVVVNVDDDGVISLNFECDKMTPKSEFSWSKDYVSTEDSPRLEVESKGNKTKMTFKDLGMDDLGIYSCDVTDTDGIASSYLIDEEELKRLLALSHEHKFPTVPVKSELAVEILEKGQVRFWMQAEKLSGNAKVNYIFNEKEIFEGPKYKMHIDRNTGIIEMFMEKLQDEDEGTYTFQLQDGKATNHSTVVLVGDVFKKLQKEAEFQRQEWIRKQGPHFVEYLSWEVTGECNVLLKCKVANIKKETHIVWYKDEREISVDEKHDFKDGICTLLITEFSKKDAGIYEVILKDDRGKDKSRLKLVDEAFKELMMEVCKKIALSATDLKIQSTAEGIQLYSFVTYYVEDLKVNWSHNGSAIRYSDRVKTGVTGEQIWLQINEPTPNDKGKYVMELFDGKTGHQKTVDLSGQAYDEAYAEFQRLKQAAIAEKNRARVLGGLPDVVTIQEGKALNLTCNVWGDPPPEVSWLKNEKALASDDHCNLKFEAGRTAYFTINGVSTADSGKYGLVVKNKYGSETSDFTVSVFIPEEEARMAALESLKGGKKAK

SEQ ID NO: 1512 - protein, 4834 aa, Homo sapiens
MPSESFCLAAQARLDSKWLKTDIQLAFTRDGLCGLWNEMVKDGEIVYTGTESTQNGELPPRKDDSVEPSGTKKEDLNDKEKKDEEETPAPIYRAKSILDSWVWGKQPDVNELKECLSVLVKEQQALAVQSATTTLSALRLKQRLVILERYFIALNRTVFQENVKVKWKSSGISLPPVDKKSSRPAGKGVEGLARVGSRAALSFAFAFLRRAWRSGEDADLCSELLQESLDALRALPEASLFDESTVSSVWLEVVERATRFLRSVVTGDVHGTPATKGPGSIPLQDQHLALAILLELAVQRGTLSQMLSAILLLLQLWDSGAQETDNERSAQGTSAPLLPLLQRFQSIICRKDAPHSEGDMHLLSGPLSPNESFLRYLTLPQDNELAIDLRQTAVVVMAHLDRLATPCMPPLCSSPTSHKGSLQEVIGWGLIGWKYYANVIGPIQCEGLANLGVTQIACAEKRFLILSRNGRVYTQAYNSDTLAPQLVQGLASRNIVKIAAHSDGHHYLALAATGEVYSWGCGDGGRLGHGDTVPLEEPKVISAFSGKQAGKHVVHIACGSTYSAAITAEGELYTWGRGNYGRLGHGSSEDEAIPMLVAGLKGLKVIDVACGSGDAQTLAVTENGQVWSWGDGDYGKLGRGGSDGCKTPKLIEKLQDLDVVKVRCGSQFSIALTKDGQVYSWGKGDNQRLGHGTEEHVRYPKLLEGLQGKKVIDVAAGSTHCLALTEDSEVHSWGSNDQCQHFDTLRVTKPEPAALPGLDTKHIVGIACGPAQSFAWSSCSEWSIGLRVPFVVDICSMTFEQLDLLLRQVSEGMDGSADWPPPQEKECVAVATLNLLRLQLHAAISHQVDPEFLGLGLGSILLNSLKQTVVTLASSAGVLSTVQSAAQAVLQSGWSVLLPTAEERARALSALLPCAVSGNEVNISPGRRFMIDLLVGSLMADGGLESALHAAITAEIQDIEAKKEAQKEKEIDEQEANASTFHRSRTPLDKDLINTGICESSGKQCLPLVQLIQQLLRNIASQTVARLKDVARRISSCLDFEQHSRERSASLDLLLRFQRLLISKLYPGESIGQTSDISSPELMGVGSLLKKYTALLCTHIGDILPVAASIASTSWRHFAEVAYIVEGDFTGVLLPELVVSIVLLLSKNAGLMQEAGAVPLLGGLLEHLDRFNHLAPGKERDDHEELAWPGIMESFFTGQNCRNNEEVTLIRKADLENHNKDGGFWTVIDGKVYDIKDFQTQSLTGNSILAQFAGEDPVVALEAALQFEDTRESMHAFCVGQYLEPDQEIVTIPDLGSLSSPLIDTERNLGLLLGLHASYLAMSTPLSPVEIECAKWLQSSIFSGGLQTSQIHYSYNEEKDEDHCSSPGGTPASKSRLCSHRRALGDHSQAFLQAIADNNIQDHNVKDFLCQIERYCRQCHLTTPIMFPPEHPVEEVGRLLLCCLLKHEDLGHVALSLVHAGALGIEQVKHRTLPKSVVDVCRVVYQAKCSLIKTHQEQGRSYKEVCAPVIERLRFLFNELRPAVCNDLSIMSKFKLLSSLPRWRRIAQKIIRERRKKRVPKKPESTDDEEKIGNEESDLEEACILPHSPINVDKRPIAIKSPKDKWQPLLSTVTGVHKYKWLKQNVQGLYPQSPLLSTIAEFALKEEPVDVEKMRKCLLKQLERAEVRLEGIDTILKLASKNFLLPSVQYAMFCGWQRLIPEGIDIGEPLTDCLKDVDLIPPFNRMLLEVTFGKLYAWAVQNIRNVLMDASAKFKELGIQPVPLQTITNENPSGPSLGTIPQARFLLVMLSMLTLQHGANNLDLLLNSGMLALTQTALRLIGPSCDNVEEDMNASAQGASATVLEETRKETAPVQLPVSGPELAAMMKIGTRVMRGVDWKWGDQDGPPPGLGRVIGELGEDGWIRVQWDTGSTNSYRMGKEGKYDLKLAELPAAAQPSAEDSDTEDDSEAEQTERNIHPTAMMFTSTINLLQTLCLSAGVHAEIMQSEATKTLCGLLRMLVESGTTDKTSSPNRLVYREQHRSWCTLGFVRSIALTPQVCGALSSPQWITLLMKVVEGHAPFTATSLQRQILAVHLLQAVLPSWDKTERARDMKCLVEKLFDFLGSLLTTCSSDVPLLRESTLRRRRVRPQASLTATHSSTLAEEVVALLRTLHSLTQWNGLINKYINSQLRSITHSFVGRPSEGAQLEDYFPDSENPEVGGLMAVLAVIGGIDGRLRLGGQVMHDEFGEGTVTRITPKGKITVQFSDMRTCRVCPLNQLKPLPAVAFNVNNLPFTEPMLSVWAQLVNLAGSKLEKHKIKKSTKQAFAGQVDLDLLRCQQLKLYILKAGRALLSHQDKLRQILSQPAVQETGTVHTDDGAVVSPDLGDMSPEGPQPPMILLQQLLASATQPSPVKAIFDKQELEAAALAVCQCLAVESTHPSSPGFEDCSSSEATTPVAVQHIRPARVKRRKQSPVPALPIVVQLMEMGFSRRNIEFALKSLTGASGNASSLPGVEALVGWLLDHSDIQVTELSDADTVSDEYSDEEVVEDVDDAAYSMSTGAVVTESQTYKKRADFLSNDDYAVYVRENIQVGMMVRCCRAYEEVCEGDVGKVIKLDRDGLHDLNVQCDWQQKGGTYWVRYIHVELIGYPPPSSSSHIKIGDKVRVKASVTTPKYKWGSVTHQSVGVVKAFSANGKDIIVDFPQQSHWTGLLSEMELVPSIHPGVTCDGCQMFPINGSRFKCRNCDDFDFCETCFKTKKHNTRHTFGRINEPGQSAVFCGRSGKQLKRCHSSQPGMLLDSWSRMVKSLNVSSSVNQASRLIDGSEPCWQSSGSQGKHWIRLEIFPDVLVHRLKMIVDPADSSYMPSLVVVSGGNSLNNLIELKTININPSDTTVPLLNDCTEYHRYIEIAIKQCRSSGIDCKIHGLILLGRIRAEEEDLAAVPFLASDNEEEEDEKGNSGSLIRKKAAGLESAATIRTKVFVWGLNDKDQLGGLKGSKIKVPSFSETLSALNVVQVAGGSKSLFAVTVEGKVYACGEATNGRLGLGISSGTVPIPRQITALSSYVVKKVAVHSGGRHATALTVDGKVFSWGEGDDGKLGHFSRMNCDKPRLIEALKTKRIRDIACGSSHSAALTSSGELYTWGLGEYGRLGHGDNTTQLKPKMVKVLLGHRVIQVACGSRDAQTLALTDEGLVFSWGDGDFGKLGRGGSEGCNIPQNIERLNGQGVCQIECGAQFSLALTKSGVVWTWGKGDYFRLGHGSDVHVRKPQVVEGLRGKKIVHVAVGALHCLAVTDSGQVYAWGDNDHGQQGNGTTTVNRKPTLVQGLEGQKITRVACGSSHSVAWTTVDVATPSVHEPVLFQTARDPLGASYLGVPSDADSSAASNKISGASNSKPNRPSLAKILLSLDGNLAKQQALSHILTALQIMYARDAVVGALMPAAMIAPVECPSFSSAAPSDASAMASPMNGEECMLAVDIEDRLSPNPWQEKREIVSSEDAVTPSAVTPSAPSASARPFIPVTDDLGAASIIAETMTKTKEDVESQNKAAGPEPQALDEFTSLLIADDTRVVVDLLKLSVCSRAGDRGRDVLSAVLSGMGTAYPQVADMLLELCVTELEDVATDSQSGRLSSQPVVVESSHPYTDDTSTSGTVKIPGAEGLRVEFDRQCSTERRHDPLTVMDGVNRIVSVRSGREWSDWSSELRIPGDELKWKFISDGSVNGWGWRFTVYPIMPAAGPKELLSDRCVLSCPSMDLVTCLLDFRLNLASNRSIVPRLAASLAACAQLSALAASHRMWALQRLRKLLTTEFGQSININRLLGENDGETRALSFTGSALAALVKGLPEALQRQFEYEDPIVRGGKQLLHSPFFKVLVALACDLELDTLPCCAETHKWAWFRRYCMASRVAVALDKRTPLPRLFLDEVAKKIRELMADSENMDVLHESHDIFKREQDEQLVQWMNRRPDDWTLSAGGSGTIYGWGHNHRGQLGGIEGAKVKVPTPCEALATLRPVQLIGGEQTLFAVTADGKLYATGYGAGGRLGIGGTESVSTPTLLESIQHVFIKKVAVNSGGKHCLALSSEGEVYSWGEAEDGKLGHGNRSPCDRPRVIESLRGIEVVDVAAGGAHSACVTAAGDLYTWGKGRYGRLGHSDSEDQLKPKLVEALQGHRVVDIACGSGDAQTLCLTDDDTVWSWGDGDYGKLGRGGSDGCKVPMKIDSLTGLGVVKVECGSQFSVALTKSGAVYTWGKGDYHRLGHGSDDHVRRPRQVQGLQGKKVIAIATGSLHCVCCTEDGEVYTWGDNDEGQLGDGTTNAIQRPRLVAALQGKKVNRVACGSAHTLAWSTSKPASAGKLPAQVPMEYNHLQEIPIIALRNRLLLLHHLSELFCPCIPMFDLEGSLDETGLGPSVGFDTLRGILISQGKEAAFRKVVQATMVRDRQHGPVVELNRIQVKRSRSKGGLAGPDGTKSVFGQMCAKMSSFGPDSLLLPHRVWKVKFVGESVDDCGGGYSESIAEICEELQNGLTPLLIVTPNGRDESGANRDCYLLSPAARAPVHSSMFRFLGVLLGIAIRTGSPLSLNLAEPVWKQLAGMSLTIADLSEVDKDFIPGLMYIRDNEATSEEFEAMSLPFTVPSASGQDIQLSSKHTHITLDNRAEYVRLAINYRLHEFDEQVAAVREGMARVVPVPLLSLFTGYELETMVCGSPDIPLHLLKSVATYKGIEPSASLIQWFWEVMESFSNTERSLFLRFVWGRTRLPRTIADFRGRDFVIQVLDKYNPPDHFLPESYTCFFLLKLPRYSCKQVLEEKLKYAIHFCKSIDTDDYARIALTGEPAADDSSDDSDNEDVDSFASDSTQDYLTGH

SEQ ID NO: 1513 - protein, 411 aa, Homo sapiens
MWSGWWLWPLVAVCTADFFRDEAERIMRDSPVIDGHNDLPWQLLDMFNNRLQDERANLTTLAGTHTNIPKLRAGFVGGQFWSVYTPCDTQNKDAVRRTLEQMDVVHRMCRMYPETFLYVTSSAGIRQAFREGKVASLIGVEGGHSIDSSLGVLRALYQLGMRYLTLTHSCNTPWADNWLVDTGDSEPQSQGLSPFGQRVVKELNRLGVLIDLAHVSVATMKATLQLSRAPVIFSHSSAYSVCASRRNVPDDVLRLVKQTDSLVMVNFYNNYISCTNKANLSQVADHLDHIKEVAGARAVGFGGDFDGVPRVPEGLEDVSKYPDLIAELLRRNWTEAEVKGALADNLLRVFEAVEQASNLTQAPEEEPIPLDQLGGSCRTHYGYSSGASSLHRHWGLLLASLAPLVLCLSLL

SEQ ID NO: 1514 - protein, 507 aa, Homo sapiens
MAGAGPKRRALAAPAAEEKEEAREKMLAAKSADGSAPAGEGEGVTLQRNITLLNGVAIIVGTIIGSGIFVTPTGVLKEAGSPGLALVVWAACGVFSIVGALCYAELGTTISKSGGDYAYMLEVYGSLPAFLKLWIELLIIRPSSQYIVALVFATYLLKPLFPTCPVPEEAAKLVACLCVLLLTAVNCYSVKAATRVQDAFAAAKLLALALIILLGFVQIGKGDVSNLDPNFSFEGTKLDVGNIVLALYSGLFAYGGWNYLNFVTEEMINPYRNLPLAIIISLPIVTLVYVLTNLAYFTTLSTEQMLSSEAVAVDFGNYHLGVMSWIIPVFVGLSCFGSVNGSLFTSSRLFFVGSREGHLPSILSMIHPQLLTPVPSLVFTCVMTLLYAFSKDIFSVINFFSFFNWLCVALAIIGMIWLRHRKPELERPIKVNLALPVFFILACLFLIAVSFWKTPVECGIGFTIILSGLPVYFFGVWWKNKPKWLLQGIFSTTVLCQKLMQVVPQET

SEQ ID NO: 1515 - protein, 824 aa, Homo sapiens
MMQNVHLAPETDEDDLYSGYNDYNPIYDIEELENDAAFQQAVRTSHGRRPPITAKISSTAVTRPIATGYGSKTSLASSIGRPMTGAIQDGVTRPMTAVRAAGFTKAALRGSAFDPLSQSRGPASPLEAKKKDSPEEKIKQLEKEVNELVEESCIANSCGDLKLALEKAKDAGRKERVLVRQREQVTTPENINLDLTYSVLFNLASQYSVNEMYAEALNTYQVIVKNKMFSNAGILKMNMGNIYLKQRNYSKAIKFYRMALDQVPSVNKQMRIKIMQNIGVTFIQAGQYSDAINSYEHIMSMAPNLKAGYNLTICYFAIGDREKMKKAFQKLITVPLEIDEDKYISPSDDPHTNLVTEAIKNDHLRQMERERKAMAEKYIMTSAKLIAPVIETSFAAGYDWCVEVVKASQYVELANDLEINKAVTYLRQKDYNQAVEILKVLEKKDSRVKSAAATNLSALYYMGKDFAQASSYADIAVNSDRYNPAALTNKGNTVFANGDYEKAAEFYKEALRNDSSCTEALYNIGLTYEKLNRLDEALDCFLKLHAILRNSAEVLYQIANIYELMENPSQAIEWLMQVVSVIPTDPQVLSKLGELYDREGDKSQAFQYYYESYRYFPCNIEVIEWLGAYYIDTQFWEKAIQYFERASLIQPTQVKWQLMVASCFRRSGNYQKALDTYKDTHRKFPENVECLRFLVRLCTDLGLKDAQEYARKLKRLEKMKEIREQRIKSGRDGSGGSRGKREGSASGDSGQNYSASSKGERLSARLRALPGTNEPYESSSNKEIDASYVDPLGPQIERPKTAAKKRIDEDDFADEELGDDLLPE

SEQ ID NO: 1516 - protein, 2785 aa, Homo sapiens
MKTKPVSHKTENTYRFLTFAERLGNVNIDIIHRIDRTASYEEEVETYFFEGLLKWRELNLTEHFGKFYKEVIDKCQSFNQLVYHQNEIVQSLKTHLQVKNSFAYQPLLDLVVQLARDLQMDFYPHFPEFFLTITSILETQDTELLEWAFTSLSYLYKYLWRLMVKDMSSIYSMYSTLLAHKKLHIRNFAAESFTFLMRKVSDKNALFNLMFLDLDKHPEKVEGVGQLLFEMCKGVRNMFHSCTGQAVKLILRKLGPVTETETQLPWMLIGETLKNMVKSTVSYISKEHFGTFFECLQESLLDLHTKVTKTNCCESSEQIKRLLETYLILVKHGSGTKIPTPADVCKVLSQTLQVASLSTSCWETLLDVISALILGENVSLPETLIKETIEKIFESRFEKRLIFSFSEVMFAMKQFEQLFLPSFLSYIVNCFLIDDAVVKDEALAILAKLILNKAAPPTAGSMAIEKYPLVFSPQMVGFYIKQKKTRSKGRNEQFPVLDHLLSIIKLPPNKDTTYLSQSWAALVVLPHIRPLEKEKVIPLVTGFIEALFMTVDKGSFGKGNLFVLCQAVNTLLSLEESSELLHLVPVERVKNLVLTFPLEPSVLLLTDLYYQRLALCGCKGPLSQEALMELFPKLQANISTGVSKIRLLTIRILNHFDVQLPESMEDDGLSERQSVFAILRQAELVPATVNDYREKLLHLRKLRHDVVQTAVPDGPLQEVPLRYLLGMLYINFSALWDPVIELISSHAHEMENKQFWKVYYEHLEKAATHAEKELQNDMTDEKSVGDESWEQTQEGDVGALYHEQLALKTDCQERLDHTNFRFLLWRALTKFPERVEPRSRELSPLFLRFINNEYYPADLQVAPTQDLRRKGKGMVAEEIEEEPAAGDDEELEEEAVPQDESSQKKKTRRAAAKQLIAHLQVFSKFSNPRALYLESKLYELYLQLLLHQDQMVQKITLDCIMTYKHPHVLPYRENLQRLLEDRSFKEEIVHFSISEDNAVVKTAHRADLFPILMRILYGRMKNKTGSKTQGKSASGTRMAIVLRFLAGTQPEEIQIFLDLLFEPVRHFKNGECHSAVIQAVEDLDLSKVLPLGRQHGILNSLEIVLKNISHLISAYLPKILQILLCMTATVSHILDQREKIQLRFINPLKNLRRLGIKMVTDIFLDWESYQFRTEEIDAVFHGAVWPQISRLGSESQYSPTPLLKLISIWSRNARYFPLLAKQKPGHPECDILTNVFAILSAKNLSDATASIVMDIVDDLLNLPDFEPTETVLNLLVTGCVYPGIAENIGESITIGGRLILPHVPAILQYLSKTTISAEKVKKKKNRAQVSKELGILSKISKFMKDKEQSSVLITLLLPFLHRGNIAEDTEVDILVTVQNLLKHCVDPTSFLKPIAKLFSVIKNKLSRKLLCTVFETLSDFESGLKYITDVVKLNAFDQRHLDDINFDVRFETFQTITSYIKEMQIVDVNYLIPVMHNCFYNLELGDMSLSDNASMCLMSIIKKLAALNVTEKDYREIIHRSLLEKLRKGLKSQTESIQQDYTTILSCLIQTFPNQLEFKDLVQLTHYHDPEMDFFENMKHIQIHRRARALKKLAKQLMEGKVVLSSKSLQNYIMPYAMTPIFDEKMLKHENITTAATEIIGAICKHLSWSAYMYYLKHFIHVLQTGQINQKLGVSLLVIVLEAFHFDHKTLEEQMGKIENEENAIEAIELPEPEAMELERVDEEEKEYTCKSLSDNGQPGTPDPADSGGTSAKESECITKPVSFLPQNKEEIERTIKNIQGTITGDILPRLHKCLASTTKREEEHKLVKSKVVNDEEVVRVPLAFAMVKLMQSLPQEVMEANLPSILLKVCALLKNRAQEIRDIARSTLAKIIEDLGVHFLLYVLKELQTTLVRGYQVHVLTFTVHMLLQGLTNKLQVGDLDSCLDIMIEIFNHELFGAVAEEKEVKQILSKVMEARRSKSYDSYEILGKFVGKDQVTKLILPLKEILQNTTSLKLARKVHETLRRITVGLIVNQEMTAESILLLSYGLISENLPLLTEKEKNPVAPAPDPRLPPQSCLLLPPTPVRGGQKAVVSRKTNMHIFIESGLRLLHLSLKTSKIKSSGECVLEMLDPFVSLLIDCLGSMDVKVITGALQCLIWVLRFPLPSIETKAEQLTKHLFLLLKDYAKLGAARGQNFHLVVNCFKCVTILVKKVKSYQITEKQLQVLLAYAEEDIYDTSRQATAFGLLKAILSRKLLVPEIDEVMRKVSKLAVSAQSEPARVQCRQVFLKYILDYPLGDKLRPNLEFMLAQLNYEHETGRESTLEMIAYLFDTFPQGLLHENCGMFFIPLCLMTINDDSATCKKMASMTIKSLLGKISLEKKDWLFDMVTTWFGAKKRLNRQLAALICGLFVESEGVDFEKRLGTVLPVIEKEIDPENFKDIMEETEEKAADRLLFSFLTLITKLIKECNIIQFTKPAETLSKIWSHVHSHLRHPHNWVWLTAAQIFGLLFASCQPEELIQKWNTKKTKKHLPEPVAIKFLASDLDQKMKSISLASCHQLHSKFLDQSLGEQVVKNLLFAAKVLYLLELYCEDKQSKIKEDLEEQEALEDGVACADEKAESDGEEKEEVKEELGRPATLLWLIQKLSRIAKLEAAYSPRNPLKRTCIFKFLGAVAMDLGIDKVKPYLPMIIAPLFRELNSTYSEQDPLLKNLSQEIIELLKKLVGLESFSLAFASVQKQANEKRALRKKRKALEFVTNPDIAAKKKMKKHKNKSEAKKRKIEFLRPGYKAKRQKSHSLKDLAMVE

SEQ ID NO: 1517 - protein, 1147 aa, Homo sapiens
MDEPPFSEAALEQALGEPCDLDAALLTDIEDMLQLINNQDSDFPGLFDPPYAGSGAGGTDPASPDTSSPGSLSPPPATLSSSLEAFLSGPQAAPSPLSPPQPAPTPLKMYPSMPAFSPGPGIKEESVPLSILQTPTPQPLPGALLPQSFPAPAPPQFSSTPVLGYPSPPGGFSTGSPPGNTQQPLPGLPLASPPGVPPVSLHTQVQSVVPQQLLTVTAAPTAAPVTTTVTSQIQQVPVLLQPHFIKADSLLLTAMKTDGATVKAAGLSPLVSGTTVQTGPLPTLVSGGTILATVPLVVDAEKLPINRLAAGSKAPASAQSRGEKRTAHNAIEKRYRSSINDKIIELKDLVVGTEAKLNKSAVLRKAIDYIRFLQHSNQKLKQENLSLRTAVHKSKSLKDLVSACGSGGNTDVLMEGVKTEVEDTLTPPPSDAGSPFQSSPLSLGSRGSGSGGSGSDSEPDSPVFEDSKAKPEQRPSLHSRGMLDRSRLALCTLVFLCLSCNPLASLLGARGLPSPSDTTSVYHSPGRNVLGTESRDGPGWAQWLLPPVVWLLNGLLVLVSLVLLFVYGEPVTRPHSGPAVYFWRHRKQADLDLARGDFAQAAQQLWLALRALGRPLPTSHLDLACSLLWNLIRHLLQRLWVGRWLAGRAGGLQQDCALRVDASASARDAALVYHKLHQLHTMGKHTGGHLTATNLALSALNLAECAGDAVSVATLAEIYVAAALRVKTSLPRALHFLTRFFLSSARQACLAQSGSVPPAMQWLCHPVGHRFFVDGDWSVLSTPWESLYSLAGNPVDPLAQVTQLFREHLLERALNCVTQPNPSPGSADGDKEFSDALGYLQLLNSCSDAAGAPAYSFSISSSMATTTGVDPVAKWWASLTAVVIHWLRRDEEAAERLCPLVEHLPRVLQESERPLPRAALHSFKAARALLGCAKAESGPASLTICEKASGYLQDSLATTPASSSIDKAVQLFLCDLLLVVRTSLWRQQQPPAPAPAAQGTSSRPQASALELRGFQRDLSSLRRLAQSFRPAMRRVFLHEATARLMAGASPTRTHQLLDRSLRRRAGPGGKGGAVAELEPRPTRREHAEALLLASCYLPPGFLSAPGQRVGMLAEAARTLEKLGDRRLLHDCQQMLMRLGGGTTVTSS

SEQ ID NO: 1518 - protein, 380 aa, Homo sapiens
MFRLLSWSLGRGFLRAAGRRCRGCSARLLPGLAGGPGPEVQVPPSRVAPHGRGPGLLPLLAALAWFSRPAAAEEEEQQGADGAAAEDGADEAEAEIIQLLKRAKLSIMKDEPEEAELILHDALRLAYQTDNKKAITYTYDLMANLAFIRGQLENAEQLFKATMSYLLGGGMKQEDNAIIEISLKLASIYAAQNRQEFAVAGYEFCISTLEEKIEREKELAEDIMSVEEKANTHLLLGMCLDACARYLLFSKQPSQAQRMYEKALQISEEIQGERHPQTIVLMSDLATTLDAQGRFDEAYIYMQRASDLARQINHPELHMVLSNLAAVLMHRERYTQAKEIYQEALKQAKLKKDEISVQHIREELAELSKKSRPLTNSVKL

SEQ ID NO: 1519 - protein, 293 aa, Homo sapiens
MSGLGRSRRGGRSRVDQEERFPQGLWTGVAMRSCPEEQYWDPLLGTCMSCKTICNHQSQRTCAAFCRSLSCRKEQGKFYDHLLRDCISCASICGQHPKQCAYFCENKLRSPVNLPPELRRQRSGEVENNSDNSGRYQGLEHRGSEASPALPGLKLSADQVALVYSTLGLCLCAVLCCFLVAVACFLKKRGDPCSCQPRSRPRQSPAKSSQDHAMEAGSPVSTSPEPVETCSFCFPECRAPTQESAVTPGTPDPTCAGRWGCHTRTTVLQPCPHIPDSGLGIVCVPAQEGGPGA

SEQ ID NO: 1520 - protein, 874 aa, Homo sapiens
MEKLLRLCCWYSWLLLFYYNFQVRGVYSRSQDHPGFQVLASASHYWPLENVDGIHELQDTTGDIVEGKVNKGIYLKEEKGVTLLYYGRYNSSCISKPEQCGPEGVTFSFFWKTQGEQSRPIPSAYGGQVISNGFKVCSSGGRGSVELYTRDNSMTWEASFSPPGPYWTHVLFTWKSKEGLKVYVNGTLSTSDPSGKVSRDYGESNVNLVIGSEQDQAKCYENGAFDEFIIWERALTPDEIAMYFTAAIGKHALLSSTLPSLFMTSTASPVMPTDAYHPIITNLTEERKTFQSPGVILSYLQNVSLSLPSKSLSEQTALNLTKTFLKAVGEILLLPGWIALSEDSAVVLSLIDTIDTVMGHVSSNLHGSTPQVTVEGSSAMAEFSVAKILPKTVNSSHYRFPAHGQSFIQIPHEAFHRHAWSTVVGLLYHSMHYYLNNIWPAHTKIAEAMHHQDCLLFATSHLISLEVSPPPTLSQNLSGSPLITVHLKHRLTRKQHSEATNSSNRVFVYCAFLDFSSGEGVWSNHGCALTRGNLTYSVCRCTHLTNFAILMQVVPLELARGHQVALSSISYVGCSLSVLCLVATLVTFAVLSSVSTIRNQRYHIHANLSFAVLVAQVLLLISFRLEPGTTPCQVMAVLLHYFFLSAFAWMLVEGLHLYSMVIKVFGSEDSKHRYYYGMGWGFPLLICIISLSFAMDSYGTSNNCWLSLASGAIWAFVAPALFVIVVNIGILIAVTRVISQISADNYKIHGDPSAFKLTAKAVAVLLPILGTSWVFGVLAVNGCAVVFQYMFATLNSLQGLFIFLFHCLLNSEVRAAFKHKTKVWSLTSSSARTSNAKPFHSDLMNGTRPGMASTKLSPWDKSSHSAHRVDLSAV

SEQ ID NO: 1521 - protein, 1052 aa, Homo sapiens
MREAAERRQQLQLEHDQALAVLSAKQQEIDLLQKSKVRELEEKCRTQSEQFNLLSRDLEKFRQHAGKIDLLGGSAVAPLDISTAPSKPFPQFMNGLATSLGKGQESAIGGSSAIGEYIRPLPQPGDRPEPLSAKPTFLSRSGSARCRSESDMENERNSNTSKQRYSGKVHLCVARYSYNPFDGPNENPEAELPLTAGKYLYVYGDMDEDGFYEGELLDGQRGLVPSNFVDFVQDNESRLASTLGNEQDQNFINHSGIGLEGEHILDLHSPTHIDAGITDNSAGTLDVNIDDIGEDIVPYPRKITLIKQLAKSVIVGWEPPAVPPGWGTVSSYNVLVDKETRMNLTLGSRTKALIEKLNMAACTYRISVQCVTSRGSSDELQCTLLVGKDVVVAPSHLRVDNITQISAQLSWLPTNSNYSHVIFLNEEEFDIVKAARYKYQFFNLRPNMAYKVKVLAKPHQMPWQLPLEQREKKEAFVEFSTLPAGPPAPPQDVTVQAGVTPATIRVSWRPPVLTPTGLSNGANVTGYGVYAKGQRVAEVIFPTADSTAVELVRLRSLEAKGVTVRTLSAQGESVDSAVAAVPPELLVPPTPHPRPAPQSKPLASSGVPETKDEHLGPHARMDEAWEQSRAPGPVHGHMLEPPVGPGRRSPSPSRILPQPQGTPVSTTVAKAMAREAAQRVAESSRLEKRSVFLERSSAGQYAASDEEDAYDSPDFKRRGASVDDFLKGSELGKQPHCCHGDEYHTESSRGSDLSDIMEEDEEELYSEMQLEDGGRRRPSGTSHNALKILGNPASAGRVDHMGRRFPRGSAGPQRSRPVTVPSIDDYGRDRLSPDFYEESETDPGAEELPARIFVALFDYDPLTMSPNPDAAEEELPFKEGQIIKVYGDKDADGFYRGETCARLGLIPCNMVSEIQADDEEMMDQLLRQGFLPLNTPVEKIERSRRSGRRHSVSTRRMVALYDYDPRESSPNVDVEAELTFCTGDIITVFGEIDEDGFYYGELNGQKGLVPSNFLEEVPDDVEVYLSDAPSHYSQDTPMRSKAKRKKSVHFTP

SEQ ID NO: 1522 - protein, 521 aa, Homo sapiens
MAENPSLENHRIKSFKNKGRDVETMRRHRNEVTVELRKNKRDEHLLKKRNVPQEESLEDSDVDADFKAQNVTLEAILQNATSDNPVVQLSAVQAARKLLSSDRNPPIDDLIKSGILPILVKCLERDDNPSLQFEAAWALTNIASGTSAQTQAVVQSNAVPLFLRLLRSPHQNVCEQAVWALGNIIGDGPQCRDYVISLGVVKPLLSFISPSIPITFLRNVTWVIVNLCRNKDPPPPMETVQEILPALCVLIYHTDINILVDTVWALSYLTDGGNEQIQMVIDSGVVPFLVPLLSHQEVKVQTAALRAVGNIVTGTDEQTQVVLNCDVLSHFPNLLSHPKEKINKEAVWFLSNITAGNQQQVQAVIDAGLIPMIIHQLAKGDFGTQKEAAWAISNLTISGRKDQVEYLVQQNVIPPFCNLLSVKDSQVVQVVLDGLKNILIMAGDEASTIAEIIEECGGLEKIEVLQQHENEDIYKLAFEIIDQYFSGDDIDEDPCLIPEATQGGTYNFDPTANLQTKEFNF

SEQ ID NO: 1523 - protein, 630 aa, Homo sapiens
METTPLNSQKQLSACEDGEDCQENGVLQKVVPTPGDKVESGQISNGYSAVPSPGAGDDTRHSIPATTTTLVAELHQGERETWGKKVDFLLSVIGYAVDLGNVWRFPYICYQNGGGAFLLPYTIMAIFGGIPLFYMELALGQYHRNGCISIWRKICPIFKGIGYAICIIAFYIASYYNTIMAWALYYLISSFTDQLPWTSCKNSWNTGNCTNYFSEDNITWTLHSTSPAEEFYTRHVLQIHRSKGLQDLGGISWQLALCIMLIFTVIYFSIWKGVKTSGKVVWVTATFPYIILSVLLVRGATLPGAWRGVLFYLKPNWQKLLETGVWIDAAAQIFFSLGPGFGVLLAFASYNKFNNNCYQDALVTSVVNCMTSFVSGFVIFTVLGYMAEMRNEDVSEVAKDAGPSLLFITYAEAIANMPASTFFAIIFFLMLITLGLDSTFAGLEGVITAVLDEFPHVWAKRRERFVLAVVITCFFGSLVTLTFGGAYVVKLLEEYATGPAVLTVALIEAVAVSWFYGITQFCRDVKEMLGFSPGWFWRICWVAISPLFLLFIICSFLMSPPQLRLFQYNYPYWSIILGYCIGTSSFICIPTYIAYRLIITPGTFKERIIKSITPETPTEIPCGDIRLNAV

SEQ ID NO: 1524 - protein, 597 aa, Homo sapiens
MAEIIQERIEDRLPELEQLERIGLFSHAEIKAIIKKASDLEYKIQRRTLFKEDFINYVQYEINLLELIQRRRTRIGYSFKKDEIENSIVHRVQGVFQRASAKWKDDVQLWLSYVAFCKKWATKTRLSKVFSAMLAIHSNKPALWIMAAKWEMEDRLSSESARQLFLRALRFHPECPKLYKEYFRMELMHAEKLRKEKEEFEKASMDVENPDYSEEILKGELAWIIYKNSVSIIKGAEFHVSLLSIAQLFDFAKDLQKEIYDDLQALHTDDPLTWDYVARRELEIESQTEEQPTTKQAKAVEVGRKEERCCAVYEEAVKTLPTEAMWKCYITFCLERFTKKSNSGFLRGKRLERTMTVFRKAHELKLLSECQYKQLSVSLLCYNFLREALEVAVAGTELFRDSGTMWQLKLQVLIESKSPDIAMLFEEAFVHLKPQVCLPLWISWAEWSEGAKSQEDTEAVFKKALLAVIGADSVTLKNKYLDWAYRSGGYKKARAVFKSLQESRPFSVDFFRKMIQFEKEQESCNMANIREYYERALREFGSADSDLWMDYMKEELNHPLGRPENCGQIYWRAMKMLQGESAEAFVAKHAMHQTGHL

SEQ ID NO: 1525 - protein, 1001 aa, Homo sapiens
MPSTNRAGSLKDPEIAELFFKEDPEKLFTDLREIGHGSFGAVYFARDVRTNEVVAIKKMSYSGKQSTEKWQDIIKEVKFLQRIKHPNSIEYKGCYLREHTAWLVMEYCLGSASDLLEVHKKPLQEVEIAAITHGALQGLAYLHSHTMIHRDIKAGNILLTEPGQVKLADFGSASMASPANSFVGTPYWMAPEVILAMDEGQYDGKVDVWSLGITCIELAERKPPLFNMNAMSALYHIAQNESPTLQSNEWSDYFRNFVDSCLQKIPQDRPTSEELLKHIFVLRERPETVLIDLIQRTKDAVRELDNLQYRKMKKLLFQEAHNGPAVEAQEEEEEQDHGVGRTGTVNSVGSNQSIPSMSISASSQSSSVNSLPDVSDDKSELDMMEGDHTVMSNSSVIHLKPEEENYREEGDPRTRASDPQSPPQVSRHKSHYRNREHFATIRTASLVTRQMQEHEQDSELREQMSGYKRMRRQHQKQLMTLENKLKAEMDEHRLRLDKDLETQRNNFAAEMEKLIKKHQAAMEKEAKVMSNEEKKFQQHIQAQQKKELNSFLESQKREYKLRKEQLKEELNENQSTPKKEKQEWLSKQKENIQHFQAEEEANLLRRQRQYLELECRRFKRRMLLGRHNLEQDLVREELNKRQTQKDLEHAMLLRQHESMQELEFRHLNTIQKMRCELIRLQHQTELTNQLEYNKRRERELRRKHVMEVRQQPKSLKSKELQIKKQFQDTCKIQTRQYKALRNHLLETTPKSEHKAVLKRLKEEQTRKLAILAEQYDHSINEMLSTQALRLDEAQEAECQVLKMQLQQELELLNAYQSKIKMQAEAQHDRELRELEQRVSLRRALLEQKIEEEMLALQNERTERIRSLLERQAREIEAFDSESMRLGFSNMVLSNLSPEAFSHSYPGASGWSHNPTGGPGPHWGHPMGGPPQAWGHPMQGGPQPWGHPSGPMQGVPRGSSMGVRNSPQALRRTASGGRTEQGMSRSTSVTSQISNGSHMSYT

SEQ ID NO: 1526 - protein, 1088 aa, Homo sapiens
MSAAPAYSEDKGGSAGPGEPEYGHDPASGGIFSSDYKRHDDLKEMLDTNKDSLKLEAMKRIVAMIARGKNASDLFPAVVKNVACKNIEVKKLVYVYLVRYAEEQQDLALLSISTFQRGLKDPNQLIRASALRVLSSIRVPIIVPIMMLAIKEAASDMSPYVRKTAAHAIPKLYSLDSDQKDQLIEVIEKLLADKTTLVAGSVVMAFEEVCPERIDLIHKNYRKLCNLLIDVEEWGQVVIISMLTRYARTQFLSPTQNESLLEENAEKAFYGSEEDEAKGAGSEETAAAAAPSRKPYVMDPDHRLLLRNTKPLLQSRSAAVVMAVAQLYFHLAPKAEVGVIAKALVRLLRSHSEVQYVVLQNVATMSIKRRGMFEPYLKSFYIRSTDPTQIKILKLEVLTNLANETNIPTVLREFQTYIRSMDKDFVAATIQAIGRCATNIGRVRDTCLNGLVQLLSNRDELVVAESVVVIKKLLQMQPAQHGEIIKHLAKLTDNIQVPMARASILWLIGEYCEHVPRIAPDVLRKMAKSFTAEEDIVKLQVINLAAKLYLTNSKQTKLLTQYVLSLAKYDQNYDIRDRARFTRQLIVPSEQGGALSRHAKKLFLAPKPAPVLESSFKDRDHFQLGSLSHLLNAKATGYQELPDWPEEAPDPSVRNVEVPEWTKCSNREKRKEKEKPFYSDSEGESGPTESADSDPESESESDSKSSSESGSGESSSESDNEDQDEDEEKGRGSESEQSEEDGKRKTKKKVPERKGEASSSDEGSDSSSSSSESEMTSESEEEQLEPASWSRKTPPSSKSAPATKEISLLDLEDFLSTPTVTPPSVQPVSPPAIVSTSLAADLEGLTLTDSTLVPSLLSPVSGVGRQELLHRVAGEGLAVDYTFSRQPFSGDPHMVSVHIHFSNSSDTPIKGLHVGTPKLPAGISIQEFPEIESLAPGESATAVMGINFCDSTQAANFQLCTQTRQFYVSIQPPVGELMAPVFMSENEFKKEQGKLMGMNEITEKLMLPDTCRSDHIVVQKVTATANLGRVPCGTSDEYRFAGRTLTGGSLVLLTLDARPAGAAQLTVNSEKMVIGTMLVKDVIQALTQ

SEQ ID NO: 1527 - protein, 1486 aa, Homo sapiens
MAANVGSMFQYWKRFDLRRLQKELNSVASELSARQEESEHSHKHLIELRREFKKNVPEEIREMVAPVLKSFQAEVVALSKRSQEAEAAFLSVYKQLIEAPDPVPVFEAARSLDDRLQPPSFDPSGQPRRDLHTSWKRNPELLSPKEQREGTSPAGPTLTEGSRLPGIPGKALLTETLLQRNEAEKQKGLQEVQITLAARLGEAEEKIKVLHSALKATQAELLELRRKYDEEAASKADEVGLIMTNLEKANQRAEAAQREVESLREQLASVNSSIRLACCSPQGPSGDKVNFTLCSGPRLEAALASKDREILRLLKDVQHLQSSLQELEEASANQIADLERQLTAKSEAIEKLEEKLQAQSDYEEIKTELSILKAMKLASSTCSLPQGMAKPEDSLLIAKEAFFPTQKFLLEKPSLLASPEEDPSEDDSIKDSLGTEQSYPSPQQLPPPPGPEDPLSPSPGQPLLGPSLGPDGTRTFSLSPFPSLASGERLMMPPAAFKGEAGGLLVFPPAFYGAKPPTAPATPAPGPEPLGGPEPADGGGGGAAGPGAEEEQLDTAEIAFQVKEQLLKHNIGQRVFGHYVLGLSQGSVSEILARPKPWRKLTVKGKEPFIKMKQFLSDEQNVLALRTIQVRQRGSITPRIRTPETGSDDAIKSILEQAKKEIESQKGGEPKTSVAPLSIANGTTPASTSEDAIKSILEQARREMQAQQQALLEMEVAPRGRSVPPSPPERPSLATASQNGAPALVKQEEGSGGPAQAPLPVLSPAAFVQSIIRKVKSEIGDAGYFDHHWASDRGLLSRPYASVSPSLSSSSSSGYSGQPNGRAWPRGDEAPVPPEDEAAAGAEDEPPRTGELKAEGATAEAGARLPYYPAYVPRTLKPTVPPLTPEQYELYMYREVDTLELTRQVKEKLAKNGICQRIFGEKVLGLSQGSVSDMLSRPKPWSKLTQKGREPFIRMQLWLSDQLGQAVGQQPGASQASPTEPRSSPSPPPSPTEPEKSSQEPLSLSLESSKENQQPEGRSSSSLSGKMYSGSQAPGGIQEIVAMSPELDTYSITKRVKEVLTDNNLGQRLFGESILGLTQGSVSDLLSRPKPWHKLSLKGREPFVRMQLWLNDPHNVEKLRDMKKLEKKAYLKRRYGLISTGSDSESPATRSECPSPCLQPQDLSLLQIKKPRVVLAPEEKEALRKAYQLEPYPSQQTIELLSFQLNLKTNTVINWFHNYRSRMRREMLVEGTQDEPDLDPSGGPGILPPGHSHPDPTPQSPDSETEDQKPTVKELELQEGPEENSTPLTTQDKAQVRIKQEQMEEDAEEEAGSQPQDSGELDKGQGPPKEEHPDPPGNDGLPKVAPGPLLPGGSTPDCPSLHPQQESEAGERLHPDPLSFKSASESSRCSLEVSLNSPSAASSPGLMMSVSPVPSSSAPISPSPPGAPPAKVPSASPTADMAGALHPSAKVNPNLQRRHEKMANLNNIIYRVERAANREEALEWEF

SEQ ID NO: 1528 - protein, 804 aa, Homo sapiens
MAKSSSLNVRVVEGRALPAKDVSGSSDPYCLVKVDDEVVARTATVWRSLGPFWGEEYTVHLPLDFHQLAFYVLDEDTVGHDDIIGKISLSREAITADPRGIDSWINLSRVDPDAEVQGEICLSVQMLEDGQGRCLRCHVLQARDLAPRDISGTSDPFARVFWGSQSLETSTIKKTRFPHWDEVLELREMPGAPSPLRVELWDWDMVGKNDFLGMVEFSPKTLQQKPPKGWFRLLPFPRAEEDSGGNLGALRVKVRLIEDRVLPSQCYQPLMELLMESVQGPAEEDTASPLALLEELTLGDCRQDLATKLVKLFLGRGLAGRFLDYLTRREVARTMDPNTLFRSNSLASKSMEQFMKLVGMPYLHEVLKPVISRVFEEKKYMELDPCKMDLGRTRRISFKGALSEEQMRETSLGLLTGYLGPIVDAIVGSVGRCPPAMRLAFKQLHRRVEERFPQAEHQDVKYLAISGFLFLRFFAPAILTPKLFDLRDQHADPQTSRSLLLLAKAVQSIGNLGQQLGQGKELWMAPLHPFLLQCVSRVRDFLDRLVDVDGDEAGVPARALFPPSAIVREGYLLKRKEEPAGLATRFAFKKRYVWLSGETLSFSKSPEWQMCHSIPVSHIRAVERVDEGAFQLPHVMQVVTQDGTGALHTTYLQCKNVNELNQWLSALRKASAPNPNKLAACHPGAFRSARWTCCLQAERSAAGCSRTHSAVTLGDWSDPLDPDAEAQTVYRQLLLGRDQLRLKLLEDSNMDTTLEADTGACPEVLARQRAATARLLEVLADLDRAHEEFQQQERGKAALGPLGP

SEQ ID NO: 1529 - protein, 517 aa, Homo sapiens
MLRAAARFGPRLGRRLLSAAATQAVPAPNQQPEVFCNQIFINNEWHDAVSRKTFPTVNPSTGEVICQVAEGDKEDVDKAVKAARAAFQLGSPWRRMDASHRGRLLNRLADLIERDRTYLAALETLDNGKPYVISYLVDLDMVLKCLRYYAGWADKYHGKTIPIDGDFFSYTRHEPVGVCGQIIPWNFPLLMQAWKLGPALATGNVVVMKVAEQTPLTALYVANLIKEAGFPPGVVNIVPGFGPTAGAAIASHEDVDKVAFTGSTEIGRVIQVAAGSSNLKRVTLELGGKSPNIIMSDADMDWAVEQAHFALFFNQGQCCCAGSRTFVQEDIYDEFVERSVARAKSRVVGNPFDSKTEQGPQVDETQFKKILGYINTGKQEGAKLLCGGGIAADRGYFIQPTVFGDVQDGMTIAKEEIFGPVMQILKFKTIEEVVGRANNSTYGLAAAVFTKDLDKANYLSQALQAGTVWVNCYDVFGAQSPFGGYKMSGSGRELGEYGLQAYTEVKTVTVKVPQKNS

SEQ ID NO: 1530 - protein, 261 aa, Homo sapiens
MAAAVPRAAFLSPLLPLLLGFLLLSAPHGGSGLHTKGALPLDTVTFYKVIPKSKFVLVKFDTQYPYGEKQDEFKRLAENSASSDDLLVAEVGISDYGDKLNMELSEKYKLDKESYPVFYLFRDGDFENPVPYTGAVKVGAIQRWLKGQGVYLGMPGCLPVYDALAGEFIRASGVEARQALLKQGQDNLSSVKETQKKWAEQYLKIMGKILDQGEDFPASEMTRIARLIEKNKMSDGKKEELQKSLNILTAFQKKGAEKEEL

SEQ ID NO: 1531 - protein, 590 aa, Homo sapiens
MSSACDAGDHYPLHLLVWKNDYRQLEKELQGQNVEAVDPRGRTLLHLAVSLGHLESARVLLRHKADVTKENRQGWTVLHEAVSTGDPEMVYTVLQHRDYHNTSMALEGVPELLQKILEAPDFYVQMKWEFTSWVPLVSRICPNDVCRIWKSGAKLRVDITLLGFENMSWIRGRRSFIFKGEDNWAELMEVNHDDKVVTTERFDLSQEMERLTLDLMKPKSREVERRLTSPVINTSLDTKNIAFERTKSGFWGWRTDKAEVVNGYEAKVYTVNNVNVITKIRTEHLTEEEKKRYKADRNPLESLLGTVEHQFGAQGDLTTECATANNPTAITPDEYFNEEFDLKDRDIGRPKELTIRTQKFKAMLWMCEEFPLSLVEQVIPIIDLMARTSAHFARLRDFIKLEFPPGFPVKIEIPLFHVLNARITFGNVNGCSTAEESVSQNVEGTQADSASHITNFEVDQSVFEIPESYYVQDNGRNVHLQDEDYEIMQFAIQQSLLESSRSQELSGPASNGGISQTNTYDAQYERAIQESLLTSTEGLCPSALSETSRFDNDLQLAMELSAKELEEWELRLQEEEAELQQVLQLSLTDK

SEQ ID NO: 1532 - protein, 871 aa, Homo sapiens
MADSSEGPRAGPGEVAELPGDESGTPGGEAFPLSSLANLFEGEDGSLSPSPADASRPAGPGDGRPNLRMKFQGAFRKGVPNPIDLLESTLYESSVVPGPKKAPMDSLFDYGTYRHHSSDNKRWRKKIIEKQPQSPKAPAPQPPPILKVFNRPILFDIVSRGSTADLDGLLPFLLTHKKRLTDEEFREPSTGKTCLPKALLNLSNGRNDTIPVLLDIAERTGNMREFINSPFRDIYYRGQTALHIAIERRCKHYVELLVAQGADVHAQARGRFFQPKDEGGYFYFGELPLSLAACTNQPHIVNYLTENPHKKADMRRQDSRGNTVLHALVAIADNTRENTKFVTKMYDLLLLKCARLFPDSNLEAVLNNDGLSPLMMAAKTGKIGIFQHIIRREVTDEDTRHLSRKFKDWAYGPVYSSLYDLSSLDTCGEEASVLEILVYNSKIENRHEMLAVEPINELLRDKWRKFGAVSFYINVVSYLCAMVIFTLTAYYQPLEGTPPYPYRTTVDYLRLAGEVITLFTGVLFFFTNIKDLFMKKCPGVNSLFIDGSFQLLYFIYSVLVIVSAALYLAGIEAYLAVMVFALVLGWMNALYFTRGLKLTGTYSIMIQKILFKDLFRFLLVYLLFMIGYASALVSLLNPCANMKVCNEDQTNCTVPTYPSCRDSETFSTFLLDLFKLTIGMGDLEMLSSTKYPVVFIILLVTYIILTFVLLLNMLIALMGETVGQVSKESKHIWKLQWATTILDIERSFPVFLRKAFRSGEMVTVGKSSDGTPDRRWCFRVDEVNWSHWNQNLGIINEDPGKNETYQYYGFSHTVGRLRRDRWSSVVPRVVELNKNSNPDEVVVPLDSMGNPRCDGHQQGYPRKWRTDDAPL

SEQ ID NO: 1533 - protein, 960 aa, Homo sapiens
MSRLIVKNLPNGMKEERFRQLFAAFGTLTDCSLKFTKDGKFRKFGFIGFKSEEEAQKAQKHFNKSFIDTSRITVEFCKSFGDPAKPRAWSKHAQKPSQPKQPPKDSTTPEIKKDEKKKKVAGQLEKLKEDTEFQEFLSVHQRRAQAATWANDGLDAEPSKGKSKPASDYLNFDSDSGQESEEEGAGEDLEEEASLEPKAAVQKELSDMDYLKSKMVKAGSSSSSEEEESEDEAVHCDEGSEAEEEDSSATPVLQERDSKGAGQEQGMPAGKKRPPEARAETEKPANQKEPTTCHTVKLRGAPFNVTEKNVMEFLAPLKPVAIRIVRNAHGNKTGYIFVDFSNEEEVKQALKCNREYMGGRYIEVFREKNVPTTKGAPKNTTKSWQGRILGENEEEEDLAESGRLFVRNLPYTSTEEDLEKLFSKYGPLSELHYPIDSLTKKPKGFAFITFMFPEHAVKAYSEVDGQVFQGRMLHVLPSTIKKEASEDASALGSSSYKKKKEAQDKANSASSHNWNTLFMGPNAVADAIAQKYNATKSQVFDHETKGSVAVRVALGETQLVQEVRRFLIDNGVSLDSFSQAAAERSKTVILVKNLPAGTLAAQLQETFGHFGSLGRVLLPEGGITAIVEFLEPLEARKAFRHLAYSKFHHVPLYLEWAPVGVFSSTAPQKKKLQDTPSEPMEKDPAEPETVPDGETPEDENPTEEGADNSSAKMEEEEEEEEEEEESLPGCTLFIKNLNFDTTEEKLKEVFSKVGTVKSCSISKKKNKAGVLLSMGFGFVEYRKPEQAQKALKQLQGHVVDGHKLEVRISERATKPAVTLARKKQVPRKQTTSKILVRNIPFQAHSREIRELFSTFGELKTVRLPKKMTGTGTHRGFGFVDFLTKQDAKRAFNALCHSTHLYGRRLVLEWADSEVTLQALRRKTAAHFHEPPKKKRSVVLDEILEQLEGSDSDSEEQTLQL

SEQ ID NO: 1534 - protein, 972 aa, Homo sapiens
MATRGHVQDPNDRRLRPIYDYLDNGNNKMAIQQADKLLKKHKDLHCAKVLKAIGLQRTGKQEEAFTLAQEVAALEPTDDNSLQALTILYREMHRPELVTKLYEAAVKKVPNSEEYHSHLFMAYARVGEYKKMQQAGMALYKIVPKNPYYFWSVMSLIMQSISAQDENLSKTMFLPLAERMVEKMVKEDKIEAEAEVELYYMILERLGKYQEALDVIRGKLGEKLTSEIQSRENKCMAMYKKLSRWPECNALSRRLLLKNSDDWQFYLTYFDSVFRLIEEAWSPPAEGEHSLEGEVHYSAEKAVKFIEDRITEESKSSRHLRGPHLAKLELIRRLRSQGCNDEYKLGDPEELMFQYFKKFGDKPCCFTDLKVFVDLLPATQCTKFINQLLGVVPLSTPTEDKLALPADIRALQQHLCVVQLTRLLGLYHTMDKNQKLSVVRELMLRYQHGLEFGKTCLKTELQFSDYYCLLAVHALIDVWRETGDETTVWQALTLLEEGLTHSPSNAQFKLLLVRIYCMLGAFEPVVDLYSSLDAKHIQHDTIGYLLTRYAESLGQYAAASQSCNFALRFFHSNQKDTSEYIIQAYKYGAFEKIPEFIAFRNRLNNSLHFAQVRTERMLLDLLLEANISTSLAESIKSMNLRPEEDDIPWEDLRDNRDLNVFFSWDPKDRDVSEEHKKLSLEEETLWLRIRSLTLRLISGLPSLNHPVEPKNSEKTAENGVSSRIDILRLLLQQLEATLETGKRFIEKDIQYPFLGPVPTRMGGFFNSGCSQCQISSFYLVNDIYELDTSGLEDTMEIQERIENSFKSLLDQLKDVFSKCKGDLLEVKDGNLKTHPTLLENLVFFVETISVILWVSSYCESVLRPYKLNLQKKKKKKKETSIIMPPVFTSFQDYVTGLQTLISNVVDHIKGLETHLIALKLEELILEDTSLSPEERKFSKTVQGKVQSSYLHSLLEMGELLKKRLETTKKLKI

SEQ ID NO: 1535 - protein, 498 aa, Homo sapiens
MRRAPSLVLFFLVALCGRGNCRVANAEEKLMDDLLNKTRYNNLIRPATSSSQLISIKLQLSLAQLISVNEREQIMTTNVWLKQEWTDYRLTWNSSRYEGVNILRIPAKRIWLPDIVLYNNADGTYEVSVYTNLIVRSNGSVLWLPPAIYKSACKIEVKYFPFDQQNCTLKFRSWTYDHTEIDMVLMTPTASMDDFTPSGEWDIVALPGRRTVNPQDPSYVDVTYDFIIKRKPLFYTINLIIPCVLTTLLAILVFYLPSDCGEKMTLCISVLLALTFFLLLISKIVPPTSLDVPLIGKYLMFTMVLVTFSIVTSVCVLNVHHRSPSTHTMAPWVKRCFLHKLPTFLFMKRPGPDSSPARAFPPSKSCVTKPEATATSTSPSNFYGNSMYFVNPASAASKSPAGSTPVAIPRDFWLRSSGRFRQDVQEALEGVSFIAQHMKNDDEDQSVVEDWKYVAMVVDRLFLWVFMFVCVLGTVGLFLPPLFQTHAASEGPYAAQRD

SEQ ID NO: 1536 - protein, 882 aa, Homo sapiens
MGPWSRSLSALLLLLQVSSWLCQEPEPCHPGFDAESYTFTVPRRHLERGRVLGRVNFEDCTGRQRTAYFSLDTRFKVGTDGVITVKRPLRFHNPQIHFLVYAWDSTYRKFSTKVTLNTVGHHHRPPPHQASVSGIQAELLTFPNSSPGLRRQKRDWVIPPISCPENEKGPFPKNLVQIKSNKDKEGKVFYSITGQGADTPPVGVFIIERETGWLKVTEPLDRERIATYTLFSHAVSSNGNAVEDPMEILITVTDQNDNKPEFTQEVFKGSVMEGALPGTSVMEVTATDADDDVNTYNAAIAYTILSQDPELPDKNMFTINRNTGVISVVTTGLDRESFPTYTLVVQAADLQGEGLSTTATAVITVTDTNDNPPIFNPTTYKGQVPENEANVVITTLKVTDADAPNTPAWEAVYTILNDDGGQFVVTTNPVNNDGILKTAKGLDFEAKQQYILHVAVTNVVPFEVSLTTSTATVTVDVLDVNEAPIFVPPEKRVEVSEDFGVGQEITSYTAQEPDTFMEQKITYRIWRDTANWLEINPDTGAISTRAELDREDFEHVKNSTYTALIIATDNGSPVATGTGTLLLILSDVNDNAPIPEPRTIFFCERNPKPQVINIIDADLPPNTSPFTAELTHGASANWTIQYNDPTQESIILKPKMALEVGDYKINLKLMDNQNKDQVTTLEVSVCDCEGAAGVCRKAQPVEAGLQIPAILGILGGILALLILILLLLLFLRRRAVVKEPLLPPEDDTRDNVYYYDEEGGGEEDQDFDLSQLHRGLDARPEVTRNDVAPTLMSVPRYLPRPANPDEIGNFIDENLKAADTDPTAPPYDSLLVFDYEGSGSEAASLSSLNSSESDKDQDYDYLNEWGNRFKKLADMYGGGEDD

SEQ ID NO: 1537 - protein, 1094 aa, Homo sapiens
MAARQAVGSGAQETCGLDRILEALKLLLSPGGSGSSSLQVTKHDVLLATLKSNLSALEDKFLKDPQWKNLKLLRDEIADKAEWPQNSVDVTWSFTSQTLLLLLCLKETMIRLAANFNPGKPNPRTPEVAPALSPDALSISQQKTVQFVLQFVVTLGICPYLMPGVGVPLRYRTEFGAVVQDVVCFDAAPDATRRLYTSCKALLNVAQHTSLGSLIFCHHFGDIAAGLCQLGFCPTKRKLLTPAEEVLTEEERTLSRGALRDMLDQVYQPLAVRELLILQGGPPQSCTDVKTQMRCRAPAWLRRLCGQLLSERLMRPNGVQAVVRGILEGAGAGAAGGSDAEVTAADWKKCDLIAKILASCPQQSLSPENYYRDICPQVLDLFHFQDKLTARQFQRVATTTFITLSRERPHLAAKYLLQPVLAPLHRCLNTAELSESDMVPGTILVTEEELSRCIEDVFKVYVVGNEPLTVLMDSLLPVLGVLFLLYCFTKQSVSHIRSLCQEILLWILGKLERKKAIASLKGFAGLDKAVPSLHSLCQFRVATQGGIMITIKEAISDEDEDEALYQKVSSEQGRVEHLGDLLSHCQECGLAGDFFIFCLKELTHVASENETELKTEPFSSKSLLELEQHQTLLVEGQERKLLVLQLMAVLCERMSEQIFTNVTQVVDFVAATLQRACASLAHQAESTVESQTLSMSMGLVAVMLGGAVQLKSSDFAVLKQLLPLLEKVSNTYPDPVIQELAVDLRITISTHGAFATEAVSMAAQSTLNRKDLEGKIEEQQQTSHERPTDVAHSHLEQQQSHETAPQTGLQSNAPIIPQGVNEPSTTTSQKSGSVTTEQLQEVLLSAYDPQIPTRAAALRTLSHWIEQREAKALEMQEKLLKIFLENLEHEDTFVYLSAIQGVALLSDVYPEKILPDLLAQYDSSKDKHTPETRMKVGEVLMRIVRALGDMVSKYREPLIHTFLRGVRDPDGAHRASSLANLGELCQRLDFLLGSVVHEVTACLIAVAKTDGEVQVRRAAIHVVVLLLRGLSQKATEVLSAVLKDLYHLLKHVVCLEPDDVAKLHAQLALEELDDIMKNFLFPPQKLEKKIMVLP

SEQ ID NO: 1538 - protein, 606 aa, Homo sapiens
MTVVGNPRSWSCQWLPILILLLGTGHGPGVEGVTHYKAGDPVILYVNKVGPYHNPQETYHYYQLPVCCPEKIRHKSLSLGEVLDGDRMAESLYEIRFRENVEKRILCHMQLSSAQVEQLRQAIEELYYFEFVVDDLPIRGFVGYMEESGFLPHSHKIGLWTHLDFHLEFHGDRIIFANVSVRDVKPHSLDGLRPDEFLGLTHTYSVRWSETSVERRSDRRRGDDGGFFPRTLEIHWLSIINSMVLVFLLVGFVAVILMRVLRNDLARYNLDEETTSAGSGDDFDQGDNGWKIIHTDVFRFPPYRGLLCAVLGVGAQFLALGTGIIVMALLGMFNVHRHGAINSAAILLYALTCCISGYVSSHFYRQIGGERWVWNIILTTSLFSVPFFLTWSVVNSVHWANGSTQALPATTILLLLTVWLLVGFPLTVIGGIFGKNNASPFDAPCRTKNIAREIPPQPWYKSTVIHMTVGGFLPFSAISVELYYIFATVWGREQYTLYGILFFVFAILLSVGACISIALTYFQLSGEDYRWWWRSVLSVGSTGLFIFLYSVFYYARRSNMSGAVQTVEFFGYSLLTGYVFFLMLGTISFFSSLKFIRYIYVNLKMD

SEQ ID NO: 1539 - protein, 882 aa, Homo sapiens
MPALACLRRLCRHVSPQAVLFLLFIFCLFSVFISAYYLYGWKRGLEPSADAPEPDCGDPPPVAPSRLLPLKPVQAATPSRTDPLVLVFVESLYSQLGQEVVAILESSRFKYRTEIAPGKGDMPTLTDKGRGRFALIIYENILKYVNLDAWNRELLDKYCVAYGVGIIGFFKANENSLLSAQLKGFPLFLHSNLGLKDCSINPKSPLLYVTRPSEVEKGVLPGEDWTVFQSNHSTYEPVLLAKTRSSESIPHLGADAGLHAALHATVVQDLGLHDGIQRVLFGNNLNFWLHKLVFVDAVAFLTGKRLSLPLDRYILVDIDDIFVGKEGTRMKVEDVKALFDTQNELRAHIPNFTFNLGYSGKFFHTGTNAEDAGDDLLLSYVKEFWWFPHMWSHMQPHLFHNQSVLAEQMALNKKFAVEHGIPTDMGYAVAPHHSGVYPVHVQLYEAWKQVWSIRVTSTEEYPHLKPARYRRGFIHNGIMVLPRQTCGLFTHTIFYNEYPGGSSELDKIINGGELFLTVLLNPISIFMTHLSNYGNDRLGLYTFKHLVRFLHSWTNLRLQTLPPVQLAQKYFQIFSEEKDPLWQDPCEDKRHKDIWSKEKTCDRFPKLLIIGPQKTGTTALYLFLGMHPDLSSNYPSSETFEEIQFFNGHNYHKGIDWYMEFFPIPSNTTSDFYFEKSANYFDSEVAPRRAAALLPKAKVLTILINPADRAYSWYQHQRAHDDPVALKYTFHEVITAGSDASSKLRALQNRCLVPGWYATHIERWLSAYHANQILVLDGKLLRTEPAKVMDMVQKFLGVTNTIDYHKTLAFDPKKGFWCQLLEGGKTKCLGKSKGRKYPEMDLDSRAFLKDYYRDHNIELSKLLYKMGQTLPTWLREDLQNTR

SEQ ID NO: 1540 - protein, 4349 aa, Homo sapiens
MTIALLGFAIFLLHCATCEKPLEGILSSSAWHFTHSHYNATIYENSSPKTYVESFEKMGIYLAEPQWAVRYRIISGDVANVFKTEEYVVGNFCFLRIRTKSSNTALLNREVRDSYTLIIQATEKTLELEALTRVVVHILDQNDLKPLFSPPSYRVTISEDMPLKSPICKVTATDADLGQNAEFYYAFNTRSEMFAIHPTSGVVTVAGKLNVTWRGKHELQVLAVDRMRKISEGNGFGSLAALVVHVEPALRKPPAIASVVVTPPDSNDGTTYATVLVDANSSGAEVESVEVVGGDPGKHFKAIKSYARSNEFSLVSVKDINWMEYLHGFNLSLQARSGSGPYFYSQIRGFHLPPSKLSSLKFEKAVYRVQLSEFSPPGSRVVMVRVTPAFPNLQYVLKPSSENVGFKLNARTGLITTTKLMDFHDRAHYQLHIRTSPGQASTVVVIDIVDCNNHAPLFNRSSYDGTLDENIPPGTSVLAVTATDRDHGENGYVTYSIAGPKALPFSIDPYLGIISTSKPMDYELMKRIYTFRVRASDWGSPFRREKEVSIFLQLRNLNDNQPMFEEVNCTGSIRQDWPVGKSIMTMSAIDVDELQNLKYEIVSGNELEYFDLNHFSGVISLKRPFINLTAGQPTSYSLKITASDGKNYASPTTLNITVVKDPHFEVPVTCDKTGVLTQFTKTILHFIGLQNQESSDEEFTSLSTYQINHYTPQFEDHFPQSIDVLESVPINTPLARLAATDPDAGFNGKLVYVIADGNEEGCFDIELETGLLTVAAPLDYEATNFYILNVTVYDLGTPQKSSWKLLTVNVKDWNDNAPRFPPGGYQLTISEDTEVGTTIAELTTKDADSEDNGRVRYTLLSPTEKFSLHPLTGELVVTGHLDRESEPRYILKVEARDQPSKGHQLFSVTDLIITLEDVNDNSPQCITEHNRLKVPEDLPPGTVLTFLDASDPDLGPAGEVRYVLMDGAHGTFRVDLMTGALILERELDFERRAGYNLSLWASDGGRPLARRTLCHVEVIVLDVNENLHPPHFASFVHQGQVQENSPSGTQVIVVAAQDDDSGLDGELQYFLRAGTGLAAFSINQDTGMIQTLAPLDREFASYYWLTVLAVDRGSVPLSSVTEVYIEVTDANDNPPQMSQAVFYPSIQEDAPVGTSVLQLDAWDPDSSSKGKLTFNITSGNYMGFFMIHPVTGLLSTAQQLDRENKDEHILEVTVLDNGEPSLKSTSRVVVGILDVNDNPPIFSHKLFNVRLPERLSPVSPGPVYRLVASDLDEGLNGRVTYSIEDSDEEAFSIDLVTGVVSSSSTFTAGEYNILTIKATDSGQPPLSASVRLHIEWIPWPRPSSIPLAFDETYYSFTVMETDPVNHMVGVISVEGRPGLFWFNISGGDKDMDFDIEKTTGSIVIARPLDTRRRSNYNLTVEVTDGSRTIATQVHIFMIANINHHRPQFLETRYEVRVPQDTVPGVELLRVQAIDQDKGKSLIYTIHGSQDPGSASLFQLDPSSGVLVTVGKLDLGSGPSQHTLTVMVRDQEIPIKRNFVWVTIHVEDGNLHPPRFTQLHYEASVPDTIAPGTELLQVRAMDADRGVNAEVHYSLLKGNSEGFFNINALLGIITLAQKLDQANHAPHTLTVKAEDQGSPQWHDLATVIIHVYPSDRSAPIFSKSEYFVEIPESIPVGSPILLVSAMSPSEVTYELREGNKDGVFSMNSYSGLISTQKKLDHEKISSYQLKIRGSNMAGAFTDVMVVVDIIDENDNAPMFLKSTFVGQISEAAPLYSMIMDKNNNPFVIHASDSDKEANSLLVYKILEPEALKFFKIDPSMGTLTIVSEMDYESMPSFQFCVYVHDQGSPVLFAPRPAQVIIHVRDVNDSPPRFSEQIYEVAIVGPIHPGMELLMVRASDEDSEVNYSIKTGNADEAVTIHPVTGSISVLNPAFLGLSRKLTIRASDGLYQDTALVKISLTQVLDKSLQFDQDVYWAAVKENLQDRKALVILGAQGNHLNDTLSYFLLNGTDMFHMVQSAGVLQTRGVAFDREQQDTHELAVEVRDNRTPQRVAQGLVRVSIEDVNDNPPKFKHLPYYTIIQDGTEPGDVLFQVSATDEDLGTNGAVTYEFAEDYTYFRIDPYLGDISLKKPFDYQALNKYHLKVIARDGGTPSLQSEEEVLVTVRNKSNPLFQSPYYKVRVPENITLYTPILHTQARSPEGLRLIYNIVEEEPLMLFTTDFKTGVLTVTGPLDYESKTKHVFTVRATDTALGSFSEATVEVLVEDVNDNPPTFSQLVYTTSISEGLPAQTPVIQLLASDQDSGRNRDVSYQIVEDGSDVSKFFQINGSTGEMSTVQELDYEAQQHFHVKVRAMDKGDPPLTGETLVVVNVSDINDNPPEFRQPQYEANVSELATCGHLVLKVQAIDPDSRDTSRLEYLILSGNQDRHFFINSSSGIISMFNLCKKHLDSSYNLRVGASDGVFRATVPVYINTTNANKYSPEFQQHLYEAELAENAMVGTKVIDLLAIDKDSGPYGTIDYTIINKLASEKFSINPNGQIATLQKLDRENSTERVIAIKVMARDGGGRVAFCTVKIILTDENDNPPQFKASEYTVSIQSNVSKDSPVIQVLAYDADEGQNADVTYSVNPEDLVKDVIEINPVTGVVKVKDSLVGLENQTLDFFIKAQDGGPPHWNSLVPVRLQVVPKKVSLPKFSEPLYTFSAPEDLPEGSEIGIVKAVAAQDPVIYSLVRGTTPESNKDGVFSLDPDTGVIKVRKPMDHESTKLYQIDVMAHCLQNTDVVSLVSVNIQVGDVNDNRPVFEADPYKAVLTENMPVGTSVIQVTAIDKDTGRDGQVSYRLSADPGSNVHELFAIDSESGWITTLQELDCETCQTYHFHVVAYDHGQTIQLSSQALVQVSITDENDNAPRFASEEYRGSVVENSEPGELVATLKTLDADISEQNRQVTCYITEGDPLGQFGISQVGDEWRISSRKTLDREHTAKYLLRVTASDGKFQASVTVEIFVLDVNDNSPQCSQLLYTGKVHEDVFPGHFILKVSATDLDTDTNAQITYSLHGPGAHEFKLDPHTGELTTLTALDRERKDVFNLVAKATDGGGRSCQADITLHVEDVNDNAPRFFPSHCAVAVFDNTTVKTPVAVVFARDPDQGANAQVVYSLPDSAEGHFSIDATTGVIRLEKPLQVRPQAPLELTVRASDLGTPIPLSTLGTVTVSVVGLEDYLPVFLNTEHSVQVPEDAPPGTEVLQLATLTRPGAEKTGYRVVSGNEQGRFRLDARTGILYVNASLDFETSPKYFLSIECSRKSSSSLSDVTTVMVNITDVNEHRPQFPQDPYSTRVLENALVGDVILTVSATDEDGPLNSDITYSLIGGNQLGHFTIHPKKGELQVAKALDREQASSYSLKLRATDSGQPPLHEDTDIAIQVADVNDNPPRFFQLNYSTTVQENSPIGSKVLQLILSDPDSPENGPPYSFRITKGNNGSAFRVTPDGWLVTAEGLSRRAQEWYQLQIQASDSGIPPLSSLTSVRVHVTEQSHYAPSALPLEIFITVGEDEFQGGMVGKIHATDRDPQDTLTYSLAEEETLGRHFSVGAPDGKIIAAQGLPRGHYSFNVTVSDGTFTTTAGVHVYVWHVGQEALQQAMWMGFYQLTPEELVSDHWRNLQRFLSHKLDIKRANIHLASLQPAEAVAGVDVLLVFEGHSGTFYEFQELASIITHSAKEMEHSVGVQMRSAMPMVPCQGPTCQGQICHNTVHLDPKVGPTYSTARLSILTPRHHLQRSCSCNGTATRFSGQSYVRYRAPAARNWHIHFYLKTLQPQAILLFTNETASVSLKLASGVPQLEYHCLGGFYGNLSSQRHVNDHEWHSILVEEMDASIRLMVDSMGNTSLVVPENCRGLRPERHLLLGGLILLHSSSNVSQGFEGCLDAVVVNEEALDLLAPGKTVAGLLETQALTQCCLHSDYCSQNTCLNGGKCSWTHGAGYVCKCPPQFSGKHCEQGRENCTFAPCLEGGTCILSPKGASCNCPHPYTGDRCEMEARGCSEGHCLVTPEIQRGDWGQQELLIITVAVAFIIISTVGLLFYCRRCKSHKPVAMEDPDLLARSVGVDTQAMPAIELNPLSASSCNNLNQPEPSKASVPNELVTFGPNSKQRPVVCSVPPRLPPAAVPSHSDNEPVIKRTWSSEEMVYPGGAMVWPPTYSRNERWEYPHSEVTQGPLPPSAHRHSTPVVMPEPNGLYGGFPFPLEMENKRAPLPPRYSNQNLEDLMPSRPPSPRERLVAPCLNEYTAISYYHSQFRQGGGGPCLADGGYKGVGMRLSRAGPSYAVCEVEGAPLAGQGQPRVPPNYEGSDMVESDYGSCEEVMF

SEQ ID NO: 1541 - protein, 755 aa, Homo sapiens
MASVHESLYFNPMMTNGVVHANVFGIKDWVTPYKIAVLVLLNEMSRTGEGAVSLMERRRLNQLLLPLLQGPDITLSKLYKLIEESCPQLANSVQIRIKLMAEGELKDMEQFFDDLSDSFSGTEPEVHKTSVVGLFLRHMILAYSKLSFSQVFKLYTALQQYFQNGEKKTVEDADMELTSRDEGERKMEKEELDVSVREEEVSCSGPLSQKQAEFFLSQQASLLKNDETKALTPASLQKELNNLLKFNPDFAEAHYLSYLNNLRVQDVFSSTHSLLHYFDRLILTGAESKSNGEEGYGRSLRYAALNLAALHCRFGHYQQAELALQEAIRIAQESNDHVCLQHCLSWLYVLGQKRSDSYVLLEHSVKKAVHFGLPYLASLGIQSLVQQRAFAGKTANKLMDALKDSDLLHWKHSLSELIDISIAQKTAIWRLYGRSTMALQQAQMLLSMNSLEAVNAGVQQNNTESFAVALCHLAELHAEQGCFAAASEVLKHLKERFPPNSQHAQLWMLCDQKIQFDRAMNDGKYHLADSLVTGITALNSIEGVYRKAVVLQAQNQMSEAHKLLQKLLVHCQKLKNTEMVISVLLSVAELYWRSSSPTIALPMLLQALALSKEYRLQYLASETVLNLAFAQLILGIPEQALSLLHMAIEPILADGAILDKGRAMFLVAKCQVASAASYDQPKKAEALEAAIENLNEAKNYFAKVDCKERIRDVVYFQARLYHTLGKTQERNRCAMLFRQLHQELPSHGVPLINHL

SEQ ID NO: 1542 - protein, 2027 aa, Homo sapiens
MLKFKYGARNPLDAGAAEPIASRASRLNLFFQGKPPFMTQQQMSPLSREGILDALFVLFEECSQPALMKIKHVSNFVRKYSDTIAELQELQPSAKDFEVRSLVGCGHFAEVQVVREKATGDIYAMKVMKKKALLAQEQVSFFEEERNILSRSTSPWIPQLQYAFQDKNHLYLVMEYQPGGDLLSLLNRYEDQLDENLIQFYLAELILAVHSVHLMGYVHRDIKPENILVDRTGHIKLVDFGSAAKMNSNKMVNAKLPIGTPDYMAPEVLTVMNGDGKGTYGLDCDWWSVGVIAYEMIYGRSPFAEGTSARTFNNIMNFQRFLKFPDDPKVSSDFLDLIQSLLCGQKERLKFEGLCCHPFFSKIDWNNIRNSPPPFVPTLKSDDDTSNFDEPEKNSWVSSSPCQLSPSGFSGEELPFVGFSYSKALGILGRSESVVSGLDSPAKTSSMEKKLLIKSKELQDSQDKCHKMEQEMTRLHRRVSEVEAVLSQKEVELKASETQRSLLEQDLATYITECSSLKRSLEQARMEVSQEDDKALQLLHDIREQSRKLQEIKEQEYQAQVEEMRLMMNQLEEDLVSARRRSDLYESELRESRLAAEEFKRKATECQHKLLKAKDQGKPEVGEYAKLEKINAEQQLKIQELQEKLEKAVKASTEATELLQNIRQAKERAERELEKLQNREDSSEGIRKKLVEAEELEEKHREAQVSAQHLEVHLKQKEQHYEEKIKVLDNQIKKDLADKETLENMMQRHEEEAHEKGKILSEQKAMINAMDSKIRSLEQRIVELSEANKLAANSSLFTQRNMKAQEEMISELRQQKFYLETQAGKLEAQNRKLEEQLEKISHQDHSDKNRLLELETRLREVSLEHEEQKLELKRQLTELQLSLQERESQLTALQAARAALESQLRQAKTELEETTAEAEEEIQALTAHRDEIQRKFDALRNSCTVITDLEEQLNQLTEDNAELNNQNFYLSKQLDEASGANDEIVQLRSEVDHLRREITEREMQLTSQKQTMEALKTTCTMLEEQVMDLEALNDELLEKERQWEAWRSVLGDEKSQFECRVRELQRMLDTEKQSRARADQRITESRQVVELAVKEHKAEILALQQALKEQKLKAESLSDKLNDLEKKHAMLEMNARSLQQKLETERELKQRLLEEQAKLQQQMDLQKNHIFRLTQGLQEALDRADLLKTERSDLEYQLENIQVLYSHEKVKMEGTISQQTKLIDFLQAKMDQPAKKKKGLFSRRKEDPALPTQVPLQYNELKLALEKEKARCAELEEALQKTRIELRSAREEAAHRKATDHPHPSTPATARQQIAMSAIVRSPEHQPSAMSLLAPPSSRRKESSTPEEFSRRLKERMHHNIPHRFNVGLNMRATKCAVCLDTVHFGRQASKCLECQVMCHPKCSTCLPATCGLPAEYATHFTEAFCRDKMNSPGLQTKEPSSSLHLEGWMKVPRNNKRGQQGWDRKYIVLEGSKVLIYDNEAREAGQRPVEEFELCLPDGDVSIHGAVGASELANTAKADVPYILKMESHPHTTCWPGRTLYLLAPSFPDKQRWVTALESVVAGGRVSREKAEADAKLLGNSLLKLEGDDRLDMNCTLPFSDQVVLVGTEEGLYALNVLKNSLTHVPGIGAVFQIYIIKDLEKLLMIAGEERALCLVDVKKVKQSLAQSHLPAQPDISPNIFEAVKGCHLFGAGKIENGLCICAAMPSKVVILRYNENLSKYCIRKEIETSEPCSCIHFTNYSILIGTNKFYEIDMKQYTLEEFLDKNDHSLAPAVFAASSNSFPVSIVQVNSAGQREEYLLCFHEFGVFVDSYGRRSRTDDLKWSRLPLAFAYREPYLFVTHFNSLEVIEIQARSSAGTPARAYLDIPNPRYLGPAISSGAIYLASSYQDKLRVICCKGNLVKESGTEHHRGPSTSRSSPNKRGPPTYNEHITKRVASSPAPPEGPSHPREPSTPHRYREGRTELRRDKSPGRPLEREKSPGRMLSTRRERSPGRLFEDSSRGRLPAGAVRTPLSQVNKVWDQSSV

SEQ ID NO: 1543 - protein, 395 aa, Homo sapiens
MCDQTFLVNVFGSCDKCFKQRALRPVFKKSQQLSYCSTCAEIMATEGLHENETLASLKSEAESLKGKLEEERAKLHDVELHQVAERVEALGQFVMKTRRTLKGHGNKVLCMDWCKDKRRIVSSSQDGKVIVWDSFTTNKEHAVTMPCTWVMACAYAPSGCAIACGGLDNKCSVYPLTFDKNENMAAKKKSVAMHTNYLSACSFTNSDMQILTASGDGTCALWDVESGQLLQSFHGHGADVLCLDLAPSETGNTFVSGGCDKKAMVWDMRSGQCVQAFETHESDINSVRYYPSGDAFASGSDDATCRLYDLRADREVAIYSKESIIFGASSVDFSLSGRLLFAGYNDYTINVWDVLKGSRVSILFGHENRVSTLRVSPDGTAFCSGSWDHTLRVWA

SEQ ID NO: 1544 - protein, 1742 aa, Homo sapiens
MAVAELYTQYNRVWIPDPEEVWKSAEIAKDYRVGDKVLRLLLEDGTELDYSVNPESLPPLRNPDILVGENDLTALSYLHEPAVLHNLRIRFAESKLIYTYSGIILVAMNPYKQLPIYGDAIIHAYSGQNMGDMDPHIFAVAEEAYKQMARNNRNQSIIVSGESGAGKTVSARYAMRYFATVSKSGSNAHVEDKVLASNPITEAVGNAKTTRNDNSSRFGKYTEISFDEQNQIIGANMSTYLLEKSRVVFQSENERNYHIFYQLCASAQQSEFKHLKLGSAEEFNYTRMGGNTVIEGVNDRAEMVETQKTFTLLGFKEDFQMDVFKILAAILHLGNVQITAVGNERSSVSEDDSHLKVFCELLGLESGRVAQWLCNRKIVTSSETVVKPMTRPQAVNARDALAKKIYAHLFDFIVERINQALQFSGKQHTFIGVLDIYGFETFDVNSFEQFCINYANEKLQQQFNMHVFKLEQEEYMKEDIPWTLIDFYDNQPVIDLIEAKMGILELLDEECLLPHGTDENWLQKLYNNFVNRNPLFEKPRMSNTSFVIQHFADKVEYKCEGFLEKNRDTVYDMLVEILRASKFHLCANFFQENPTPPSPFGSMITVKSAKQVIKPNSKHFRTTVGSKFRSSLYLLMETLNATTPHYVRCIKPNDEKLPFEFDSKRIVQQLRACGVLETIRISAQSYPSRWTYIEFYSRYGILMTKQELSFSDKKEVCKVVLHRLIQDSNQYQFGKTKIFFRAGQVAYLEKLRLDKLRQSCVMVQKHMRGWLQRKKFLRERRAALIIQQYFRGQQTVRKAITAVALKEAWAAIIIQKHCRGYLVRSLYQLIRMATITMQAYSRGFLARRRYRKMLEEHKAVILQKYARAWLARRRFQSIRRFVLNIQLTYRVQRLQKKLEDQNKENHGLVEKLTSLAALRAGDVEKIQKLEAELEKAATHRRNYEEKGKRYRDAVEEKLAKLQKHNSELETQKEQIQLKLQEKTEELKEKMDNLTKQLFDDVQKEERQRMLLEKSFELKTQDYEKQIQSLKEEIKALKDEKMQLQHLVEGEHVTSDGLKAEVARLSKQVKTISEFEKEIELLQAQKIDVEKHVQSQKREMREKMSEITKQLLESYDIEDVRSRLSVEDLEHLNEDGELWFAYEGLKKATRVLESHFQSQKDCYEKEIEALNFKVVHLSQEINHLQKLFREENDINESIRHEVTRLTSENMMIPDFKQQISELEKQKQDLEIRLNEQAEKMKGKLEELSNQLHRSQEEEGTQRKALEAQNEIHTKEKEKLIDKIQEMQEASDHLKKQFETESEVKCNFRQEASRLTLENRDLEEELDMKDRVIKKLQDQVKTLSKTIGKANDVHSSSGPKEYLGMLQYKREDEAKLIQNLILDLKPRGVVVNMIPGLPAHILFMCVRYADSLNDANMLKSLMNSTINGIKQVVKEHLEDFEMLSFWLSNTCHFLNCLKQYSGEEEFMKHNSPQQNKNCLNNFDLSEYRQILSDVAIRIYHQFIIIMEKNIQPIIVPGMLEYESLQGISGLKPTGFRKRSSSIDDTDGYTMTSVLQQLSYFYTTMCQNGLDPELVRQAVKQLFFLIGAVTLNSLFLRKDMCSCRKGMQIRCNISYLEEWLKDKNLQNSLAKETLEPLSQAAWLLQVKKTTDSDAKEIYERCTSLSAVQIIKILNSYTPIDDFEKRVTPSFVRKVQALLNSREDSSQLMLDTKYLFQVTFPFTPSPHALEMIQIPSSFKLGFLNRL

SEQ ID NO: 1545 - protein, 1137 aa, Homo sapiens
MSDIVEKTLTALPGLFLQNQPGGGPAAAKASFSSRLGSLVRGITALTSKHEEEKLIQQELSSLKATVSAPTTTLKMMKECMVRLIYCEMLGYDASFGYIHAIKLAQQGNLLEKRVGYLAVSLFLHESHELLLLLVNTVVKDLQSTNLVEVCMALTVVSQIFPCEMIPAVLPLIEDKLQHSKEIVRRKAVLALYKFHLIAPNQVQHIHIKFRKALCDRDVGVMAASLHIYLRMIKENSSGYKDLTGSFVTILKQVVGGKLPVEFNYHSVPAPWLQIQLLRILGLLGKDDQRTSELMYDVLDESLRRAELNHNVTYAILFECVHTVYSIYPKSELLEKAAKCIGKFVLSPKINLKYLGLKALTYVIQQDPTLALQHQMTIIECLDHPDPIIKRETLELLYRITNAQNITVIVQKMLEYLHQSKEEYVIVNLVGKIAELAEKYAPDNAWFIQTMNAVFSVGGDVMHPDIPNNFLRLLAEGFDDETEDQQLRLYAVQSYLTLLDMENVFYPQRFLQVMSWVLGEYSYLLDKETPEEVIAKLYKLLMNDSVSSETKAWLIAAVTKLTSQAHSSNTVERLIHEFTISLDTCMRQHAFELKHLHENVELMKSLLPVDRSCEDLVVDASLSFLDGFVAEGLSQGAAPYKPPHQRQEEKLSQEKVLNFEPYGLSFSSSGFTGRQSPAGISLGSDVSGNSAETGLKETNSLKLEGIKKLWGKEGYLPKKESKTGDESGALPVPQESIMENVDQAITKKDQSQVLTQSKEEKEKQLLASSLFVGLGSESTINLLGKADTVSHKFRRKSKVKEAKSGETTSTHNMTCSSFSSLSNVAYEDDYYSNTLHDTGDKELKKFSLTSELLDSESLTELPLVEKFSYCSLSTPSLFANNNMEIFHPPQSTAASVAKESSLASSFLEETTEYIHSNAMEVCNNETISVSSYKIWKDDCLLMVWSVTNKSGLELKSADLEIFPAENFKVTEQPGCCLPVMEAESTKSFQYSVQIEKPFTEGNLTGFISYHMMDTHSAQLEFSVNLSLLDFIRPLKISSDDFGKLWLSFANDVKQNVKMSESQAALPSALKTLQQKLRLHIIEIIGNEGLLACQLLPSIPCLLHCRVHADVLALWFRSSCSTLPDYLLYQCQKVMEGS

SEQ ID NO: 1546 - protein, 1076 aa, Homo sapiens
MKPDRDTLDEYFEYDAEEFLVSLALLITEGRTPECSVKGRTESFHCPPAQSCYPVTTKHECSDKLAQCRQARRTRSEVTLLWKNNLPIMVEMMLLPDCCYSDDGPTTEGIDLNDPAIKQDALLLERWILEPVPRQNGDRFIEEKTLLLAVRSFVFFSQLSAWLSVSHGAIPRNILYRISAADVDLQWNFSQTPIEHVFPVPNVSHNVALKVSVQSLPRQSNYPVLTCSIHTNIGLYEKRIQQHKLKTHQHHNPNEAEQCGTNSSQRLCSKQTWTMAPESVLHAKSGPSPEYTAAVKNIKLYPGTGSKSDHGTSQANILGFSGIGDIKSQETSVRTLKSFSMVDSSISNRQSFWQSAGETNPLIGSLIQERQEIIARIAQHLIHCDPSTSHVSGRPFNTQESSSLHSKLFRVSQENENVGKGKEAFSMTFGSPEFSSPEDTNEGKIRLKPETPRSETCISNDFYSHMPVGETNPLIGSLLQERQDVIARIAQHLEHIDPTASHIPRQSFNMHDSSSVASKVFRSSYEDKNLLKKNKDESSVSISHTKCSLLGDISDGKNLVPNKCFTSFKNNSKEKCSLKHQTRNQCQNNPSEIIQSTYQETQNKSSSLSTSSILSQHKENNLDLTSRFKEQEMSNGIDKQYSNCTTIDKQICTNKYKEKIINENYNPKFFGNLQSDDSKKNDSKIKVTVLEMSEYLNKYESMSSNKDSKRPKTCEQNTQLNSIENYLNKDNEGFKCKKSDQLKNEQDKQEDPTNEKSQNYSQRRSIKDCLSTCEQPKNTEVLRTTLKHSNVWRKHNFHSLDGTSTRAFHPQTGLPLLSSPVPQRKTQSGCFDLDSSLLHLKSFSSRSPRPCLNIEDDPDIHEKPFLSSSAPPITSLSLLGNFEESVLNYRFDPLGIVDGFTAEVGASGAFCPTHLTLPVEVSFYSVSDDNAPSPYMGVITLESLGKRGYRVPPSGTIQVTLFNPNKTVVKMFVVIYDLRDMPANHQTFLRQRTFSVPVKQEVKRSVNKENIRHTEERLLRYLIHLRFQSSKSGKIYLHRDVRLLFSRKSMEVDSGAAYELKSYTESPTNPQFSPRC

SEQ ID NO: 1547 - protein, 1056 aa, Homo sapiens
MDRAPTEQNVKLSAEVEPFIPQKKSPDTFMIPMALPNDNGSVSGVEPTPIPSYLITCYPFVQENQSNRQFPLYNNDIRWQQPNPNPTGPYFAYPIISAQPPVSTEYTYYQLMPAPCAQVMGFYHPFPTPYSNTFQAANTVNAITTECTERPSQLGQVFPLSSHRSRNSNRGSVVPKQQLLQQHIKSKRPLVKNVATQKETNAAGPDSRSKIVLLVDASQQTDFPSDIANKSLSETTATMLWKSKGRRRRASHPTAESSSEQGASEADIDSDSGYCSPKHSNNQPAAGALRNPDSGTMNHVESSMCAGGVNWSNVTCQATQKKPWMEKNQTFSRGGRQTEQRNNSQDEDGFQELNENGNAKDENIQQKLSSKVLDDLPENSPINIVQTPIPITTSVPKRAKSQKKKALAAALATAQEYSEISMEQKKLQEALSKAAGKKNKTPVQLDLGDMLAALEKQQQAMKARQITNTRPLSYTVVTAASFHTKDSTNRKPLTKSQPCLTSFNSVDIASSKAKKGKEKEIAKLKRPTALKKVILKEREEKKGRLTVDHNLLGSEEPTEMHLDFIDDLPQEIVSQEDTGLSMPSDTSLSPASQNSPYCMTPVSQGSPASSGIGSPMASSTITKIHSKRFREYCNQVLCKEIDECVTLLLQELVSFQERIYQKDPVRAKARRRLVMGLREVTKHMKLNKIKCVIISPNCEKIQSKGGLDEALYNVIAMAREQEIPFVFALGRKALGRCVNKLVPVSVVGIFNYFGAESLFNKLVELTEEARKAYKDMVAAMEQEQAEEALKNVKKVPHHMGHSRNPSAASAISFCSVISEPISEVNEKEYETNWRNMVETSDGLEASENEKEVSCKHSTSEKPSKLPFDTPPIGKQPSLVATGSTTSATSAGKSTASDKEEVKPDDLEWASQQSTETGSLDGSCRDLLNSSITSTTSTLVPGMLEEEEDEDEEEEEDYTHEPISVEVQLNSRIESWVSETQRTMETLQLGKTLNGSEEDNVEQSGEEEAEAPEVLEPGMDSEAWTADQQASPGQQKSSNCSSLNKEHSDSNYTTQTT

SEQ ID NO: 1548 - protein, 520 aa, Homo sapiens
MGPQRRLSPAGAALLWGFLLQLTAAQEAILHASGNGTTKDYCMLYNPYWTALPSTLENATSISLMNLTSTPLCNLSDIPPVGIKSKAVVVPWGSCHFLEKARIAQKGGAEAMLVVNNSVLFPPSGNRSEFPDVKILIAFISYKDFRDMNQTLGDNITVKMYSPSWPNFDYTMVVIFVIAVFTVALGGYWSGLVELENLKAVTTEDREMRKKKEEYLTFSPLTVVIFVVICCVMMVLLYFFYKWLVYVMIAIFCIASAMSLYNCLAALIHKIPYGQCTIACRGKNMEVRLIFLSGLCIAVAVVWAVFRNEDRWAWILQDILGIAFCLNLIKTLKLPNFKSCVILLGLLLLYDVFFVFITPFITKNGESIMVELAAGPFGNNEKLPVVIRVPKLIYFSVMSVCLMPVSILGFGDIIVPGLLIAYCRRFDVQTGSSYIYYVSSTVAYAIGMILTFVVLVLMKKGQPALLYLVPCTLITASVVAWRRKEMKKFWKGNSYQMMDHLDCATNEENPVISGEQIVQQ

SEQ ID NO: 1549 - protein, 617 aa, Homo sapiens
MRCLAARVNYKTLIIICALFTLVTVLLWNKCSSDKAIQFPRRSSSGFRVDGFEKRAAASESNNYMNHVAKQQSEEAFPQEQQKAPPVVGGFNSNVGSKVLGLKYEEIDCLINDEHTIKGRREGNEVFLPFTWVEKYFDVYGKVVQYDGYDRFEFSHSYSKVYAQRAPYHPDGVFMSFEGYNVEVRDRVKCISGVEGVPLSTQWGPQGYFYPIQIAQYGLSHYSKNLTEKPPHIEVYETAEDRDKNKPNDWTVPKGCFMANVADKSRFTNVKQFIAPETSEGVSLQLGNTKDFIISFDLKFLTNGSVSVVLETTEKNQLFTIHYVSNAQLIAFKERDIYYGIGPRTSWSTVTRDLVTDLRKGVGLSNTKAVKPTKIMPKKVVRLIAKGKGFLDNITISTTAHMAAFFAASDWLVRNQDEKGGWPIMVTRKLGEGFKSLEPGWYSAMAQGQAISTLVRAYLLTKDHIFLNSALRATAPYKFLSEQHGVKAVFMNKHDWYEEYPTTPSSFVLNGFMYSLIGLYDLKETAGEKLGKEARSLYERGMESLKAMLPLYDTGSGTIYDLRHFMLGIAPNLARWDYHTTHINQLQLLSTIDESPVFKEFVKRWKSYLKGSRAKHN

SEQ ID NO: 1550 - protein, 2443 aa, Homo sapiens
MAAEEGVASAASAGGSWGTAAMGRVLPMLLVPVPAEAMGQLGSRAQLRTQPEALGSLTAAGSLQVLSLTPGSRGGGRCCLEGPFWHFLWEDSRNSSTPTEKPKLLALGENYELLIYEFNLKDGRCDATILYSCSREALQKLIDDQDISISLLSLRILSFHNNTSLLFINKCVILHIIFPERDAAIRVLNCFTLPLPAQAVDMIIDTQLCRGILFVLSSLGWIYIFDVVDGTYVAHVDLALHKEDMCNEQQQEPAKISSFTSLKVSQDLDVAVIVSSSNSAVALNLNLYFRQHPGHLLCERILEDLPIQGPKGVDEDDPVNSAYNMKLAKFSFQIDRSWKAQLSSLNETIKNSKLEVSCCAPWFQDILHLESPESGNHSTSVQSWAFIPQDIMHGQYNVLQKDHAKTSDPGRSWKIMHISEQEEPIELKCVSVTGFTALFTWEVERMGYTITLWDLETQGMQCFSLGTKCIPVDSSGDQQLCFVLTENGLSLILFGLTQEEFLNRLMIHGSASTVDTLCHLNGWGRCSIPIHALEAGIENRQLDTVNFFLKSKENLFNPSSKSSVSDQFDHLSSHLYLRNVEELIPALDLLCSAIRESYSEPQSKHFSEQLLNLTLSFLNNQIKELFIHTEELDEHLQKGVNILTSYINELRTFMIKFPWKLTDAIDEYDVHENVPKVKESNIWKKLSFEEVIASAILNNKIPEAQTFFRIDSHSAQKLEELIGIGLNLVFDNLKKNNIKEASELLKNMGFDVKGQLLKICFYTTNKNIRDFLVEILKEKNYFSEKEKRTIDFVHQVEKLYLGHFQENMQIQSFPRYWIKEQDFFKHKSVLDSFLKYDCKDEFNKQDHRIVLNWALWWDQLTQESILLPRISPEEYKSYSPEALWRYLTARHDWLNIILWIGEFQTQHSYASLQQNKWPLLTVDVINQNTSCNNYMRNEILDKLARNGVFLASELEDFECFLLRLSRIGGVIQDTLPVQNYKTKEGWDFHSQFILYCLEHSLQHLLYVYLDCYKLSPENCPFLEKKELHEAHPWFEFLVQCRQVASNLTDPKLIFQASLANAQILIPTNQASVSSMLLEGHTLLALATTMYSPGGVSQVVQNEENENCLKKVDPQLLKMALTPYPKLKTALFPQCTPPSVLPSDITIYHLIQSLSPFDPSRLFGWQSANTLAIGDAWSHLPHFSSPDLVNKYAIVERLNFAYYLHNGRPSFAFGTFLVQELIKSKTPKQLIQQVGNEAYVIGLSSFHIPSIGAACVCFLELLGLDSLKLRVDMKVANIILSYKCRNEDAQYSFIRESVAEKLSKLADGEKTTTEELLVLLEEGTWNSIQQQEIKRLSSESSSQWALVVQFCRLHNMKLSISYLRECAKANDWLQFIIHSQLHNYHPAEVKSLIQYFSPVIQDHLRLAFENLPSVPTSKMDSDQVCNKCPQELQGSKQEMTDLFEILLQCSEEPDSWHWLLVEAVKQQAPILSVLASCLQGASAISCLCVWIITSVEDNVATEAMGHIQDSTEDHTWNLEDLSVIWRTLLTRQKSKTLIRGFQLFFKDSPLLLVMEMYELCMFFRNYKEAEAKLLEFQKSLETLNTAATKVHPVIPAMWLEDQVCFLLKLMLQQCKTQYELGKLLQLFVEREHLFSDGPDVKKLCILCQILKDTSIAINHTIITSYSIENLQHECRSILERLQTDGQFALARRVAELAELPVDNLVIKEITQEMQTLKHIEQWSLKQARIDFWKKCHENFKKNSISSKAASSFFSTQAHVACEHPTGWSSMEERHLLLTLAGHWLAQEDVVPLDKLEELEKQIWLCRITQHTLGRNQEETEPRFSRQISTSGELSFDSLASEFSFSKLAALNTSKYLELNSLPSKETCENRLDWKEQESLNFLIGRLLDDGCVHEASRVCRYFHFYNPDVALVLHCRALASGEASMEDLHPEIHALLQSAELLEEEAPDIPLRRVHSTSSLDSQKFVTVPSSNEVVTNLEVLTSKCLHGKNYCRQVLCLYDLAKELGCSYTDVAAQDGEAMLRKILASQQPDRCKRAQAFISTQGLKPDTVAELVAEEVTRELLTSSQGTGHKQMFNPTEESQTFLQLTTLCQDRTLVGMKLLDKISSVPHGELSCTTELLILAHHCFTLTCHMEGIIRVLQAAHMLTDNHLAPSEEYGLVVRLLTGIGRYNEMTYIFDLLHKKHYFEVLMRKKLDPSGTLKTALLDYIKRCRPGDSEKHNMIALCFSMCREIGENHEAAARIQLKLIESQPWEDSLKDGHQLKQLLLKALTLMLDAAESYAKDSCVRQAQHCQRLTKLITLQIHFLNTGQNTMLINLGRHKLMDCILALPRFYQASIVAEAYDFVPDWAEILYQQVILKGDFNYLEEFKQQRLLKSSIFEEISKKYKQHQPTDMVMENLKKLLTYCEDVYLYYKLAYEHKFYEIVNVLLKDPQTGCCLKDMLAG

SEQ ID NO: 1551 - protein, 258 aa, Homo sapiens
MAAAAAAAGDSDSWDADAFSVEDPVRKVGGGGTAGGDRWEGEDEDEDVKDNWDDDDDEKKEEAEVKPEVKISEKKKIAEKIKEKERQQKKRQEEIKKRLEEPEEPKVLTPEEQLADKLRLKKLQEESDLELAKETFGVNNAVYGIDAMNPSSRDDFTEFGKLLKDKITQYEKSLYYASFLEVLVRDVCISLEIDDLKKITNSLTVLCSEKQKQEKQSKAKKKKKGVVPGGGLKATMKDDLADYGGYDGGYVQDYEDFM

SEQ ID NO: 1552 - protein, 257 aa, Homo sapiens
MTAAVFFGCAFIAFGPALALYVFTIATEPLRIIFLIAGAFFWLVSLLISSLVWFMARVIIDNKDGPTQKYLLIFGAFVSVYIQEMFRFAYYKLLKKASEGLKSINPGETAPSMRLLAYVSGLGFGIMSGVFSFVNTLSDSLGPGTVGIHGDSPQFFLYSAFMTLVIILLHVFWGIVFFDGCEKKKWGILLIVLLTHLLVSAQTFISSYYGINLASAFIILVLMGTWAFLAAGGSCRSLKLCLLCQDKNFLLYNQRSR

SEQ ID NO: 1553 - protein, 315 aa, Homo sapiens
MAAGVPCALVTSCSSVFSGDQLVQHILGTEDLIVEVTSNDAVRFYPWTIDNKYYSADINLCVVPNKFLVTAEIAESVQAFVVYFDSTQKSGLDSVSSWLPLAKAWLPEVMILVCDRVSEDGINRQKAQEWCIKHGFELVELSPEELPEEDDDFPESTGVKRIVQALNANVWSNVVMKNDRNQGFSLLNSLTGTNHSIGSADPCHPEQPHLPAADSTESLSDHRGGASNTTDAQVDSIVDPMLDLDIQELASLTTGGGDVENFERLFSKLKEMKDKAATLPHEQRKVHAEKVAKAFWMAIGGDRDEIEGLSSDEEH

SEQ ID NO: 1554 - protein, 1184 aa, Homo sapiens
MVGTKAWVFSFLVLEVTSVLGRQTMLTQSVRRVQPGKKNPSIFAKPADTLESPGEWTTWFNIDYPGGKGDYERLDAIRFYYGDRVCARPLRLEARTTDWTPAGSTGQVVHGSPREGFWCLNREQRPGQNCSNYTVRFLCPPGSLRRDTERIWSPWSPWSKCSAACGQTGVQTRTRICLAEMVSLCSEASEEGQHCMGQDCTACDLTCPMGQVNADCDACMCQDFMLHGAVSLPGGAPASGAAIYLLTKTPKLLTQTDSDGRFRIPGLCPDGKSILKITKVKFAPIVLTMPKTSLKAATIKAEFVRAETPYMVMNPETKARRAGQSVSLCCKATGKPRPDKYFWYHNDTLLDPSLYKHESKLVLRKLQQHQAGEYFCKAQSDAGAVKSKVAQLIVIASDETPCNPVPESYLIRLPHDCFQNATNSFYYDVGRCPVKTCAGQQDNGIRCRDAVQNCCGISKTEEREIQCSGYTLPTKVAKECSCQRCTETRSIVRGRVSAADNGEPMRFGHVYMGNSRVSMTGYKGTFTLHVPQDTERLVLTFVDRLQKFVNTTKVLPFNKKGSAVFHEIKMLRRKKPITLEAMETNIIPLGEVVGEDPMAELEIPSRSFYRQNGEPYIGKVKASVTFLDPRNISTATAAQTDLNFINDEGDTFPLRTYGMFSVDFRDEVTSEPLNAGKVKVHLDSTQVKMPEHISTVKLWSLNPDTGLWEEEGDFKFENQRRNKREDRTFLVGNLEIRERRLFNLDVPESRRCFVKVRAYRSERFLPSEQIQGVVISVINLEPRTGFLSNPRAWGRFDSVITGPNGACVPAFCDDQSPDAYSAYVLASLAGEELQAVESSPKFNPNAIGVPQPYLNKLNYRRTDHEDPRVKKTAFQISMAKPRPNSAEESNGPIYAFENLRACEEAPPSAAHFRFYQIEGDRYDYNTVPFNEDDPMSWTEDYLAWWPKPMEFRACYIKVKIVGPLEVNVRSRNMGGTHRQTVGKLYGIRDVRSTRDRDQPNVSAACLEFKCSGMLYDQDRVDRTLVKVIPQGSCRRASVNPMLHEYLVNHLPLAVNNDTSEYTMLAPLDPLGHNYGIYTVTDQDPRTAKEIALGRCFDGTSDGSSRIMKSNVGVALTFNCVERQVGRQSAFQYLQSTPAQSPAAGTVQGRVPSRRQQRASRGGQRQGGVVASLRFPRVAQQPLIN

SEQ ID NO: 1555 - protein, 370 aa, Homo sapiens
MFQASMRSPNMEPFKQQKVEDFYDIGEELGSGQFAIVKKCREKSTGLEYAAKFIKKRQSRASRRGVSREEIEREVSILRQVLHHNVITLHDVYENRTDVVLILELVSGGELFDFLAQKESLSEEEATSFIKQILDGVNYLHTKKIAHFDLKPENIMLLDKNIPIPHIKLIDFGLAHEIEDGVEFKNIFGTPEFVAPEIVNYEPLGLEADMWSIGVITYILLSGASPFLGDTKQETLANITAVSYDFDEEFFSQTSELAKDFIRKLLVKETRKRLTIQEALRHPWITPVDNQQAMVRRESVVNLENFRKQYVRRRWKLSFSIVSLCNHLTRSLMKKVHLRPDEDLRNCESDTEEDIARRKALHPRRRSSTS

SEQ ID NO: 1556 - protein, 1099 aa, Homo sapiens
MGKLIRMGPQERWLLRTKRLHWSRLLFLLGMLIIGSTYQHLRRPRGLSSLWAAVSSHQPIKLASRDLSSEEMMMMSSSPSKPSSEMGGKMLVPQASVGSDEATLSMTVENIPSMPKRTAKMIPTTTKNNYSPTAAGTERRKEDTPTSSRTLTYYTSTSSRQIVKKYTPTPRGEMKSYSPTQVREKVKYTPSPRGRRVGTYVPSTFMTMETSHAITPRTTVKDSDITATYKILETNSLKRIMEETTPTTLKGMFDSTPTFLTHEVEANVLTSPRSVMEKNNLFPPRRVESNSSAHPWGLVGKSNPKTPQGTVLLHTPATSEGQVTISTMTGSSPAETKAFTAAWSLRNPSPRTSVSAIKTAPAIVWRLAKKPSTAPSTSTTPTVRAKLTMQVHHCVVVKPTPAMLTTPSPSLTTALLPEELSPSPSVLPPSLPDLHPKGEYPPDLFSVEERRQGWVVLHVFGMMYVFVALAIVCDEYFVPALGVITDKLQISEDVAGATFMAAGGSAPELFTSLIGVFISHSNVGIGTIVGSAVFNILFVIGTCSLFSREILNLTWWPLFRDVSFYILDLIMLILFFLDSLIAWWESLLLLLAYAFYVFTMKWNKHIEVWVKEQLSRRPVAKVMALEDLSKPGDGAIAVDELQDNKKLKLPSLLTRGSSSTSLHNSTIRSTIYQLMLHSLDPLREVRLAKEKEEESLNQGARAQPQAKAESKPEEEEPAKLPAVTVTPAPVPDIKGDQKENPGGQEDVAEAESTGEMPGEEGETAGEGETEEKSGGETQPEGEGETETQGKGEECEDENEAEGKGDNEGEDEGEIHAEDGEMKGNEGETESQELSAENHGEAKNDEKGVEDGGGSDGGDSEEEEEEEEEQEEEEEEEEQEEEEEEEEEEEEKGNEEPLSLDWPETRQKQAIYLFLLPIVFPLWLTVPDVRRQESRKFFVFTFLGSIMWIAMFSYLMVWWAHQVGETIGISEEIMGLTILAAGTSIPDLITSVIVARKGLGDMAVSSSVGSNIFDITVGLPVPWLLFSLINGLQPVPVSSNGLFCAIVLLFLMLLFVISSIASCKWRMNKILGFTMFLLYFVFLIISVMLEDRIISCPVSV

SEQ ID NO: 1557 - protein, 547 aa, Homo sapiens
MYRLMSAVTARAAAPGGLASSCGRRGVHQRAGLPPLGHGWVGGLGLGLGLALGVKLAGGLRGAAPAQSPAAPDPEASPLAEPPQEQSLAPWSPQTPAPPCSRCFARAIESSRDLLHRIKDEVGAPGIVVGVSVDGKEVWSEGLGYADVENRVPCKPETVMRIASISKSLTMVALAKLWEAGKLDLDIPVQHYVPEFPEKEYEGEKVSVTTRLLISHLSGIRHYEKDIKKVKEEKAYKALKMMKENVAFEQEKEGKSNEKNDFTKFKTEQENEAKCRNSKPGKKKNDFEQGELYLREKFENSIESLRLFKNDPLFFKPGSQFLYSTFGYTLLAAIVERASGCKYLDYMQKIFHDLDMLTTVQEENEPVIYNRARFYVYNKKKRLVNTPYVDNSYKWAGGGFLSTVGDLLKFGNAMLYGYQVGLFKNSNENLLPGYLKPETMVMMWTPVPNTEMSWDKEGKYAMAWGVVERKQTYGSCRKQRHYASHTGGAVGASSVLLVLPEELDTETINNKVPPRGIIVSIICNMQSVGLNSTALKIALEFDKDRSD

SEQ ID NO: 1558 - protein, 858 aa, Homo sapiens
MPPPGIPPPFPPMGLPPMSQRPPAIPPMPPGILPPMLPPMGAPPPLTQIPGMVPPMMPGMLMPAVPVTAATAPGADTASSAVAGTGPPRALWSEHVAPDGRIYYYNADDKQSVWEKPSVLKSKAELLLSQCPWKEYKSDTGKPYYYNNQSKESRWTRPKDLDDLEVLVKQEAAGKQQQQLPQTLQPQPPQPQPDPPPVPPGPTPVPTGLLEPEPGGSEDCDVLEATQPLEQGFLQQLEEGPSSSGQHQPQQEEEESKPEPERSGLSWSNREKAKQAFKELLRDKAVPSNASWEQAMKMVVTDPRYSALPKLSEKKQAFNAYKAQREKEEKEEARLRAKEAKQTLQHFLEQHERMTSTTRYRRAEQTFGELEVWAVVPERDRKEVYDDVLFFLAKKEKEQAKQLRRRNIQALKSILDGMSSVNFQTTWSQAQQYLMDNPSFAQDHQLQNMDKEDALICFEEHIRALEREEEEERERARLRERRQQRKNREAFQTFLDELHETGQLHSMSTWMELYPAVSTDVRFANMLGQPGSTPLDLFKFYVEELKARFHDEKKIIKDILKVNTAFEDFAHVISFDKRAAALDAGNIKLTFNSLLEKAEAREREREKEEARRMRRREAAFRSMLRQAVPALELGTAWEEVRERFVCDSAFEQITLESERIRLFREFLQVLEQTECQHLHTKGRKHGRKGKKHHHKRSHSPSGSESEEEELPPPSLRPPKRRRRNPSESGSEPSSSLDSVESGGAALGGRGSPSSHLLGADHGLRKAKKPKKKTKKRRHKSNSPESETDPEEKAGKESDEKEQEQDKDRELQQAELPNRSPGFGIKKEKTGWDTSESELSEGELERRRRTLLQQLDDHQ

SEQ ID NO: 1559 - protein, 726 aa, Homo sapiens
MEGERKNNNKRWYFTREQLENSPSRRFGVDPDKELSYRQQAANLLQDMGQRLNVSQLTINTAIVYMHRFYMIQSFTQFPGNSVAPAALFLAAKVEEQPKKLEHVIKVAHTCLHPQESLPDTRSEAYLQQVQDLVILESIILQTLGFELTIDHPHTHVVKCTQLVRASKDLAQTSYFMATNSLHLTTFSLQYTPPVVACVCIHLACKWSNWEIPVSTDGKHWWEYVDATVTLELLDELTHEFLQILEKTPNRLKRIWNWRACEAAKKTKADDRGTDEKTSEQTILNMISQSSSDTTIAGLMSMSTSTTSAVPSLPVSEESSSNLTSVEMLPGKRWLSSQPSFKLEPTQGHRTSENLALTGVDHSLPQDGSNAFISQKQNSKSVPSAKVSLKEYRAKHAEELAAQKRQLENMEANVKSQYAYAAQNLLSHHDSHSSVILKMPIEGSENPERPFLEKADKTALKMRIPVAGGDKAASSKPEEIKMRIKVHAAADKHNSVEDSVTKSREHKEKHKTHPSNHHHHHNHHSHKHSHSQLPVGTGNKRPGDPKHSSQTSNLAHKTYSLSSSFSSSSSTRKRGPSEETGGAVFDHPAKIAKSTKSSSLNFSFPSLPTMGQMPGHSSDTSGLSFSQPSCKTRVPHSKLDKGPTGANGHNTTQTIDYQDTVNMLHSLLSAQGVQPTQPTAFEFVRPYSDYLNPRSGGISSRSGNTDKPRPPPLPSEPPPPLPPLPK

SEQ ID NO: 1560 - protein, 1461 aa, Homo sapiens
MAAERGARRLLSTPSFWLYCLLLLGRRAPGAAAARSGSAPQSPGASIRTFTPFYFLVEPVDTLSVRGSSVILNCSAYSEPSPKIEWKKDGTFLNLVSDDRRQLLPDGSLFISNVVHSKHNKPDEGYYQCVATVESLGTIISRTAKLIVAGLPRFTSQPEPSSVYAGNNAILNCEVNADLVPFVRWEQNRQPLLLDDRVIKLPSGMLVISNATEGDGGLYRCVVESGGPPKYSDEVELKVLPDPEVISDLVFLKQPSPLVRVIGQDVVLPCVASGLPTPTIKWMKNEEALDTESSERLVLLAGGSLEISDVTEDDAGTYFCIADNGNETIEAQAELTVQAQPEFLKQPTNIYAHESMDIVFECEVTGKPTPTVKWVKNGDMVIPSDYFKIVKEHNLQVLGLVKSDEGFYQCIAENDVGNAQAGAQLIILEHAPATTGPLPSAPRDVVASLVSTRFIKLTWRTPASDPHGDNLTYSVFYTKEGIARERVENTSHPGEMQVTIQNLMPATVYIFRVMAQNKHGSGESSAPLRVETQPEVQLPGPAPNLRAYAASPTSITVTWETPVSGNGEIQNYKLYYMEKGTDKEQDVDVSSHSYTINGLKKYTEYSFRVVAYNKHGPGVSTPDVAVRTLSDVPSAAPQNLSLEVRNSKSIMIHWQPPAPATQNGQITGYKIRYRKASRKSDVTETLVSGTQLSQLIEGLDRGTEYNFRVAALTINGTGPATDWLSAETFESDLDETRVPEVPSSLHVRPLVTSIVVSWTPPENQNIVVRGYAIGYGIGSPHAQTIKVDYKQRYYTIENLDPSSHYVITLKAFNNVGEGIPLYESAVTRPHTDTSEVDLFVINAPYTPVPDPTPMMPPVGVQASILSHDTIRITWADNSLPKHQKITDSRYYTVRWKTNIPANTKYKNANATTLSYLVTGLKPNTLYEFSVMVTKGRRSSTWSMTAHGTTFELVPTSPPKDVTVVSKEGKPKTIIVNWQPPSEANGKITGYIIYYSTDVNAEIHDWVIEPVVGNRLTHQIQELTLDTPYYFKIQARNSKGMGPMSEAVQFRTPKADSSDKMPNDQASGSGGKGSRLPDLGSDYKPPMSGSNSPHGSPTSPLDSNMLLVIIVSVGVITIVVVVIIAVFCTRRTTSHQKKKRAACKSVNGSHKYKGNSKDVKPPDLWIHHERLELKPIDKSPDPNPIMTDTPIPRNSQDITPVDNSMDSNIHQRRNSYRGHESEDSMSTLAGRRGMRPKMMMPFDSQPPQPVISAHPIHSLDNPHHHFHSSSLASPARSHLYHPGSPWPIGTSMSLSDRANSTESVRNTPSTDTMPASSSQTCCTDHQDPEGATSSSYLASSQEEDSGQSLPTAHVRPSHPLKSFAVPAIPPPGPPTYDPALPSTPLLSQQALNHHIHSVKTASIGTLGRSRPPMPVVVPSAPEVQETTRMLEDSESSYEPDELTKEMAHLEGLMKDLNAITTA

SEQ ID NO: 1561 - protein, 1203 aa, Homo sapiens
MDKLPPSMRKRLYSLPQQVGAKAWIMDEEEDAEEEGAGGRQDPSRRSIRLRPLPSPSPSAAAGGTESRSSALGAADSEGPARGAGKSSTNGDCRRFRGSLASLGSRGGGSGGTGSGSSHGHLHDSAEERRLIAEGDASPGEDRTPPGLAAEPERPGASAQPAASPPPPQQPPQPASASCEQPSVDTAIKVEGGAAAGDQILPEAEVRLGQAGFMQRQFGAMLQPGVNKFSLRMFGSQKAVEREQERVKSAGFWIIHPYSDFRFYWDLTMLLLMVGNLIIIPVGITFFKDENTTPWIVFNVVSDTFFLIDLVLNFRTGIVVEDNTEIILDPQRIKMKYLKSWFMVDFISSIPVDYIFLIVETRIDSEVYKTARALRIVRFTKILSLLRLLRLSRLIRYIHQWEEIFHMTYDLASAVVRIVNLIGMMLLLCHWDGCLQFLVPMLQDFPDDCWVSINNMVNNSWGKQYSYALFKAMSHMLCIGYGRQAPVGMSDVWLTMLSMIVGATCYAMFIGHATALIQSLDSSRRQYQEKYKQVEQYMSFHKLPPDTRQRIHDYYEHRYQGKMFDEESILGELSEPLREEIINFNCRKLVASMPLFANADPNFVTSMLTKLRFEVFQPGDYIIREGTIGKKMYFIQHGVVSVLTKGNKETKLADGSYFGEICLLTRGRRTASVRADTYCRLYSLSVDNFNEVLEEYPMMRRAFETVALDRLDRIGKKNSILLHKVQHDLNSGVFNYQENEIIQQIVQHDREMAHCAHRVQAAASATPTPTPVIWTPLIQAPLQAAAATTSVAIALTHHPRLPAAIFRPPPGSGLGNLGAGQTPRHLKRLQSLIPSALGSASPASSPSQVDTPSSSSFHIQQLAGFSAPAGLSPLLPSSSSSPPPGACGSPSAPTPSAGVAATTIAGFGHFHKALGGSLSSSDSPLLTPLQPGARSPQAAQPSPAPPGARGGLGLPEHFLPPPPSSRSPSSSPGQLGQPPGELSLGLATGPLSTPETPPRQPEPPSLVAGASGGASPVGFTPRGGLSPPGHSPGPPRTFPSAPPRASGSHGSLLLPPASSPPPPQVPQRRGTPPLTPGRLTQDLKLISASQPALPQDGAQTLRRASPHSSGESMAAFPLFPRAGGGSGGSGSSGGLGPPGRPYGAIPGQHVTLPRKTSSGSLPPPLSLFGARATSSGGPPLTAGPQREPGARPEPVRSKLPSNL

SEQ ID NO: 1562 - protein, 574 aa, Homo sapiens
MALARGSRQLGALVWGACLCVLVHGQQAQPGQGSDPARWRQLIQWENNGQVYSLLNSGSEYVPAGPQRSESSSRVLLAGAPQAQQRRSHGSPRRRQAPSLPLPGRVGSDTVRGQARHPFGFGQVPDNWREVAVGDSTGMARARTSVSQQRHGGSASSVSASAFASTYRQQPSYPQQFPYPQAPFVSQYENYDPASRTYDQGFVYYRPAGGGVGAGAAAVASAGVIYPYQPRARYEEYGGGEELPEYPPQGFYPAPERPYVPPPPPPPDGLDRRYSHSLYSEGTPGFEQAYPDPGPEAAQAHGGDPRLGWYPPYANPPPEAYGPPRALEPPYLPVRSSDTPPPGGERNGAQQGRLSVGSVYRPNQNGRGLPDLVPDPNYVQASTYVQRAHLYSLRCAAEEKCLASTAYAPEATDYDVRVLLRFPQRVKNQGTADFLPNRPRHTWEWHSCHQHYHSMDEFSHYDLLDAATGKKVAEGHKASFCLEDSTCDFGNLKRYACTSHTQGLSPGCYDTYNADIDCQWIDITDVQPGNYILKVHVNPKYIVLESDFTNNVVRCNIHYTGRYVSATNCKIVQS

SEQ ID NO: 1563 - protein, 1363 aa, Homo sapiens
MQRGAALCLRLWLCLGLLDGLVSGYSMTPPTLNITEESHVIDTGDSLSISCRGQHPLEWAWPGAQEAPATGDKDSEDTGVVRDCEGTDARPYCKVLLLHEVHANDTGSYVCYYKYIKARIEGTTAASSYVFVRDFEQPFINKPDTLLVNRKDAMWVPCLVSIPGLNVTLRSQSSVLWPDGQEVVWDDRRGMLVSTPLLHDALYLQCETTWGDQDFLSNPFLVHITGNELYDIQLLPRKSLELLVGEKLVLNCTVWAEFNSGVTFDWDYPGKQAERGKWVPERRSQQTHTELSSILTIHNVSQHDLGSYVCKANNGIQRFRESTEVIVHENPFISVEWLKGPILEATAGDELVKLPVKLAAYPPPEFQWYKDGKALSGRHSPHALVLKEVTEASTGTYTLALWNSAAGLRRNISLELVVNVPPQIHEKEASSPSIYSRHSRQALTCTAYGVPLPLSIQWHWRPWTPCKMFAQRSLRRRQQQDLMPQCRDWRAVTTQDAVNPIESLDTWTEFVEGKNKTVSKLVIQNANVSAMYKCVVSNKVGQDERLIYFYVTTIPDGFTIESKPSEELLEGQPVLLSCQADSYKYEHLRWYRLNLSTLHDAHGNPLLLDCKNVHLFATPLAASLEEVAPGARHATLSLSIPRVAPEHEGHYVCEVQDRRSHDKHCHKKYLSVQALEAPRLTQNLTDLLVNVSDSLEMQCLVAGAHAPSIVWYKDERLLEEKSGVDLADSNQKLSIQRVREEDAGRYLCSVCNAKGCVNSSASVAVEGSEDKGSMEIVILVGTGVIAVFFWVLLLLIFCNMRRPAHADIKTGYLSIIMDPGEVPLEEQCEYLSYDASQWEFPRERLHLGRVLGYGAFGKVVEASAFGIHKGSSCDTVAVKMLKEGATASEHRALMSELKILIHIGNHLNVVNLLGACTKPQGPLMVIVEFCKYGNLSNFLRAKRDAFSPCAEKSPEQRGRFRAMVELARLDRRRPGSSDRVLFARFSKTEGGARRASPDQEAEDLWLSPLTMEDLVCYSFQVARGMEFLASRKCIHRDLAARNILLSESDVVKICDFGLARDIYKDPDYVRKGSARLPLKWMAPESIFDKVYTTQSDVWSFGVLLWEIFSLGASPYPGVQINEEFCQRLRDGTRMRAPELATPAIRRIMLNCWSGDPKARPAFSELVEILGDLLQGRGLQEEEEVCMAPRSSQSSEEGSFSQVSTMALHIAQADAEDSPPSLQRHSLAARYYNWVSFPGCLARGAETRGSSRMKTFEEFPMTPTTYKGSVDNQTDSGMVLASEEFEQIESRHRQESGFSCKGPGQNVAVTRAHPDSQGRRRRPERGARGGQVFYNSEYGELSEPSEEDHCSPSARVTFFTDNSY

SEQ ID NO: 1564 - protein, 1310 aa, Homo sapiens
MAQLWLSCFLLPALVVSVAANVAPKFLANMTSVILPEDLPVGAQAFWLVAEDQDNDPLTYGMSGPNAYFFAVTPKTGEVKLASALDYETLYTFKVTISVSDPYIQVQREMLVIVEDRNDNAPVFQNTAFSTSINETLPVGSVVFSVLAVDKDMGSAGMVVYSIEKVIPSTGDSEHLFRILANGSIVLNGSLSYNNKSAFYQLELKACDLGGMYHNTFTIQCSLPVFLSISVVDQPDLDPQFVREFYSASVAEDAAKGTSVLTVEAVDGDKGINDPVIYSISYSTRPGWFDIGADGVIRVNGSLDREQLLEADEEVQLQVTATETHLNIYGQEAKVSIWVTVRVMDVNDHKPEFYNCSLPACTFTPEEAQVNFTGYVDEHASPRIPIDDLTMVVYDPDKGSNGTFLLSLGGPDAEAFSVSPERAVGSASVQVLVRVSALVDYERQTAMAVQVVATDSVSQNFSVAMVTIHLRDINDHRPTFPQSLYVLTVPEHSATGSVVTDSIHATDPDTGAWGQITYSLLPGNGADLFQVDPVSGTVTVRNGELLDRESQAVYYLTLQATDGGNLSSSTTLQIHLLDINDNAPVVSGSYNIFVQEEEGNVSVTIQAHDNDEPGTNNSRLLFNLLPGPYSHNFSLDPDTGLLRNLGPLDREAIDPALEGRIVLTVLVSDCGEPVLGTKVNVTITVEDINDNLPIFNQSSYNFTVKEEDPGVLVGVVKAWDADQTEANNRISFSLSGSGANYFMIRGLVLGAGWAEGYLRLPPDVSLDYETQPVFNLTVSAENPDPQGGETIVDVCVNVKDVNDNPPTLDVASLRGIRVAENGSQHGQVAVVVASDVDTSAQLEIQLVNILCTKAGVDVGSLCWGWFSVAANGSVYINQSKAIDYEACDLVTLVVRACDLATDPGFQAYSNNGSLLITIEDVNDNAPYFLPENKTFVIIPELVLPNREVASVRARDDDSGNNGVILFSILRVDFISKDGATIPFQGVFSIFTSSEADVFAGSIQPVTSLDSTLQGTYQVTVQARDRPSLGPFLEATTTLNLFTVDQSYRSRLQFSTPKEEVGANRQAINAALTQATRTTVYIVDIQDIDSAARARPHSYLDAYFVFPNGSALTLDELSVMIRNDQDSLTQLLQLGLVVLGSQESQESDLSKQLISVIIGLGVALLLVLVIMTMAFVCVRKSYNRKLQAMKAAKEARKTAAGVMPSAPAIPGTNMYNTERANPMLNLPNKDLGLEYLSPSNDLDSVSVNSLDDNSVDVDKNSQEIKEHRPPHTPPEPDPEPLSVVLLGRQAGASGQLEGPSYTNAGLDTTDL

SEQ ID NO: 1565 - protein, 843 aa, Homo sapiens
MSFPPHLNRPPMGIPALPPGIPPPQFPGFPPPVPPGTPMIPVPMSIMAPAPTVLVPTVSMVGKHLGARKDHPGLKAKENDENCGPTTTVFVGNISEKASDMLIRQLLAKCGLVLSWKRVQGASGKLQAFGFCEYKEPESTLRALRLLHDLQIGEKKLLVKVDAKTKAQLDEWKAKKKASNGNARPETVTNDDEEALDEETKRRDQMIKGAIEVLIREYSSELNAPSQESDSHPRKKKKEKKEDIFRRFPVAPLIPYPLITKEDINAIEMEEDKRDLISREISKFRDTHKKLEEEKGKKEKERQEIEKERRERERERERERERREREREREREREREKEKERERERERDRDRDRTKERDRDRDRERDRDRDRERSSDRNKDRSRSREKSRDREREREREREREREREREREREREREREREREREREKDKKRDREEDEEDAYERRKLERKLREKEAAYQERLKNWEIRERKKTREYEKEAEREEERRREMAKEAKRLKEFLEDYDDDRDDPKYYRGSALQKRLRDREKEMEADERDRKREKEELEEIRQRLLAEGHPDPDAELQRMEQEAERRRQPQIKQEPESEEEEEEKQEKEEKREEPMEEEEEPEQKPCLKPTLRPISSAPSVSSASGNATPNTPGDESPCGIIIPHENSPDQQQPEEHRPKIGLSLKLGASNSPGQPNSVKRKKLPVDSVFNKFEDEDSDDVPRKRKLVPLDYGEDDKNATKGTVNTEEKRKHIKSLIEKIPTAKPELFAYPLDWSIVDSILMERRIRPWINKKIIEYIGEEEATLVDFVCSKVMAHSSPQSILDDVAMVLDEEAEVFIVKMWRLLIYETEAKKIGLVK

SEQ ID NO: 1566 - protein, 1821 aa, Homo sapiens
MRPRTKARSPGRALRNPWRGFLPLTLALFVGAGHAQRDPVGRYEPAGGDANRLRRPGGSYPAAAAAKVYSLFREQDAPVAGLQPVERAQPGWGSPRRPTEAEARRPSRAQQSRRVQPPAQTRRSTPLGQQQPAPRTRAAPALPRLGTPQRSGAAPPTPPRGRLTGRNVCGGQCCPGWTTANSTNHCIKPVCEPPCQNRGSCSRPQLCVCRSGFRGARCEEVIPDEEFDPQNSRLAPRRWAERSPNLRRSSAAGEGTLARAQPPAPQSPPAPQSPPAGTLSGLSQTHPSQQHVGLSRTVRLHPTATASSQLSSNALPPGPGLEQRDGTQQAVPLEHPSSPWGLNLTEKIKKIKIVFTPTICKQTCARGHCANSCERGDTTTLYSQGGHGHDPKSGFRIYFCQIPCLNGGRCIGRDECWCPANSTGKFCHLPIPQPDREPPGRGSRPRALLEAPLKQSTFTLPLSNQLASVNPSLVKVHIHHPPEASVQIHQVAQVRGGVEEALVENSVETRPPPWLPASPGHSLWDSNNIPARSGEPPRPLPPAAPRPRGLLGRCYLNTVNGQCANPLLELTTQEDCCGSVGAFWGVTLCAPCPPRPASPVIENGQLECPQGYKRLNLTHCQDINECLTLGLCKDAECVNTRGSYLCTCRPGLMLDPSRSRCVSDKAISMLQGLCYRSLGPGTCTLPLAQRITKQICCCSRVGKAWGSECEKCPLPGTEAFREICPAGHGYTYASSDIRLSMRKAEEEELARPPREQGQRSSGALPGPAERQPLRVVTDTWLEAGTIPDKGDSQAGQVTTSVTHAPAWVTGNATTPPMPEQGIAEIQEEQVTPSTDVLVTLSTPGIDRCAAGATNVCGPGTCVNLPDGYRCVCSPGYQLHPSQAYCTDDNECLRDPCKGKGRCINRVGSYSCFCYPGYTLATSGATQECQDINECEQPGVCSGGQCTNTEGSYHCECDQGYIMVRKGHCQDINECRHPGTCPDGRCVNSPGSYTCLACEEGYRGQSGSCVDVNECLTPGVCAHGKCTNLEGSFRCSCEQGYEVTSDEKGCQDVDECASRASCPTGLCLNTEGSFACSACENGYWVNEDGTACEDLDECAFPGVCPSGVCTNTAGSFSCKDCDGGYRPSPLGDSCEDVDECEDPQSSCLGGECKNTVGSYQCLCPQGFQLANGTVCEDVNECMGEEHCAPHGECLNSHGSFFCLCAPGFVSAEGGTSCQDVDECATTDPCVGGHCVNTEGSFNCLCETGFQPSPESGECVDIDECEDYGDPVCGTWKCENSPGSYRCVLGCQPGFHMAPNGDCIDIDECANDTMCGSHGFCDNTDGSFRCLCDQGFEISPSGWDCVDVNECELMLAVCGAALCENVEGSFLCLCASDLEEYDAQEGHCRPRGAGGQSMSEAPTGDHAPAPTRMDCYSGQKGHAPCSSVLGRNTTQAECCCTQGASWGDACDLCPSEDSAEFSEICPSGKGYIPVEGAWTFGQTMYTDADECVIFGPGLCPNGRCLNTVPGYVCLCNPGFHYDASHKKCEDHDECQDLACENGECVNTEGSFHCFCSPPLTLDLSQQRCMNSTSSTEDLPDHDIHMDICWKKVTNDVCSEPLRGHRTTYTECCCQDGEAWSQQCALCPPRSSEVYAQLCNVARIEAEREAGVHFRPGYEYGPGPDDLHYSIYGPDGAPFYNYLGPEDTVPEPAFPNTAGHSADRTPILESPLQPSELQPHYVASHPEPPAGFEGLQAEECGILNGCENGRCVRVREGYTCDCFEGFQLDAAHMACVDVNECDDLNGPAVLCVHGYCENTEGSYRCHCSPGYVAEAGPPHCTAKE

SEQ ID NO: 1567 - protein, 444 aa, Homo sapiens
MKVVPSLLLSVLLAQVWLVPGLAPSPQSPETPAPQNQTSRVVQAPKEEEEDEQEASEEKASEEEKAWLMASRQQLAKETSNFGFSLLRKISMRHDGNMVFSPFGMSLAMTGLMLGATGPTETQIKRGLHLQALKPTKPGLLPSLFKGLRETLSRNLELGLTQGSFAFIHKDFDVKETFFNLSKRYFDTECVPMNFRNASQAKRLMNHYINKETRGKIPKLFDEINPETKLILVDYILFKGKWLTPFDPVFTEVDTFHLDKYKTIKVPMMYGAGKFASTFDKNFRCHVLKLPYQGNATMLVVLMEKMGDHLALEDYLTTDLVETWLRNMKTRNMEVFFPKFKLDQKYEMHELLRQMGIRRIFSPFADLSELSATGRNLQVSRVLQRTVIEVDERGTEAVAGILSEITAYSMPPVIKVDRPFHFMIYEETSGMLLFLGRVVNPTLL

SEQ ID NO: 1568 - protein, 1321 aa, Homo sapiens
MELEDGVVYQEEPGGSGAVMSERVSGLAGSIYREFERLIGRYDEEVVKELMPLVVAVLENLDSVFAQDQEHQVELELLRDDNEQLITQYEREKALRKHAEEKFIEFEDSQEQEKKDLQTRVESLESQTRQLELKAKNYADQISRLEEREAELKKEYNALHQRHTEMIHNYMEHLERTKLHQLSGSDQLESTAHSRIRKERPISLGIFPLPAGDGLLTPDAQKGGETPGSEQWKFQELSQPRSHTSLKVSNSPEPQKAVEQEDELSDVSQGGSKATTPASTANSDVATIPTDTPLKEENEGFVKVTDAPNKSEISKHIEVQVAQETRNVSTGSAENEEKSEVQAIIESTPELDMDKDLSGYKGSSTPTKGIENKAFDRNTESLFEELSSAGSGLIGDVDEGADLLGMGREVENLILENTQLLETKNALNIVKNDLIAKVDELTCEKDVLQGELEAVKQAKLKLEEKNRELEEELRKARAEAEDARQKAKDDDDSDIPTAQRKRFTRVEMARVLMERNQYKERLMELQEAVRWTEMIRASRENPAMQEKKRSSIWQFFSRLFSSSSNTTKKPEPPVNLKYNAPTSHVTPSVKKRSSTLSQLPGDKSKAFDFLSEETEASLASRREQKREQYRQVKAHVQKEDGRVQAFGWSLPQKYKQVTNGQGENKMKNLPVPVYLRPLDEKDTSMKLWCAVGVNLSGGKTRDGGSVVGASVFYKDVAGLDTEGSKQRSASQSSLDKLDQELKEQQKELKNQEELSSLVWICTSTHSATKVLIIDAVQPGNILDSFTVCNSHVLCIASVPGARETDYPAGEDLSESGQVDKASLCGSMTSNSSAETDSLLGGITVVGCSAEGVTGAATSPSTNGASPVMDKPPEMEAENSEVDENVPTAEEATEATEGNAGSAEDTVDISQTGVYTEHVFTDPLGVQIPEDLSPVYQSSNDSDAYKDQISVLPNEQDLVREEAQKMSSLLPTMWLGAQNGCLYVHSSVAQWRKCLHSIKLKDSILSIVHVKGIVLVALADGTLAIFHRGVDGQWDLSNYHLLDLGRPHHSIRCMTVVHDKVWCGYRNKIYVVQPKAMKIEKSFDAHPRKESQVRQLAWVGDGVWVSIRLDSTLRLYHAHTYQHLQDVDIEPYVSKMLGTGKLGFSFVRITALMVSCNRLWVGTGNGVIISIPLTETNKTSGVPGNRPGSVIRVYGDENSDKVTPGTFIPYCSMAHAQLCFHGHRDAVKFFVAVPGQVISPQSSSSGTDLTGDKAGPSAQEPGSQTPLKSMLVISGGEGYIDFRMGDEGGESELLGEDLPLEPSVTKAERSHLIVWQVMYGNE

SEQ ID NO: 1569 - protein, 387 aa, Homo sapiens
MAETLFWTPLLVVLLAGLGDTEAQQTTLHPLVGRVFVHTLDHETFLSLPEHVAVPPAVHITYHAHLQGHPDLPRWLRYTQRSPHHPGFLYGSATPEDRGLQVIEVTAYNRDSFDTTRQRLVLEIGDPEGPLLPYQAEFLVRSHDAEEVLPSTPASRFLSALGGLWEPGELQLLNVTSALDRGGRVPLPIEGRKEGVYIKVGSASPFSTCLKMVASPDSHARCAQGQPPLLSCYDTLAPHFRVDWCNVTLVDKSVPEPADEVPTPGDGILEHDPFFCPPTEAPDRDFLVDALVTLLVPLLVALLLTLLLAYVMCCRREGRLKRDLATSDIQMVHHCTIHGNTEELRQMAASREVPRPLSTLPMFNVHTGERLPPRVDSAQVPLILDQH

SEQ ID NO: 1570 - protein, 900 aa, Homo sapiens
MRLFVSDGVPGCLPVLAAAGRARGRAEVLISTVGPEDCVVPFLTRPKVPVLQLDSGNYLFSTSAICRYFFLLSGWEQDDLTNQWLEWEATELQPALSAALYYLVVQGKKGEDVLGSVRRALTHIDHSLSRQNCPFLAGETESLADIVLWGALYPLLQDPAYLPEELSALHSWFQTLSTQEPCQRAAETVLKQQGVLALRPYLQKQPQPSPAEGRAVTNEPEEEELATLSEEEIAMAVTAWEKGLESLPPLRPQQNPVLPVAGERNVLITSALPYVNNVPHLGNIIGCVLSADVFARYSRLRQWNTLYLCGTDEYGTATETKALEEGLTPQEICDKYHIIHADIYRWFNISFDIFGRTTTPQQTKITQDIFQQLLKRGFVLQDTVEQLRCEHCARFLADRFVEGVCPFCGYEEARGDQCDKCGKLINAVELKKPQCKVCRSCPVVQSSQHLFLDLPKLEKRLEEWLGRTLPGSDWTPNAQFITRSWLRDGLKPRCITRDLKWGTPVPLEGFEDKVFYVWFDATIGYLSITANYTDQWERWWKNPEQVDLYQFMAKDNVPFHSLVFPCSALGAEDNYTLVSHLIATEYLNYEDGKFSKSRGVGVFGDMAQDTGIPADIWRFYLLYIRPEGQDSAFSWTDLLLKNNSELLNNLGNFINRAGMFVSKFFGGYVPEMVLTPDDQRLLAHVTLELQHYHQLLEKVRIRDALRSILTISRHGNQYIQVNEPWKRIKGSEADRQRAGTVTGLAVNIAALLSVMLQPYMPTVSATIQAQLQLPPPACSILLTNFLCTLPAGHQIGTVSPLFQKLENDQIESLRQRFGGGQAKTSPKPAVVETVTTAKPQQIQALMDEVTKQGNIVRELKAQKADKNEVAAEVAKLLDLKKQLAVAEGKPPEAPKGKKKK

SEQ ID NO: 1571 - protein, 529 aa, Homo sapiens
MLGFVGRVAAAPASGALRRLTPSASLPPAQLLLRAAPTAVHPVRDYAAQTSPSPKAGAATGRIVAVIGAVVDVQFDEGLPPILNALEVQGRETRLVLEVAQHLGESTVRTIAMDGTEGLVRGQKVLDSGAPIKIPVGPETLGRIMNVIGEPIDERGPIKTKQFAPIHAEAPEFMEMSVEQEILVTGIKVVDLLAPYAKGGKIGLFGGAGVGKTVLIMELINNVAKAHGGYSVFAGVGERTREGNDLYHEMIESGVINLKDATSKVALVYGQMNEPPGARARVALTGLTVAEYFRDQEGQDVLLFIDNIFRFTQAGSEVSALLGRIPSAVGYQPTLATDMGTMQERITTTKKGSITSVQAIYVPADDLTDPAPATTFAHLDATTVLSRAIAELGIYPAVDPLDSTSRIMDPNIVGSEHYDVARGVQKILQDYKSLQDIIAILGMDELSEEDKLTVSRARKIQRFLSQPFQVAEVFTGHMGKLVPLKETIKGFQQILAGEYDHLPEQAFYMVGPIEEAVAKADKLAEEHSS

SEQ ID NO: 1572 - protein, 407 aa, Homo sapiens
MLLSVTSRPGISTFGYNRNNKKPYVSLAQQMAPPSPSNSTPNSSSGSNGNDQLSKTNLYIRGLQPGTTDQDLVKLCQPYGKIVSTKAILDKTTNKCKGYGFVDFDSPSAAQKAVTALKASGVQAQMAKQQEQDPTNLYISNLPLSMDEQELEGMLKPFGQVISTRILRDTSGTSRGVGFARMESTEKCEAIITHFNGKYIKTPPGVPAPSDPLLCKFADGGPKKRQNQGKFVQNGRAWPRNADMGVMALTYDPTTALQNGFYPAPYNITPNRMLAQSALSPYLSSPVSSYQRVTQTSPLQVPNPSWMHHHSYLMQPSGSVLTPGMDHPISLQPASMMGPLTQQLGHLSLSSTGTYMPTAAAMQGAYISQYTPVPSSSVSVEESSGQQNQVAVDAPSEHGVYSFQFNK

SEQ ID NO: 1573 - protein, 887 aa, Homo sapiens
MGEAEKFHYIYSCDLDINVQLKIGSLEGKREQKSYKAVLEDPMLKFSGLYQETCSDLYVTCQVFAEGKPLALPVRTSYKAFSTRWNWNEWLKLPVKYPDLPRNAQVALTIWDVYGPGKAVPVGGTTVSLFGKYGMFRQGMHDLKVWPNVEADGSEPTKTPGRTSSTLSEDQMSRLAKLTKAHRQGHMVKVDWLDRLTFREIEMINESEKRSSNFMYLMVEFRCVKCDDKEYGIVYYEKDGDESSPILTSFELVKVPDPQMSMENLVESKHHKLARSLRSGPSDHDLKPNAATRDQLNIIVSYPPTKQLTYEEQDLVWKFRYYLTNQEKALTKFLKCVNWDLPQEAKQALELLGKWKPMDVEDSLELLSSHYTNPTVRRYAVARLRQADDEDLLMYLLQLVQALKYENFDDIKNGLEPTKKDSQSSVSENVSNSGINSAEIDSSQIITSPLPSVSSPPPASKTKEVPDGENLEQDLCTFLISRACKNSTLANYLYWYVIVECEDQDTQQRDPKTHEMYLNVMRRFSQALLKGDKSVRVMRSLLAAQQTFVDRLVHLMKAVQRESGNRKKKNERLQALLGDNEKMNLSDVELIPLPLEPQVKIRGIIPETATLFKSALMPAQLFFKTEDGGKYPVIFKHGDDLRQDQLILQIISLMDKLLRKENLDLKLTPYKVLATSTKHGFMQFIQSVPVAEVLDTEGSIQNFFRKYAPSENGPNGISAEVMDTYVKSCAGYCVITYILGVGDRHLDNLLLTKTGKLFHIDFGYILGRDPKPLPPPMKLNKEMVEGMGGTQSEQYQEFRKQCYTAFLHLRRYSNLILNLFSLMVDANIPDIALEPDKTVKKVQDKFRLDLSDEEAVHYMQSLIDESVHALFAAVVEQIHKFAQYWRK

SEQ ID NO: 1574 - protein, 2039 aa, Homo sapiens
MDIVDTFNHLIPTEHLDDALFLGSNLENEVCEDFSASQNVLEDSLKNMLSDKDPMLGSASNQFCLPVLDSNDPNFQMPCSTVVGLDDIMDEGVVKESGNDTIDEEELILPNRNLRDKVEENSVRSPRKSPRLMAQEQVRSLRQSTIAKRSNAAPLSNTKKASGKTVSTAKAGVKQPERSQVKEEVCMSLKPEYHKENRRCSRNSGQIEVVPEVSVSSSHSSVSSCLEMKDEDGLDSKHKCNNPGEIDVPSHELNCSLLSETCVTIGEKKNEALMECKAKPVGSPLFKFSDKEEHEQNDSISGKTGETVVEEMIATRKVEQDSKETVKLSHEDDHILEDAGSSDISSDAACTNPNKTENSLVGLPSCVDEVTECNLELKDTMGIADKTENTLERNKIEPLGYCEDAESNRQLESTEFNKSNLEVVDTSTFGPESNILENAICDVPDQNSKQLNAIESTKIESHETANLQDDRNSQSSSVSYLESKSVKSKHTKPVIHSKQNMTTDAPKKIVAAKYEVIHSKTKVNVKSVKRNTDVPESQQNFHRPVKVRKKQIDKEPKIQSCNSGVKSVKNQAHSVLKKTLQDQTLVQIFKPLTHSLSDKSHAHPGCLKEPHHPAQTGHVSHSSQKQCHKPQQQAPAMKTNSHVKEELEHPGVEHFKEEDKLKLKKPEKNLQPRQRRSSKSFSLDEPPLFIPDNIATIRREGSDHSSSFESKYMWTPSKQCGFCKKPHGNRFMVGCGRCDDWFHGDCVGLSLSQAQQMGEEDKEYVCVKCCAEEDKKTEILDPDTLENQATVEFHSGDKTMECEKLGLSKHTTNDRTKYIDDTVKHKVKILKRESGEGRNSSDCRDNEIKKWQLAPLRKMGQPVLPRRSSEEKSEKIPKESTTVTCTGEKASKPGTHEKQEMKKKKVEKGVLNVHPAASASKPSADQIRQSVRHSLKDILMKRLTDSNLKVPEEKAAKVATKIEKELFSFFRDTDAKYKNKYRSLMFNLKDPKNNILFKKVLKGEVTPDHLIRMSPEELASKELAAWRRRENRHTIEMIEKEQREVERRPITKITHKGEIEIESDAPMKEQEAAMEIQEPAANKSLEKPEGSEKQKEEVDSMSKDTTSQHRQHLFDLNCKICIGRMAPPVDDLSPKKVKVVVGVARKHSDNEAESIADALSSTSNILASEFFEEEKQESPKSTFSPAPRPEMPGTVEVESTFLARLNFIWKGFINMPSVAKFVTKAYPVSGSPEYLTEDLPDSIQVGGRISPQTVWDYVEKIKASGTKEICVVRFTPVTEEDQISYTLLFAYFSSRKRYGVAANNMKQVKDMYLIPLGATDKIPHPLVPFDGPGLELHRPNLLLGLIIRQKLKRQHSACASTSHIAETPESAPPIALPPDKKSKIEVSTEEAPEEENDFFNSFTTVLHKQRNKPQQNLQEDLPTAVEPLMEVTKQEPPKPLRFLPGVLIGWENQPTTLELANKPLPVDDILQSLLGTTGQVYDQAQSVMEQNTVKEIPFLNEQTNSKIEKTDNVEVTDGENKEIKVKVDNISESTDKSAEIETSVVGSSSISAGSLTSLSLRGKPPDVSTEAFLTNLSIQSKQEETVESKEKTLKRQLQEDQENNLQDNQTSNSSPCRSNVGKGNIDGNVSCSENLVANTARSPQFINLKRDPRQAAGRSQPVTTSESKDGDSCRNGEKHMLPGLSHNKEHLTEQINVEEKLCSAEKNSCVQQSDNLKVAQNSPSVENIQTSQAEQAKPLQEDILMQNIETVHPFRRGSAVATSHFEVGNTCPSEFPSKSITFTSRSTSPRTSTNFSPMRPQQPNLQHLKSSPPGFPFPGPPNFPPQSMFGFPPHLPPPLLPPPGFGFAQNPMVPWPPVVHLPGQPQRMMGPLSQASRYIGPQNFYQVKDIRRPERRHSDPWGRQDQQQLDRPFNRGKGDRQRFYSDSHHLKRERHEKEWEQESERHRRRDRSQDKDRDRKSREEGHKDKERARLSHGDRGTDGKASRDSRNVDKKPDKPKSEDYEKDKEREKSKHREGEKDRDRYHKDRDHTDRTKSKR

SEQ ID NO: 1575 - protein, 360 aa, Homo sapiens
MALSRVCWARSAVWGSAVTPGHFVTRRLQLGRSGLAWGAPRSSKLHLSPKADVKNLMSYVVTKTKAINGKYHRFLGRHFPRFYVLYTIFMKGLQMLWADAKKARRIKTNMWKHNIKFHQLPYREMEHLRQFRQDVTKCLFLGIISIPPFANYLVFLLMYLFPRQLLIRHFWTPKQQTDFLDIYHAFRKQSHPEIISYLEKVIPLISDAGLRWRLTDLCTKIQRGTHPAIHDILALRECFSNHPLGMNQLQALHVKALSRAMLLTSYLPPPLLRHRLKTHTTVIHQLDKALAKLGIGQLTAQEVKSACYLRGLNSTHIGEDRCRTWLGEWLQISCSLKEAELSLLLHNVVLLSTNYLGTRR

SEQ ID NO: 1576 - protein, 1475 aa, Homo sapiens
MASGAGGVGGGGGGKIRTRRCHQGPIKPYQQGRQQHQGILSRVTESVKNIVPGWLQRYFNKNEDVCSCSTDTSEVPRWPENKEDHLVYADEESSNITDGRITPEPAVSNTEEPSTTSTASNYPDVLTRPSLHRSHLNFSMLESPALHCQPSTSSAFPIGSSGFSLVKEIKDSTSQHDDDNISTTSGFSSRASDKDITVSKNTSLPPLWSPEAERSHSLSQHTATSSKKPAFNLSAFGTLSPSLGNSSILKTSQLGDSPFYPGKTTYGGAAAAVRQSKLRNTPYQAPVRRQMKAKQLSAQSYGVTSSTARRILQSLEKMSSPLADAKRIPSIVSSPLNSPLDRSGIDITDFQAKREKVDSQYPPVQRLMTPKPVSIATNRSVYFKPSLTPSGEFRKTNQRIDNKCSTGYEKNMTPGQNREQRESGFSYPNFSLPAANGLSSGVGGGGGKMRRERTRFVASKPLEEEEMEVPVLPKISLPITSSSLPTFNFSSPEITTSSPSPINSSQALTNKVQMTSPSSTGSPMFKFSSPIVKSTEANVLPPSSIGFTFSVPVAKTAELSGSSSTLEPIISSSAHHVTTVNSTNCKKTPPEDCEGPFRPAEILKEGSVLDILKSPGFASPKIDSVAAQPTATSPVVYTRPAISSFSSSGIGFGESLKAGSSWQCDTCLLQNKVTDNKCIACQAAKLSPRDTAKQTGIETPNKSGKTTLSASGTGFGDKFKPVIGTWDCDTCLVQNKPEAIKCVACETPKPGTCVKRALTLTVVSESAETMTASSSSCTVTTGTLGFGDKFKRPIGSWECSVCCVSNNAEDNKCVSCMSEKPGSSVPASSSSTVPVSLPSGGSLGLEKFKKPEGSWDCELCLVQNKADSTKCLACESAKPGTKSGFKGFDTSSSSSNSAASSSFKFGVSSSSSGPSQTLTSTGNFKFGDQGGFKIGVSSDSGSINPMSEGFKFSKPIGDFKFGVSSESKPEEVKKDSKNDNFKFGLSSGLSNPVSLTPFQFGVSNLGQEEKKEELPKSSSAGFSFGTGVINSTPAPANTIVTSENKSSFNLGTIETKSASVAPFTCKTSEAKKEEMPATKGGFSFGNVEPASLPSASVFVLGRTEEKQQEPVTSTSLVFGKKADNEEPKCQPVFSFGNSEQTKDENSSKSTFSFSMTKPSEKESEQPAKATFAFGAQTSTTADQGAAKPVFSFLNNSSSSSSTPATSAGGGIFGSSTSSSNPPVATFVFGQSSNPVSSSAFGNTAESSTSQSLLFSQDSKLATTSSTGTAVTPFVFGPGASSNNTTTSGFGFGATTTSSSAGSSFVFGTGPSAPSASPAFGANQTPTFGQSQGASQPNPPGFGSISSSTALFPTGSQPAPPTFGTVSSSSQPPVFGQQPSQSAFGSGTTPNSSSAFQFGSSTTNFNFTNNSPSGVFTFGANSSTPAASAQPSGSGGFPFNQSPAAFTVGSNGKNVFSSSGTSFSGRKIKTAVRRRK

SEQ ID NO: 1577 - protein, 388 aa, Homo sapiens
MEQWDHFHNQQEDTDSCSESVKFDARSMTALLPPNPKNSPSLQEKLKSFKAALIALYLLVFAVLIPLIGIVAAQLLKWETKNCSVSSTNANDITQSLTGKGNDSEEEMRFQEVFMEHMSNMEKRIQHILDMEANLMDTEHFQNFSMTTDQRFNDILLQLSTLFSSVQGHGNAIDEISKSLISLNTTLLDLQLNIENLNGKIQENTFKQQEEISKLEERVYNVSAEIMAMKEEQVHLEQEIKGEVKVLNNITNDLRLKDWEHSQTLRNITLIQGPPGPPGEKGDRGPTGESGPRGFPGPIGPPGLKGDRGAIGFPGSRGLPGYAGRPGNSGPKGQKGEKGSGNTLSTGPIWLNEVFCFGRESSIEECKIRQWGTRACSHSEDAGVTCTL

SEQ ID NO: 1578 - protein, 451 aa, Homo sapiens
MEQWDHFHNQQEDTDSCSESVKFDARSMTALLPPNPKNSPSLQEKLKSFKAALIALYLLVFAVLIPLIGIVAAQLLKWETKNCSVSSTNANDITQSLTGKGNDSEEEMRFQEVFMEHMSNMEKRIQHILDMEANLMDTEHFQNFSMTTDQRFNDILLQLSTLFSSVQGHGNAIDEISKSLISLNTTLLDLQLNIENLNGKIQENTFKQQEEISKLEERVYNVSAEIMAMKEEQVHLEQEIKGEVKVLNNITNDLRLKDWEHSQTLRNITLIQGPPGPPGEKGDRGPTGESGPRGFPGPIGPPGLKGDRGAIGFPGSRGLPGYAGRPGNSGPKGQKGEKGSGNTLTPFTKVRLVGGSGPHEGRVEILHSGQWGTICDDRWEVRVGQVVCRSLGYPGVQAVHKAAHFGQGTGPIWLNEVFCFGRESSIEECKIRQWGTRACSHSEDAGVTCTL

SEQ ID NO: 1579 - protein, 1270 aa, Homo sapiens
MTDDNSDDKIEDELQTFFTSDKDGNTHAYNPKSPPTQNSSASSVNWNSANPDDMVVDYETDPAVVTGENISLSLQGVEVFGHEKSSSDFISKQVLDMHKDSICQCPALVGTEKPKYLQHSCHSLEAVEGQSVEPSLPFVWKPNDNLNCAGYCDALELNQTFDMTVDKVNCTFISHHAIGKSQSFHTAGSLPPTGRRSGSTSSLSYSTWTSSHSDKTHARETTYDRESFENPQVTPSEAQDMTYTAFSDVVMQSEVFVSDIGNQCACSSGKVTSEYTDGSQQRLVGEKETQALTPVSDGMEVPNDSALQEFFCLSHDESNSEPHSQSSYRHKEMGQNLRETVSYCLIDDECPLMVPAFDKSEAQVLNPEHKVTETEDTQMVSKGKDLGTQNHTSELILSSPPGQKVGSSFGLTWDANDMVISTDKTMCMSTPVLEPTKVTFSVSPIEATEKCKKVEKGNRGLKNIPDSKEAPVNLCKPSLGKSTIKTNTPIGCKVRKTEIISYPRPNFKNVKAKVMSRAVLQPKDAALSKVTPRPQQTSASSPSSVNSRQQTVLSRTPRSDLNADKKAEILINKTHKQQFNKLITSQAVHVTTHSKNASHRVPRTTSAVKSNQEDVDKASSSNSACETGSVSALFQKIKGILPVKMESAECLEMTYVPNIDRISPEKKGEKENGTSMEKQELKQEIMNETFEYGSLFLGSASKTTTTSGRNISKPDSCGLRQIAAPKAKVGPPVSCLRRNSDNRNPSADRAVSPQRIRRVSSSGKPTSLKTAQSSWVNLPRPLPKSKASLKSPALRRTGSTPSIASTHSELSTYSNNSGNAAVIKYEEKPPKPAFQNGSSGSFYLKPLVSRAHVHLMKTPPKGPSRKNLFTALNAVEKSRQKNPRSLCIQPQTAPDALPPEKTLELTQYKTKCENQSGFILQLKQLLACGNTKFEALTVVIQHLLSEREEALKQHKTLSQELVNLRGELVTASTTCEKLEKARNELQTVYEAFVQQHQAEKTERENRLKEFYTREYEKLRDTYIEEAEKYKMQLQEQFDNLNAAHETSKLEIEASHSEKLELLKKAYEASLSEIKKGHEIEKKSLEDLLSEKQESLEKQINDLKSENDALNEKLKSEEQKRRAREKANLKNPQIMYLEQELESLKAVLEIKNEKLHQQDIKLMKMEKLVDNNTALVDKLKRFQQENEELKARMDKHMAISRQLSTEQAVLQESLEKESKVNKRLSMENEELLWKLHNGDLCSPKRSPTSSAIPLQSPRNSGSFPSPSISPR

SEQ ID NO: 1580 - protein, 1465 aa, Homo sapiens
MSLVTVPFYQKRHRHFDQSYRNIQTRYLLDEYASKKRASTQASSQKSLSQRSSSQRASSQTSLGGTICRVCAKRVSTQEDEEQENRSRYQSLVAAYGEAKRQRFLSELAHLEEDVHLARSQARDKLDKYAIQQMMEDKLAWERHTFEERISRAPEILVRLRSHTVWERMSVKLCFTVQGFPTPVVQWYKDGSLICQAAEPGKYRIESNYGVHTLEINRADFDDTATYSAVATNAHGQVSTNAAVVVRRFRGDEEPFRSVGLPIGLPLSSMIPYTHFDVQFLEKFGVTFRREGETVTLKCTMLVTPDLKRVQPRAEWYRDDVLLKESKWTKMFFGEGQASLSFSHLHKDDEGLYTLRIVSRGGVSDHSAFLFVRDADPLVTGAPGAPMDLQCHDANRDYVIVTWKPPNTTTESPVMGYFVDRCEVGTNNWVQCNDAPVKICKYPVTGLFEGRSYIFRVRAVNSAGISRPSRVSDAVAALDPLDLRRLQAVHLEGEKEIAIYQDDLEGDAQVPGPPTGVHASEISRNYVVLSWEPPTPRGKDPLMYFIEKSVVGSGSWQRVNAQTAVRSPRYAVFDLMEGKSYVFRVLSANRHGLSEPSEITSPIQAQDVTVVPSAPGRVLASRNTKTSVVVQWDRPKHEEDLLGYYVDCCVAGTNLWEPCNHKPIGYNRFVVHGLTTGEQYIFRVKAVNAVGMSENSQESDVIKVQAALTVPSHPYGITLLNCDGHSMTLGWKVPKFSGGSPILGYYLDKREVHHKNWHEVNSSPSKPTILTVDGLTEGSLYEFKIAAVNLAGIGEPSDPSEHFKCEAWTMPEPGPAYDLTFCEVRDTSLVMLWKAPVYSGSSPVSGYFVDFREEDAGEWITVNQTTTASRYLKVSDLQQGKTYVFRVRAVNANGVGKPSDTSEPVLVEARPGTKEISAGVDEQGNIYLGFDCQEMTDASQFTWCKSYEEISDDERFKIETVGDHSKLYLKNPDKEDLGTYSVSVSDTDGVSSSFVLDPEELERLMALSNEIKNPTIPLKSELAYEIFDKGRVRFWLQAEHLSPDASYRFIINDREVSDSEIHRIKCDKATGIIEMVMDRFSIENEGTYTVQIHDGKAKSQSSLVLIGDAFKTVLEEAEFQRKEFLRKQGPHFAEYLHWDVTEECEVRLVCKVANTKKETVFKWLKDDVLYETETLPNLERGICELLIPKLSKKDHGEYKATLKDDRGQDVSILEIAGKVYDDMILAMSRVCGKSASPLKVLCTPEGIRLQCFMKYFTDEMKVNWCHKDAKISSSEHMRIGGSEEMAWLQICEPTEKDKGKYTFEIFDGKDNHQRSLDLSGQAFDEAFAEFQQFKAAAFAEKNRGRLIGGLPDVVTIMEGKTLNLTCTVFGNPDPEVIWFKNDQDIQLSEHFSVKVEQAKYVSMTIKGVTSEDSGKYSINIKNKYGGEKIDVTVSVYKHGEKIPDMAPPQQAKPKLIPASASAAGQ

SEQ ID NO: 1581 - protein, 2062 aa, Homo sapiens
MPKSGFTKPIQSENSDSDSNMVEKPYGRKSKDKIASYSKTPKIERSDVSKEMKEKSSMKRKLPFTISPSRNEERDSDTDSDPGHTSENWGERLISSYRTYSEKEGPEKKKTKKEAGNKKSTPVSILFGYPLSERKQMALLMQMTARDNSPDSTPNHPSQTTPAQKKTPSSSSRQKDKVNKRNERGETPLHMAAIRGDVKQVKELISLGANVNVKDFAGWTPLHEACNVGYYDVAKILIAAGADVNTQGLDDDTPLHDSASSGHRDIVKLLLRHGGNPFQANKHGERPVDVAETEELELLLKREVPLSDDDESYTDSEEAQSVNPSSVDENIDSETEKDSLICESKQILPSKTPLPSALDEYEFKDDDDEEINKMIDDRHILRKEQRKENEPEAEKTHLFAKQEKAFYPKSFKSKKQKPSRVLYSSTESSDEEALQNKKISTSCSVIPETSNSDMQTKKEYVVSGEHKQKGKVKRKLKNQNKNKENQELKQEKEGKENTRITNLTVNTGLDCSEKTREEGNFRKSFSPKDDTSLHLFHISTGKSPKHSCGLSEKQSTPLKQEHTKTCLSPGSSEMSLQPDLVRYDNTESEFLPESSSVKSCKHKEKSKHQKDFHLEFGEKSNAKIKDEDHSPTFENSDCTLKKMDKEGKTLKKHKLKHKEREKEKHKKEIEGEKEKYKTKDSAKELQRSVEFDREFWKENFFKSDETEDLFLNMEHESLTLEKKSKLEKNIKDDKSTKEKHVSKERNFKEERDKIKKESEKSFREEKIKDLKEERENIPTDKDSEFTSLGMSAIEESIGLHLVEKEIDIEKQEKHIKESKEKPEKRSQIKEKDIEKMERKTFEKEKKIKHEHKSEKDKLDLSECVDKIKEKDKLYSHHTEKCHKEGEKSKNTAAIKKTDDREKSREKMDRKHDKEKPEKERHLAESKEKHLMEKKNKQSDNSEYSKSEKGKNKEKDRELDKKEKSRDKESINITNSKHIQEEKKSSIVDGNKAQHEKPLSLKEKTKDEPLKTPDGKEKDKKDKDIDRYKERDKHKDKIQINSLLKLKSEADKPKPKSSPASKDTRPKEKRLVNDDLMQTSFERMLSLKDLEIEQWHKKHKEKIKQKEKERLRNRNCLELKIKDKEKTKHTPTESKNKELTRSKSSEVTDAYTKEKQPKDAVSNRSQSVDTKNVMTLGKSSFVSDNSLNRSPRSENEKPGLSSRSVSMISVASSEDSCHTTVTTPRPPVEYDSDFMLESSESQMSFSQSPFLSIAKSPALHERELDSLADLPERIKPPYANRLSTSHLRSSSVEDVKLIISEGRPTIEVRRCSMPSVICEHTKQFQTISEESNQGSLLTVPGDTSPSPKPEVFSNVPERDLSNVSNIHSSFATSPTGASNSKYVSADRNLIKNTAPVNTVMDSPVHLEPSSQVGVIQNKSWEMPVDRLETLSTRDFICPNSNIPDQESSLQSFCNSENKVLKENADFLSLRQTELPGNSCAQDPASFMPPQQPCSFPSQSLSDAESISKHMSLSYVANQEPGILQQKNAVQIISSALDTDNESTKDTENTFVLGDVQKTDAFVPVYSDSTIQEASPNFEKAYTLPVLPSEKDFNGSDASTQLNTHYAFSKLTYKSSSGHEVENSTTDTQVISHEKENKLESLVLTHLSRCDSDLCEMNAGMPKGNLNEQDPKHCPESEKCLLSIEDEESQQSILSSLENHSQQSTQPEMHKYGQLVKVELEENAEDDKTENQIPQRMTRNKANTMANQSKQILASCTLLSEKDSESSSPRGRIRLTEDDDPQIHHPRKRKVSRVPQPVQVSPSLLQAKEKTQQSLAAIVDSLKLDEIQPYSSERANPYFEYLHIRKKIEEKRKLLCSVIPQAPQYYDEYVTFNGSYLLDGNPLSKICIPTITPPPSLSDPLKELFRQQEVVRMKLRLQHSIEREKLIVSNEQEVLRVHYRAARTLANQTLPFSACTVLLDAEVYNVPLDSQSDDSKTSVRDRFNARQFMSWLQDVDDKFDKLKTCLLMRQQHEAAALNAVQRLEWQLKLQELDPATYKSISIYEIQEFYVPLVDVNDDFELTPI

SEQ ID NO: 1582 - protein, 659 aa, Homo sapiens
MSLPPEKASELKQLIHQQLSKMDVHGRIREILAETIREELAPDQQHLSTEDLIKALRRRGIIDDVMKELNFVTDSVEQELPSSPKQPICFDRQSTLKKTNIDPTRRYLYLQVLGGKAFLEHLQEPEPLPGQVCSTFTLCLHYRNQRFRSKPVPCACEPDFHDGFLLEVHRESLGDGTRMADSTTMLSISDPIHMVLIKTDIFGETTLVASYFLEWRSVLGSENGVTSLTVELMGVGTESKVSVGILNIKLEMYPPLNQTLSQEVVNTQLALERQKTAEKERLFLVYAKQWWREYLQIRPSHNSRLVKIFAQDENGINRPVCSYVKPLRAGRLLDTPRQAARFVNVLGYERAPVIGGGGKQEQWCTLLAFLCRNKGDCEDHANLLCSLLLGYGLEAFVCVGTKAKGVPHAWVMTCGTDGAITFWESLTGHRYIHKPTNPDEPPVAEQPKPLYPYRTIGCVFNHQMFLGNCQPSDAVETCVFDLNDESKWKPMSEEAIKSVCAPGATTSLPPFPPLCASTIDASVTSNEIEMQLRLLVSEHRKDLGLTTVWEDQLSYLLSPALASYEFERTTSISAGNEEFQDAIRRAVPDGHTFKGFPIHFVYRNARRAFATCLRSPFCEEIICCRGDQVRLAVRVRVFTYPESACAVWIMFACKYRSVL

SEQ ID NO: 1583 - protein, 1139 aa, Homo sapiens
MPSGGDQSPPPPPPPPAAAASDEEEEDDGEAEDAAPPAESPTPQIQQRFDELCSRLNMDEAARAEAWDSYRSMSESYTLEGNDLHWLACALYVACRKSVPTVSKGTVEGNYVSLTRILKCSEQSLIEFFNKMKKWEDMANLPPHFRERTERLERNFTVSAVIFKKYEPIFQDIFKYPQEEQPRQQRGRKQRRQPCTVSEIFHFCWVLFIYAKGNFPMISDDLVNSYHLLLCALDLVYGNALQCSNRKELVNPNFKGLSEDFHAKDSKPSSDPPCIIEKLCSLHDGLVLEAKGIKEHFWKPYIRKLYEKKLLKGKEENLTGFLEPGNFGESFKAINKAYEEYVLSVGNLDERIFLGEDAEEEIGTLSRCLNAGSGTETAERVQMKNILQQHFDKSKALRISTPLTGVRYIKENSPCVTPVSTATHSLSRLHTMLTGLRNAPSEKLEQILRTCSRDPTQAIANRLKEMFEIYSQHFQPDEDFSNCAKEIASKHFRFAEMLYYKVLESVIEQEQKRLGDMDLSGILEQDAFHRSLLACCLEVVTFSYKPPGNFPFITEIFDVPLYHFYKVIEVFIRAEDGLCREVVKHLNQIEEQILDHLAWKPESPLWEKIRDNENRVPTCEEVMPPQNLERADEICIAGSPLTPRRVTEVRADTGGLGRSITSPTTLYDRYSSPPASTTRRRLFVENDSPSDGGTPGRMPPQPLVNAVPVQNVSGETVSVTPVPGQTLVTMATATVTANNGQTVTIPVQGIANENGGITFFPVQVNVGGQAQAVTGSIQPLSAQALAGSLSSQQVTGTTLQVPGQVAIQQISPGGQQQKQGQSVTSSSNRPRKTSSLSLFFRKVYHLAAVRLRDLCAKLDISDELRKKIWTCFEFSIIQCPELMMDRHLDQLLMCAIYVMAKVTKEDKSFQNIMRCYRTQPQARSQVYRSVLIKGKRKRRNSGSSDSRSHQNSPTELNKDRTSRDSSPVMRSSSTLPVPQPSSAPPTPTRLTGANSDMEEEERGDLIQFYNNIYIKQIKTFAMKYSQANMDAPPLSPYPFVRTGSPRRIQLSQNHPVYISPHKNETMLSPREKIFYYFSNSPSKRLREINSMIRTGETPTKKRGILLEDGSESPAKRICPENHSALLRRLQDVANDRGSH

SEQ ID NO: 1584 - protein, 544 aa, Homo sapiens
MSRCAQAAEVAATVPGAGVGNVGLRPPMVPRQASFFPPPVPNPFVQQTQIGSARRVQIVLLGIILLPIRVLLVALILLLAWPFAAISTVCCPEKLTHPITGWRRKITQTALKFLGRAMFFSMGFIVAVKGKIASPLEAPVFVAAPHSTFFDGIACVVAGLPSMVSRNENAQVPLIGRLLRAVQPVLVSRVDPDSRKNTINEIIKRTTSGGEWPQILVFPEGTCTNRSCLITFKPGAFIPGVPVQPVLLRYPNKLDTVTWTWQGYTFIQLCMLTFCQLFTKVEVEFMPVQVPNDEEKNDPVLFANKVRNLMAEALGIPVTDHTYEDCRLMISAGQLTLPMEAGLVEFTKISRKLKLDWDGVRKHLDEYASIASSSKGGRIGIEEFAKYLKLPVSDVLRQLFALFDRNHDGSIDFREYVIGLAVLCNPSNTEEIIQVAFKLFDVDEDGYITEEEFSTILQASLGVPDLDVSGLFKEIAQGDSISYEEFKSFALKHPEYAKIFTTYLDLQTCHVFSLPKEVQTTPSTASNKVSPEKHEESTSDKKDD

SEQ ID NO: 1585 - protein, 1235 aa, Homo sapiens
MSGPTDETAGDLPVKDTGLNLFGMGGLQETSTTRTMKSRQAVSRVSREELEDRFLRLHDENILLKQHARKQEDKIKRMATKLIRLVNDKKRYERVGGGPKRLGRDVEMEEMIEQLQEKVHELEKQNETLKNRLISAKQQLQTQGYRQTPYNNVQSRINTGRRKANENAGLQECPRKGIKFQDADVAETPHPMFTKYGNSLLEEARGEIRNLENVIQSQRGQIEELEHLAEILKTQLRRKENEIELSLLQLREQQATDQRSNIRDNVEMIKLHKQLVEKSNALSAMEGKFIQLQEKQRTLRISHDALMANGDELNMQLKEQRLKCCSLEKQLHSMKFSERRIEELQDRINDLEKERELLKENYDKLYDSAFSAAHEEQWKLKEQQLKVQIAQLETALKSDLTDKTEILDRLKTERDQNEKLVQENRELQLQYLEQKQQLDELKKRIKLYNQENDINADELSEALLLIKAQKEQKNGDLSFLVKVDSEINKDLERSMRELQATHAETVQELEKTRNMLIMQHKINKDYQMEVEAVTRKMENLQQDYELKVEQYVHLLDIRAARIHKLEAQLKDIAYGTKQYKFKPEIMPDDSVDEFDETIHLERGENLFEIHINKVTFSSEVLQASGDKEPVTFCTYAFYDFELQTTPVVRGLHPEYNFTSQYLVHVNDLFLQYIQKNTITLEVHQAYSTEYETIAACQLKFHEILEKSGRIFCTASLIGTKGDIPNFGTVEYWFRLRVPMDQAIRLYRERAKALGYITSNFKGPEHMQSLSQQAPKTAQLSSTDSTDGNLNELHITIRCCNHLQSRASHLQPHPYVVYKFFDFADHDTAIIPSSNDPQFDDHMYFPVPMNMDLDRYLKSESLSFYVFDDSDTQENIYIGKVNVPLISLAHDRCISGIFELTDHQKHPAGTIHVILKWKFAYLPPSGSITTEDLGNFIRSEEPEVVQRLPPASSVSTLVLAPRPKPRQRLTPVDKKVSFVDIMPHQSDVSQEGSVDEVKENTEKMQQGKDDVSLLSEGQLAEQSLASSEDETEITEDLEPEVEEDMSASDSDDCIIPGPISKNIKQPSEKIRIEIIALSLNDSQVTMDDTIQRLFVECRFYSLPAEETPVSLPKPKSGQWVYYNYSNVIYVDKENNKAKRDILKAILQKQEMPNRSLRFTVVSDPPEDEQDLECEDIGVAHVDLADMFQEGRDLIEQNIDVFDARADGEGIGKLRVTVEALHALQSVYKQYRDDLEA

SEQ ID NO: 1586 - protein, 974 aa, Homo sapiens
MAARWSSENVVVEFRDSQATAMSVDCLGQHAVLSGRRFLYIVNLDAPFEGHRKISRQSKWDIGAVQWNPHDSFAHYFAASSNQRVDLYKWKDGSGEVGTTLQGHTRVISDLDWAVFEPDLLVTSSVDTYIYIWDIKDTRKPTVALSAVAGASQVKWNKKNANCLATSHDGDVRIWDKRKPSTAVEYLAAHLSKIHGLDWHPDSEHILATSSQDNSVKFWDYRQPRKYLNILPCQVPVWKARYTPFSNGLVTVMVPQLRRENSLLLWNVFDLNTPVHTFVGHDDVVLEFQWRKQKEGSKDYQLVTWSRDQTLRMWRVDSQMQRLCANDILDGVDEFIESISLLPEPEKTLHTEDTDHQHTASHGEEEALKEDPPRNLLEERKSDQLGLPQTLQQEFSLINVQIRNVNVEMDAADRSCTVSVHCSNHRVKMLVKFPAQYPNNAAPSFQFINPTTITSTMKAKLLKILKDTALQKVKRGQSCLEPCLRQLVSCLESFVNQEDSASSNPFALPNSVTPPLPTFARVTTAYGSYQDANIPFPRTSGARFCGAGYLVYFTRPMTMHRAVSPTEPTPRSLSALSAYHTGLIAPMKIRTEAPGNLRLYSGSPTRSEKEQVSISSFYYKERKSRRWKSKREGSDSGNRQIKAAGKVIIQDIACLLPVHKSLGELYILNVNDIQETCQKNAASALLVGRKDLVQVWSLATVATDLCLGPKSDPDLETPWARHPFGRQLLESLLAHYCRLRDVQTLAMLCSVFEAQSRPQGLPNPFGPFPNRSSNLVVSHSRYPSFTSSGSCSSMSDPGLNTGGWNIAGREAEHLSSPWGESSPEELRFGSLTYSDPRERERDQHDKNKRLLDPANTQQFDDFKKCYGEILYRWGLREKRAEVLKFVSCPPDPHKGIEFGVYCSHCRSEVRGTQCAICKGFTFQCAICHVAVRGSSNFCLTCGHGGHTSHMMEWFRTQEVCPTGCGCHCLLESTF

SEQ ID NO: 1587 - protein, 772 aa, Homo sapiens
MNCYLLLRFMLGIPLLWPCLGATENSQTKKVKQPVRSHLRVKRGWVWNQFFVPEEMNTTSHHIGQLRSDLDNGNNSFQYKLLGAGAGSTFIIDERTGDIYAIQKLDREERSLYILRAQVIDIATGRAVEPESEFVIKVSDINDNEPKFLDEPYEAIVPEMSPEGTLVIQVTASDADDPSSGNNARLLYSLLQGQPYFSVEPTTGVIRISSKMDRELQDEYWVIIQAKDMIGQPGALSGTTSVLIKLSDVNDNKPIFKESLYRLTVSESAPTGTSIGTIMAYDNDIGENAEMDYSIEEDDSQTFDIITNHETQEGIVILKKKVDFEHQNHYGIRAKVKNHHVPEQLMKYHTEASTTFIKIQVEDVDEPPLFLLPYYVFEVFEETPQGSFVGVVSATDPDNRKSPIRYSITRSKVFNINDNGTITTSNSLDREISAWYNLSITATEKYNIEQISSIPLYVQVLNINDHAPEFSQYYETYVCENAGSGQVIQTISAVDRDESIEEHHFYFNLSVEDTNNSSFTIIDNQDNTAVILTNRTGFNLQEEPVFYISILIADNGIPSLTSTNTLTIHVCDCGDSGSTQTCQYQELVLSMGFKTEVIIAILICIMIIFGFIFLTLGLKQRRKQILFPEKSEDFRENIFQYDDEGGGEEDTEAFDIAELRSSTIMRERKTRKTTSAEIRSLYRQSLQVGPDSAIFRKFILEKLEEANTDPCAPPFDSLQTYAFEGTGSLAGSLSSLESAVSDQDESYDYLNELGPRFKRLACMFGSAVQSNN

SEQ ID NO: 1588 - protein, 467 aa, Homo sapiens
MSSILPFTPPVVKRLLGWKKSAGGSGGAGGGEQNGQEEKWCEKAVKSLVKKLKKTGRLDELEKAITTQNCNTKCVTIPSTCSEIWGLSTPNTIDQWDTTGLYSFSEQTRSLDGRLQVSHRKGLPHVIYCRLWRWPDLHSHHELKAIENCEYAFNLKKDEVCVNPYHYQRVETPVLPPVLVPRHTEILTELPPLDDYTHSIPENTNFPAGIEPQSNYIPETPPPGYISEDGETSDQQLNQSMDTGSPAELSPTTLSPVNHSLDLQPVTYSEPAFWCSIAYYELNQRVGETFHASQPSLTVDGFTDPSNSERFCLGLLSNVNRNATVEMTRRHIGRGVRLYYIGGEVFAECLSDSAIFVQSPNCNQRYGWHPATVCKIPPGCNLKIFNNQEFAALLAQSVNQGFEAVYQLTRMCTIRMSFVKGWGAEYRRQTVTSTPCWIELHLNGPLQWLDKVLTQMGSPSVRCSSMS

SEQ ID NO: 1589 - protein, 476 aa, Homo sapiens
MANSAKAEEYEKMSLEQAKASVNSETESSFNINENTTASGTGLSEKTSVCRQVDIARKRKEFEDDLVKESSSCGKDTPSKKRKLDPEIVPEEKDCGDAEGNSKKRKRETEDVPKDKSSTGDGTQNKRKIALEDVPEKQKNLEEGHSSTVAAHYNELQEVGLEKRSQSRIFYLRNFNNWMKSVLIGEFLEKVRQKKKRDITVLDLGCGKGGDLLKWKKGRINKLVCTDIADVSVKQCQQRYEDMKNRRDSEYIFSAEFITADSSKELLIDKFRDPQMCFDICSCQFVCHYSFESYEQADMMLRNACERLSPGGYFIGTTPNSFELIRRLEASETESFGNEIYTVKFQKKGDYPLFGCKYDFNLEGVVDVPEFLVYFPLLNEMAKKYNMKLVYKKTFLEFYEEKIKNNENKMLLKRMQALEPYPANESSKLVSEKVDDYEHAAKYMKNSQVRLPLGTLSKSEWEATSIYLVFAFEKQQ

SEQ ID NO: 1590 - protein, 326 aa, Homo sapiens
MVDYYEVLGVQRHASPEDIKKAYRKLALKWHPDKNPENKEEAERKFKQVAEAYEVLSDAKKRDIYDKYGKEGLNGGGGGGSHFDSPFEFGFTFRNPDDVFREFFGGRDPFSFDFFEDPFEDFFGNRRGPRGSRSRGTGSFFSAFSGFPSFGSGFSSFDTGFTSFGSLGHGGLTSFSSTSFGGSGMGNFKSISTSTKMVNGRKITTKRIVENGQERVEVEEDGQLKSLTINGVADDDALAEERMRRGQNALPAQPAGLRPPKPPRPASLLRHAPHCLSEEEGEQDRPRAPGPWDPLASAAGLKEGGKRKKQKQREESKKKKSTKGNH

SEQ ID NO: 1591 - protein, 438 aa, Homo sapiens
MRTLLPPALLTCWLLAPVNSIHPECRFHLEIQEEETKCAELLRSQTEKHKACSGVWDNITCWRPANVGETVTVPCPKVFSNFYSKAGNISKNCTSDGWSETFPDFVDACGYSDPEDESKITFYILVKAIYTLGYSVSLMSLATGSIILCLFRKLHCTRNYIHLNLFLSFILRAISVLVKDDVLYSSSGTLHCPDQPSSWVGCKLSLVFLQYCIMANFFWLLVEGLYLHTLLVAMLPPRRCFLAYLLIGWGLPTVCIGAWTAARLYLEDTGCWDTNDHSVPWWVIRIPILISIIVNFVLFISIIRILLQKLTSPDVGGNDQSQYKRLAKSTLLLIPLFGVHYMVFAVFPISISSKYQILFELCLGSFQGLVVAVLYCFLNSEVQCELKRKWRSRCPTPSASRDYRVCGSSFSRNGSEGALQFHRGSRAQSFLQTETSVI

SEQ ID NO: 1592 - protein, 1159 aa, Homo sapiens
MPVRRGHVAPQNTFLDTIIRKFEGQSRKFIIANARVENCAVIYCNDGFCELCGYSRAEVMQRPCTCDFLHGPRTQRRAAAQIAQALLGAEERKVEIAFYRKDGSCFLCLVDVVPVKNEDGAVIMFILNFEVVMEKDMVGSPAHDTNHRGPPTSWLAPGRAKTFRLKLPALLALTARESSVRSGGAGGAGAPGAVVVDVDLTPAAPSSESLALDEVTAMDNHVAGLGPAEERRALVGPGSPPRSAPGQLPSPRAHSLNPDASGSSCSLARTRSRESCASVRRASSADDIEAMRAGVLPPPPRHASTGAMHPLRSGLLNSTSDSDLVRYRTISKIPQITLNFVDLKGDPFLASPTSDREIIAPKIKERTHNVTEKVTQVLSLGADVLPEYKLQAPRIHRWTILHYSPFKAVWDWLILLLVIYTAVFTPYSAAFLLKETEEGPPATECGYACQPLAVVDLIVDIMFIVDILINFRTTYVNANEEVVSHPGRIAVHYFKGWFLIDMVAAIPFDLLIFGSGSEELIGLLKTARLLRLVRVARKLDRYSEYGAAVLFLLMCTFALIAHWLACIWYAIGNMEQPHMDSRIGWLHNLGDQIGKPYNSSGLGGPSIKDKYVTALYFTFSSLTSVGFGNVSPNTNSEKIFSICVMLIGSLMYASIFGNVSAIIQRLYSGTARYHTQMLRVREFIRFHQIPNPLRQRLEEYFQHAWSYTNGIDMNAVLKGFPECLQADICLHLNRSLLQHCKPFRGATKGCLRALAMKFKTTHAPPGDTLVHAGDLLTALYFISRGSIEILRGDVVVAILGKNDIFGEPLNLYARPGKSNGDVRALTYCDLHKIHRDDLLEVLDMYPEFSDHFWSSLEITFNLRDTNMIPGSPGSTELEGGFSRQRKRKLSFRRRTDKDTEQPGEVSALGPGRAGAGPSSRGRPGGPWGESPSSGPSSPESSEDEGPGRSSSPLRLVPFSSPRPPGEPPGGEPLMEDCEKSSDTCNPLSGAFSGVSNIFSFWGDSRGRQYQELPRCPAPTPSLLNIPLSSPGRRPRGDVESRLDALQRQLNRLETRLSADMATVLQLLQRQMTLVPPAYSAVTTPGPGPTSTSPLLPVSPLPTLTLDSLSQVSQFMACEELPPGAPELPQEGPTRRLSLPGQLGALTSQPLHRHGSDPGS

SEQ ID NO: 1593 - protein, 483 aa, Homo sapiens
MAADEVAGGARKATKSKLFEFLVHGVRPGMPSGARMPHQGAPMGPPGSPYMGSPAVRPGLAPAGMEPARKRAAPPPGQSQAQSQGQPVPTAPARSRSAKRRKMADKILPQRIRELVPESQAYMDLLAFERKLDQTIMRKRVDIQEALKRPMKQKRKLRLYISNTFNPAKPDAEDSDGSIASWELRVEGKLLDDPSKQKRKFSSFFKSLVIELDKDLYGPDNHLVEWHRTPTTQETDGFQVKRPGDLSVRCTLLLMLDYQPPQFKLDPRLARLLGLHTQSRSAIVQALWQYVKTNRLQDSHDKEYINGDKYFQQIFDCPRLKFSEIPQRLTALLLPPDPIVINHVISVDPSDQKKTACYDIDVEVEEPLKGQMSSFLLSTANQQEISALDSKIHETIESINQLKIQRDFMLSFSRDPKGYVQDLLRSQSRDLKVMTDVAGNPEEERRAEFYHQPWSQEAVSRYFYCKIQQRRQELEQSLVVRNT

SEQ ID NO: 1594 - protein, 4911 aa, Homo sapiens
MSSEEDKSVEQPQPPPPPPEEPGAPAPSPAAADKRPRGRPRKDGASPFQRARKKPRSRGKTAVEDEDSMDGLETTETETIVETEIKEQSAEEDAEAEVDNSKQLIPTLQRSVSEESANSLVSVGVEAKISEQLCAFCYCGEKSSLGQGDLKQFRITPGFILPWRNQPSNKKDIDDNSNGTYEKMQNSAPRKQRGQRKERSPQQNIVSCVSVSTQTASDDQAGKLWDELSLVGLPDAIDIQALFDSTGTCWAHHRCVEWSLGVCQMEEPLLVNVDKAVVSGSTERCAFCKHLGATIKCCEEKCTQMYHYPCAAGAGTFQDFSHIFLLCPEHIDQAPERSKEDANCAVCDSPGDLLDQFFCTTCGQHYHGMCLDIAVTPLKRAGWQCPECKVCQNCKQSGEDSKMLVCDTCDKGYHTFCLQPVMKSVPTNGWKCKNCRICIECGTRSSSQWHHNCLICDNCYQQQDNLCPFCGKCYHPELQKDMLHCNMCKRWVHLECDKPTDHELDTQLKEEYICMYCKHLGAEMDRLQPGEEVEIAELTTDYNNEMEVEGPEDQMVFSEQAANKDVNGQESTPGIVPDAVQVHTEEQQKSHPSESLDTDSLLIAVSSQHTVNTELEKQISNEVDSEDLKMSSEVKHICGEDQIEDKMEVTENIEVVTHQITVQQEQLQLLEEPETVVSREESRPPKLVMESVTLPLETLVSPHEESISLCPEEQLVIERLQGEKEQKENSELSTGLMDSEMTPTIEGCVKDVSYQGGKSIKLSSETESSFSSSADISKADVSSSPTPSSDLPSHDMLHNYPSALSSSAGNIMPTTYISVTPKIGMGKPAITKRKFSPGRPRSKQGAWSTHNTVSPPSWSPDISEGREIFKPRQLPGSAIWSIKVGRGSGFPGKRRPRGAGLSGRGGRGRSKLKSGIGAVVLPGVSTADISSNKDDEENSMHNTVVLFSSSDKFTLNQDMCVVCGSFGQGAEGRLLACSQCGQCYHPYCVSIKITKVVLSKGWRCLECTVCEACGKATDPGRLLLCDDCDISYHTYCLDPPLQTVPKGGWKCKWCVWCRHCGATSAGLRCEWQNNYTQCAPCASLSSCPVCYRNYREEDLILQCRQCDRWMHAVCQNLNTEEEVENVADIGFDCSMCRPYMPASNVPSSDCCESSLVAQIVTKVKELDPPKTYTQDGVCLTESGMTQLQSLTVTVPRRKRSKPKLKLKIINQNSVAVLQTPPDIQSEHSRDGEMDDSREGELMDCDGKSESSPEREAVDDETKGVEGTDGVKKRKRKPYRPGIGGFMVRQRSRTGQGKTKRSVIRKDSSGSISEQLPCRDDGWSEQLPDTLVDESVSVTESTEKIKKRYRKRKNKLEETFPAYLQEAFFGKDLLDTSRQSKISLDNLSEDGAQLLYKTNMNTGFLDPSLDPLLSSSSAPTKSGTHGPADDPLADISEVLNTDDDILGIISDDLAKSVDHSDIGPVTDDPSSLPQPNVNQSSRPLSEEQLDGILSPELDKMVTDGAILGKLYKIPELGGKDVEDLFTAVLSPANTQPTPLPQPPPPTQLLPIHNQDAFSRMPLMNGLIGSSPHLPHNSLPPGSGLGTFSAIAQSSYPDARDKNSAFNPMASDPNNSWTSSAPTVEGENDTMSNAQRSTLKWEKEEALGEMATVAPVLYTNINFPNLKEEFPDWTTRVKQIAKLWRKASSQERAPYVQKARDNRAALRINKVQMSNDSMKRQQQQDSIDPSSRIDSELFKDPLKQRESEHEQEWKFRQQMRQKSKQQAKIEATQKLEQVKNEQQQQQQQQFGSQHLLVQSGSDTPSSGIQSPLTPQPGNGNMSPAQSFHKELFTKQPPSTPTSTSSDDVFVKPQAPPPPPAPSRIPIQDSLSQAQTSQPPSPQVFSPGSSNSRPPSPMDPYAKMVGTPRPPPVGHSFSRRNSAAPVENCTPLSSVSRPLQMNETTANRPSPVRDLCSSSTTNNDPYAKPPDTPRPVMTDQFPKSLGLSRSPVVSEQTAKGPIAAGTSDHFTKPSPRADVFQRQRIPDSYARPLLTPAPLDSGPGPFKTPMQPPPSSQDPYGSVSQASRRLSVDPYERPALTPRPIDNFSHNQSNDPYSQPPLTPHPAVNESFAHPSRAFSQPGTISRPTSQDPYSQPPGTPRPVVDSYSQSSGTARSNTDPYSQPPGTPRPTTVDPYSQQPQTPRPSTQTDLFVTPVTNQRHSDPYAHPPGTPRPGISVPYSQPPATPRPRISEGFTRSSMTRPVLMPNQDPFLQAAQNRGPALPGPLVRPPDTCSQTPRPPGPGLSDTFSRVSPSAARDPYDQSPMTPRSQSDSFGTSQTAHDVADQPRPGSEGSFCASSNSPMHSQGQQFSGVSQLPGPVPTSGVTDTQNTVNMAQADTEKLRQRQKLREIILQQQQQKKIAGRQEKGSQDSPAVPHPGPLQHWQPENVNQAFTRPPPPYPGNIRSPVAPPLGPRYAVFPKDQRGPYPPDVASMGMRPHGFRFGFPGGSHGTMPSQERFLVPPQQIQGSGVSPQLRRSVSVDMPRPLNNSQMNNPVGLPQHFSPQSLPVQQHNILGQAYIELRHRAPDGRQRLPFSAPPGSVVEASSNLRHGNFIPRPDFPGPRHTDPMRRPPQGLPNQLPVHPDLEQVPPSQQEQGHSVHSSSMVMRTLNHPLGGEFSEAPLSTSVPSETTSDNLQITTQPSDGLEEKLDSDDPSVKELDVKDLEGVEVKDLDDEDLENLNLDTEDGKVVELDTLDNLETNDPNLDDLLRSGEFDIIAYTDPELDMGDKKSMFNEELDLPIDDKLDNQCVSVEPKKKEQENKTLVLSDKHSPQKKSTVTNEVKTEVLSPNSKVESKCETEKNDENKDNVDTPCSQASAHSDLNDGEKTSLHPCDPDLFEKRTNRETAGPSANVIQASTQLPAQDVINSCGITGSTPVLSSLLANEKSDNSDIRPSGSPPPPTLPASPSNHVSSLPPFIAPPGRVLDNAMNSNVTVVSRVNHVFSQGVQVNPGLIPGQSTVNHSLGTGKPATQTGPQTSQSGTSSMSGPQQLMIPQTLAQQNRERPLLLEEQPLLLQDLLDQERQEQQQQRQMQAMIRQRSEPFFPNIDFDAITDPIMKAKMVALKGINKVMAQNNLGMPPMVMSRFPFMGQVVTGTQNSEGQNLGPQAIPQDGSITHQISRPNPPNFGPGFVNDSQRKQYEEWLQETQQLLQMQQKYLEEQIGAHRKSKKALSAKQRTAKKAGREFPEEDAEQLKHVTEQQSMVQKQLEQIRKQQKEHAELIEDYRIKQQQQCAMAPPTMMPSVQPQPPLIPGATPPTMSQPTFPMVPQQLQHQQHTTVISGHTSPVRMPSLPGWQPNSAPAHLPLNPPRIQPPIAQLPIKTCTPAPGTVSNANPQSGPPPRVEFDDNNPFSESFQERERKERLREQQERQRIQLMQEVDRQRALQQRMEMEQHGMVGSEISSSRTSVSQIPFYSSDLPCDFMQPLGPLQQSPQHQQQMGQVLQQQNIQQGSINSPSTQTFMQTNERRQVGPPSFVPDSPSIPVGSPNFSSVKQGHGNLSGTSFQQSPVRPSFTPALPAAPPVANSSLPCGQDSTITHGHSYPGSTQSLIQLYSDIIPEEKGKKKRTRKKKRDDDAESTKAPSTPHSDITAPPTPGISETTSTPAVSTPSELPQQADQESVEPVGPSTPNMAAGQLCTELENKLPNSDFSQATPNQQTYANSEVDKLSMETPAKTEEIKLEKAETESCPGQEEPKLEEQNGSKVEGNAVACPVSSAQSPPHSAGAPAAKGDSGNELLKHLLKNKKSSSLLNQKPEGSICSEDDCTKDNKLVEKQNPAEGLQTLGAQMQGGFGCGNQLPKTDGGSETKKQRSKRTQRTGEKAAPRSKKRKKDEEEKQAMYSSTDTFTHLKQQNNLSNPPTPPASLPPTPPPMACQKMANGFATTEELAGKAGVLVSHEVTKTLGPKPFQLPFRPQDDLLARALAQGPKTVDVPASLPTPPHNNQEELRIQDHCGDRDTPDSFVPSSSPESVVGVEVSRYPDLSLVKEEPPEPVPSPIIPILPSTAGKSSESRRNDIKTEPGTLYFASPFGPSPNGPRSGLISVAITLHPTAAENISSVVAAFSDLLHVRIPNSYEVSSAPDVPSMGLVSSHRINPGLEYRQHLLLRGPPPGSANPPRLVSSYRLKQPNVPFPPTSNGLSGYKDSSHGIAESAALRPQWCCHCKVVILGSGVRKSFKDLTLLNKDSRESTKRVEKDIVFCSNNCFILYSSTAQAKNSENKESIPSLPQSPMRETPSKAFHQYSNNISTLDVHCLPQLPEKASPPASPPIAFPPAFEAAQVEAKPDELKVTVKLKPRLRAVHGGFEDCRPLNKKWRGMKWKKWSIHIVIPKGTFKPPCEDEIDEFLKKLGTSLKPDPVPKDYRKCCFCHEEGDGLTDGPARLLNLDLDLWVHLNCALWSTEVYETQAGALINVELALRRGLQMKCVFCHKTGATSGCHRFRCTNIYHFTCAIKAQCMFFKDKTMLCPMHKPKGIHEQELSYFAVFRRVYVQRDEVRQIASIVQRGERDHTFRVGSLIFHTIGQLLPQQMQAFHSPKALFPVGYEASRLYWSTRYANRRCRYLCSIEEKDGRPVFVIRIVEQGHEDLVLSDISPKGVWDKILEPVACVRKKSEMLQLFPAYLKGEDLFGLTVSAVARIAESLPGVEACENYTFRYGRNPLMELPLAVNPTGCARSEPKMSAHVKRFVLRPHTLNSTSTSKSFQSTVTGELNAPYSKQFVHSKSSQYRKMKTEWKSNVYLARSRIQGLGLYAARDIEKHTMVIEYIGTIIRNEVANRKEKLYESQNRGVYMFRMDNDHVIDATLTGGPARYINHSCAPNCVAEVVTFERGHKIIISSSRRIQKGEELCYDYKFDFEDDQHKIPCHCGAVNCRKWMN

SEQ ID NO: 1595 - protein, 1131 aa, Homo sapiens
MFQIPVENLDNIRKVRKKVKGILVDIGLDSCKELLKDLKGFDPGEKYFHNTSWGDVSLWEPSGKKVRYRTKPYCCGLCKYSTKVLTSFKNHLHRYHEDEIDQELVIPCPNCVFASQPKVVGRHFRMFHAPVRKVQNYTVNILGETKSSRSDVISFTCLKCNFSNTLYYSMKKHVLVAHFHYLINSYFGLRTEEMGEQPKTNDTVSIEKIPPPDKYYCKKCNANASSQDALMYHILTSDIHRDLENKLRSVISEHIKRTGLLKQTHIAPKPAAHLAAPANGSAPSAPAQPPCFHLALPQNSPSPAAGQPVTVAQGAPGSLTHSPPAAGQSHMTLVSSPLPVGQNSLTLQPPAPQPVFLSHGVPLHQSVNPPVLPLSQPVGPVNKSVGTSVLPINQTVRPGVLPLTQPVGPINRPVGPGVLPVSPSVTPGVLQAVSPGVLSVSRAVPSGVLPAGQMTPAGQMTPAGVIPGQTATSGVLPTGQMVQSGVLPVGQTAPSRVLPPGQTAPLRVISAGQVVPSGLLSPNQTVSSSAVVPVNQGVNSGVLQLSQPVVSGVLPVGQPVRPGVLQLNQTVGTNILPVNQPVRPGASQNTTFLTSGSILRQLIPTGKQVNGIPTYTLAPVSVTLPVPPGGLATVAPPQMPIQLLPSGAAAPMAGSMPGMPSPPVLVNAAQSVFVQASSSAADTNQVLKQAKQWKTCPVCNELFPSNVYQVHMEVAHKHSESKSGEKLEPEKLAACAPFLKWMREKTVRCLSCKCLVSEEELIHHLLMHGLGCLFCPCTFHDIKGLSEHSRNRHLGKKKLPMDYSNRGFQLDVDANGNLLFPHLDFITILPKEKLGEREVYLAILAGIHSKSLVPVYVKVRPQAEGTPGSTGKRVSTCPFCFGPFVTTEAYELHLKERHHIMPTVHTVLKSPAFKCIHCCGVYTGNMTLAAIAVHLVRCRSAPKDSSSDLQAQPGFIHNSELLLVSGEVMHDSSFSVKRKLPDGHLGAEDQRHGEEQPPILNADAAPGPEKVTSVVPFKRQRNESRTEGPIVKDEALQILALDPKKYEGRSYEEKKQFLKDYFHKKPYPSKKEIELLSSLFWVWKIDVASFFGKRRYICMKAIKNHKPSVLLGFDMSELKNVKHRLNFEYEP

SEQ ID NO: 1596 - protein, 500 aa, Homo sapiens
MKCTAREWLRVTTVLFMARAIPAMVVPNATLLEKLLEKYMDEDGEWWIAKQRGKRAITDNDMQSILDLHNKLRSQVYPTASNMEYMTWDVELERSAESWAESCLWEHGPASLLPSIGQNLGAHWGRYRPPTFHVQSWYDEVKDFSYPYEHECNPYCPFRCSGPVCTHYTQVVWATSNRIGCAINLCHNMNIWGQIWPKAVYLVCNYSPKGNWWGHAPYKHGRPCSACPPSFGGGCRENLCYKEGSDRYYPPREEETNEIERQQSQVHDTHVRTRSDDSSRNEVISAQQMSQIVSCEVRLRDQCKGTTCNRYECPAGCLDSKAKVIGSVHYEMQSSICRAAIHYGIIDNDGGWVDITRQGRKHYFIKSNRNGIQTIGKYQSANSFTVSKVTVQAVTCETTVEQLCPFHKPASHCPRVYCPRNCMQANPHYARVIGTRVYSDLSSICRAAVHAGVVRNHGGYVDVMPVDKRKTYIASFQNGIFSESLQNPPGGKAFRVFAVV

SEQ ID NO: 1597 - protein, 1119 aa, Homo sapiens
MKRSLRKMWRPGEKKEPQGVVYEDVPDDTEDFKESLKVVFEGSAYGLQNFNKQKKLKRCDDMDTFFLHYAAAEGQIELMEKITRDSSLEVLHEMDDYGNTPLHCAVEKNQIESVKFLLSRGANPNLRNFNMMAPLHIAVQGMNNEVMKVLLEHRTIDVNLEGENGNTAVIIACTTNNSEALQILLKKGAKPCKSNKWGCFPIHQAAFSGSKECMEIILRFGEEHGYSRQLHINFMNNGKATPLHLAVQNGDLEMIKMCLDNGAQIDPVEKGRCTAIHFAATQGATEIVKLMISSYSGSVDIVNTTDGCHETMLHRASLFDHHELADYLISVGADINKIDSEGRSPLILATASASWNIVNLLLSKGAQVDIKDNFGRNFLHLTVQQPYGLKNLRPEFMQMQQIKELVMDEDNDGCTPLHYACRQGGPGSVNNLLGFNVSIHSKSKDKKSPLHFAASYGRINTCQRLLQDISDTRLLNEGDLHGMTPLHLAAKNGHDKVVQLLLKKGALFLSDHNGWTALHHASMGGYTQTMKVILDTNLKCTDRLDEDGNTALHFAAREGHAKAVALLLSHNADIVLNKQQASFLHLALHNKRKEVVLTIIRSKRWDECLKIFSHNSPGNKCPITEMIEYLPECMKVLLDFCMLHSTEDKSCRDYYIEYNFKYLQCPLEFTKKTPTQDVIYEPLTALNAMVQNNRIELLNHPVCKEYLLMKWLAYGFRAHMMNLGSYCLGLIPMTILVVNIKPGMAFNSTGIINETSDHSEILDTTNSYLIKTCMILVFLSSIFGYCKEAGQIFQQKRNYFMDISNVLEWIIYTTGIIFVLPLFVEIPAHLQWQCGAIAVYFYWMNFLLYLQRFENCGIFIVMLEVILKTLLRSTVVFIFLLLAFGLSFYILLNLQDPFSSPLLSIIQTFSMMLGDINYRESFLEPYLRNELAHPVLSFAQLVSFTIFVPIVLMNLLIGLAVGDIAEVQKHASLKRIAMQVELHTSLEKKLPLWFLRKVDQKSTIVYPNKPRSGGMLFHIFCFLFCTGEIRQEIPNADKSLEMEILKQKYRLKDLTFLLEKQHELIKLIIQKMEIISETEDDDSHCSFQDRFKKEQMEQRNSRWNTVLRAVKAKTHHLEP

SEQ ID NO: 1598 - protein, 1221 aa, Homo sapiens
MLFPLQVAAVTSSVRDDPLEHCVSPRTRARSPEICKMADNLDEFIEEQKARLAEDKAELESDPPYMEMKGKLSAKLSENSKILISMAKENIPPNSQQTRGSLGIDYGLSLPLGEDYERKKHKLKEELRQDYRRYLTQERLKLERNKEYNQFLRGKEESSEKFRQVEKSTEPKSQRNKKPIGQVKPDLTSQIQTSCENSEGPRKDVLTPSEAYEELLNQRRLEEDRYRQLDDEIELRNRRIIKKANEEVGISNLKHQRFASKAGIPDRRFHRFNEDRVFDRRYHRPDQDPEVSEEMDERFRYESDFDRRLSRVYTNDRMHRNKRGNMPPMEHDGDVIEQSNIRISSAENKSAPDNETSKSANQDTCSPFAGMLFGGEDRELIQRRKEKYRLELLEQMAEQQRNKRREKDLELRVAASGAQDPEKSPDRLKQFSVAPRHFEEMIPPERPRIAFQTPLPPLSAPSVPPIPSVHPVPSQNEDLRSGLSSALGEMVSPRIAPLPPPPLLPPLATNYRTPYDDAYYFYGSRNTFDPSLAYYGSGMMGVQPAAYVSAPVTHQLAQPVVNTVGQNELKITSDQVINSGLIFEDKPKPSKQSLQSYQEALQQQIREREERRKKEREEKEEYEAKLEAEMRTYNPWGKGGGGAPLRDAKGNLITDLNRMHRQNIDAYHNPDARTYEDKRAVVSLDPNLATSNAENLEDAANKSSGHMQTQSSPFARGNVFGEPPTELQIKQQELYKNFLRFQIEEKKQREEAERERLRIAEEKEERRLAEQRARIQQEYEEEQEKKREKEEEQRLKNEEHIRLAEERQKEAERKKKEEEEKYNLQLQHYCERDNLIGEETKHMRQPSPIVPALQNKIASKLQRPPSVDSIIRSFIHESSMSRAQSPPVPARKNQLRAEEEKKNVIMELSEMRKQLRSEERRLQERLLHMDSDDEIPIRKKERNPMDIFDMARHRLQAPVRRQSPKGLDAATFQNVHDFNELKDRDSETRVDLKFMYLDPPRDHHTLEIQQQALLREQQKRLNRIKMQEGAKVDLDAIPSAKVREQRMPRDDTSDFLKNSLLESDSAFIGAYGETYPAIEDDVLPPPSQLPSARERRRNKWKGLDIDSSRPNVAPDGLSLKSISSVNVDELRVRNEERMRRLNEFHNKPINTDDESSLVDPDDIMKHIGDDGSNSVATEPWLRPGTSETLKRFMAEQLNQEQQQIPGKPGTFTWQGLSTAHG

SEQ ID NO: 1599 - protein, 1849 aa, Homo sapiens
MYEGKKTKNMFLTRALEKILADKEVKKAHHSQLRKACEVALEEIKAETEKQSPPHGEAKAGSSTLPPVKSKTNFIEADKYFLPFELACQSKCPRIVSTSLDCLQKLIAYGHLTGNAPDSTTPGKKLIDRIIETICGCFQGPQTDEGVQLQIIKALLTAVTSQHIEIHEGTVLQAVRTCYNIYLASKNLINQTTAKATLTQMLNVIFARMENQALQEAKQMEKERHRQHHHLLQSPVSHHEPESPQLRYLPPQTVDHISQEHEGDLDLHTNDVDKSLQDDTEPENGSDISSAENEQTEADQATAAETLSKNEVLYDGENHDCEEKPQDIVQNIVEEMVNIVVGDMGEGTTINASADGNIGTIEDGSDSENIQANGIPGTPISVAYTPSLPDDRLSVSSNDTQESGNSSGPSPGAKFSHILQKDAFLVFRSLCKLSMKPLSDGPPDPKSHELRSKILSLQLLLSILQNAGPIFRTNEMFINAIKQYLCVALSKNGVSSVPEVFELSLSIFLTLLSNFKTHLKMQIEVFFKEIFLYILETSTSSFDHKWMVIQTLTRICADAQSVVDIYVNYDCDLNAANIFERLVNDLSKIAQGRGSQELGMSNVQELSLRKKGLECLVSILKCMVEWSKDQYVNPNSQTTLGQEKPSEQEMSEIKHPETINRYGSLNSLESTSSSGIGSYSTQMSGTDNPEQFEVLKQQKEIIEQGIDLFNKKPKRGIQYLQEQGMLGTTPEDIAQFLHQEERLDSTQVGEFLGDNDKFNKEVMYAYVDQHDFSGKDFVSALRMFLEGFRLPGEAQKIDRLMEKFAARYLECNQGQTLFASADTAYVLAYSIIMLTTDLHSPQVKNKMTKEQYIKMNRGINDSKDLPEEYLSAIYNEIAGKKISMKETKELTIPTKSSKQNVASEKQRRLLYNLEMEQMAKTAKALMEAVSHVQAPFTSATHLEHVRPMFKLAWTPFLAAFSVGLQDCDDTEVASLCLEGIRCAIRIACIFSIQLERDAYVQALARFTLLTVSSGITEMKQKNIDTIKTLITVAHTDGNYLGNSWHEILKCISQLELAQLIGTGVKPRYISGTVRGREGSLTGTKDQAPDEFVGLGLVGGNVDWKQIASIQESIGETSSQSVVVAVDRIFTGSTRLDGNAIVDFVRWLCAVSMDELLSTTHPRMFSLQKIVEISYYNMGRIRLQWSRIWEVIGDHFNKVGCNPNEDVAIFAVDSLRQLSMKFLEKGELANFRFQKDFLRPFEHIMKRNRSPTIRDMVVRCIAQMVNSQAANIRSGWKNIFSVFHLAASDQDESIVELAFQTTGHIVTLVFEKHFPATIDSFQDAVKCLSEFACNAAFPDTSMEAIRLIRHCAKYVSDRPQAFKEYTSDDMNVAPEDRVWVRGWFPILFELSCIINRCKLDVRTRGLTVMFEIMKTYGHTYEKHWWQDLFRIVFRIFDNMKLPEQQTEKAEWMTTTCNHALYAICDVFTQYLEVLSDVLLDDIFAQLYWCVQQDNEQLARSGTNCLENVVILNGEKFTLEIWDKTCNCTLDIFKTTIPHALLTWRPNSGETAPPPPSPVSEKPLDTISQKSVDIHDSIQPRSVDNRPQAPLVSASAVNEEVSKIKSTAKFPEQKLFAALLIKCVVQLELIQTIDNIVFFPATSKKEDAENLAAAQRDAVDFDVRVDTQDQGMYRFLTSQQLFKLLDCLLESHRFAKAFNSNNEQRTALWKAGFKGKSKPNLLKQETSSLACGLRILFRMYMDESRVSAWEEVQQRLLNVCSEALSYFLTLTSESHREAWTNLLLLFLTKVLKISDNRFKAHASFYYPLLCEIMQFDLIPELRAVLRRFFLRIGVVFQISQPPEQELGINKQ

SEQ ID NO: 1600 - protein, 357 aa, Homo sapiens
MGNRHSQSYTLSEGSQQLPKGDSQPSTVVQPLSHPSRNGEPEAPQPAKASSPQGFDVDRDAKKLNKACKGMGTNEAAIIEILSGRTSDERQQIKQKYKATYGKELEEVLKSELSGNFEKTALALLDRPSEYAARQLQKAMKGLGTDESVLIEVLCTRTNKEIIAIKEAYQRLFDRSLESDVKGDTSGNLKKILVSLLQANRNEGDDVDKDLAGQDAKDLYDAGEGRWGTDELAFNEVLAKRSYKQLRATFQAYQILIGKDIEEAIEEETSGDLQKAYLTLVRCAQDCEDYFAERLYKSMKGAGTDEETLIRIVVTRAEVDLQGIKAKFQEKYQKSLSDMVRSDTSGDFRKLLVALLH

SEQ ID NO: 1601 - protein, 670 aa, Homo sapiens
MLSNESLHPPAFSRSNSEASVDSASMEDFWREIESIKDSSMGGQEEPPPAEVTPVDEGELEAEWLQDVGLSTLISGDEEEDGKALLSTLTRTQAAAVQKRYHTYTQTMRKKDKQSIRDVRDIFGVSESPPRDTCGNHTNQLDGTKEERELPRVIKTSGSMPDDASLNSTTLSDASQDKEGSFAVPRSDSVAILETIPVLPVHSNGSPEPGQPVQNAISDDDFLEKNIPPEAEELSFEVSYSEMVTEALKRNKLKKSEIKKEDYVLTKFNVQKTRFGLTEAGDLSAEDMKKIRHLSLIELTAFFDAFGIQLKRNKTEKVKGRDNGIFGVPLTVLLDGDRKKDPGVKVPLVLQKFFEKVEESGLESEGIFRLSGCTAKVKQYREELDAKFNADKFKWDKMCHREAAVMLKAFFRELPTSLFPVEYIPAFISLMERGPHVKVQFQALHLMVMALPDANRDAAQALMTFFNKVIANESKNRMSLWNISTVMAPNLFFSRSKHSDYEELLLANTAAHIIRLMLKYQKILWKVPSFLITQVRRMNEATMLLKKQLPSVRKLLRRKTLERETASPKTSKVLQKSPSARRMSDVPEGVIRVHAPLLSKVSMAIQLNNQTKAKDILAKFQYENRILHWQRAALSFLNGKWVKKEREESTETNRSPKHVFLFTIGLDIST

SEQ ID NO: 1602 - protein, 1188 aa, Homo sapiens
MQFETLRQVCNSVLSHFHGVFSSPPNILQNELFGQTLNNARKRSPSVSRDQNRRYDQREEREEYSQYATSDTAMPRSPSDYADRRSQHEPQFYEDSDHLSYRDSNRRSHRHSKEYIVDDEDVESRDEYERQRREEEYQSRYRSDPNLARYPVKPQPYEEQMRIHAEVSRARHERRHSDVSLANADLEDSRISMLRMDRPSRQRSISERRAAMENQRSYSMERTREAQGPSSYAQRTTNHSPPTPRRSPLPIDRPDLRRTDSLRKQHHLDPSSAVRKTKREKMETMLRNDSLSSDQSESVRPPPPKPHKSKKGGKMRQISLSSSEEELASTPEYTSCDDVEIESESVSEKGDSQKGKRKTSEQAVLSDSNTRSERQKEMMYFGGHSLEEDLEWSEPQIKDSGVDTCSSTTLNEEHSHSDKHPVTWQPSKDGDRLIGRILLNKRLKDGSVPRDSGAMLGLKVVGGKMTESGRLCAFITKVKKGSLADTVGHLRPGDEVLEWNGRLLQGATFEEVYNIILESKPEPQVELVVSRPIGDIPRIPDSTHAQLESSSSSFESQKMDRPSISVTSPMSPGMLRDVPQFLSGQLSIKLWFDKVGHQLIVTILGAKDLPSREDGRPRNPYVKIYFLPDRSDKNKRRTKTVKKTLEPKWNQTFIYSPVHRREFRERMLEITLWDQARVREEESEFLGEILIELETALLDDEPHWYKLQTHDVSSLPLPHPSPYMPRRQLHGESPTRRLQRSKRISDSEVSDYDCDDGIGVVSDYRHDGRDLQSSTLSVPEQVMSSNHCSPSGSPHRVDVIGRTRSWSPSVPPPQSRNVEQGLRGTRTMTGHYNTISRMDRHRVMDDHYSPDRDRDCEAADRQPYHRSRSTEQRPLLERTTTRSRSTERPDTNLMRSMPSLMTGRSAPPSPALSRSHPRTGSVQTSPSSTPVAGRRGRQLPQLPPKGTLDRKAGGKKLRSTVQRSTETGLAVEMRNWMTRQASRESTDGSMNSYSSEGNLIFPGVRLASDSQFSDFLDGLGPAQLVGRQTLATPAMGDIQVGMMDKKGQLEVEIIRARGLVVKPGSKTLPAPYVKVYLLDNGVCIAKKKTKVARKTLEPLYQQLLSFEESPQGKVLQIIVWGDYGRMDHKSFMGVAQILLDELELSNMVIGWFKLFPPSSLVDPTLAPLTRRASQSSLESSTGPSYSRS

SEQ ID NO: 1603 - protein, 815 aa, Homo sapiens
MEDGFSSYSSLYDTSSLLQFCNDDSASAASSMEVTDRIASLEQRVQMQEDDIQLLKSALADVVRRLNITEEQQAVLNRKGPTKARPLMQTLPLRTTVNNGTVLPKKPTGSLPSPSGVRKETAVPATKSNIKRTSSSERVSPGGRRESNGDSRGNRNRTGSTSSSSSGKKNSESKPKEPVFSAEEGYVKMFLRGRPVTMYMPKDQVDSYSLEAKVELPTKRLKLEWVYGYRGRDCRNNLYLLPTGETVYFIASVVVLYNVEEQLQRHYAGHNDDVKCLAVHPDRITIATGQVAGTSKDGKQLPPHVRIWDSVTLNTLHVIGIGFFDRAVTCIAFSKSNGGTNLCAVDDSNDHVLSVWDWQKEEKLADVKCSNEAVFAADFHPTDTNIIVTCGKSHLYFWTLEGSSLNKKQGLFEKQEKPKFVLCVTFSENGDTITGDSSGNILVWGKGTNRISYAVQGAHEGGIFALCMLRDGTLVSGGGKDRKLISWSGNYQKLRKTEIPEQFGPIRTVAEGKGDVILIGTTRNFVLQGTLSGDFTPITQGHTDELWGLAIHASKSQFLTCGHDKHATLWDAVGHRPVWDKIIEDPAQSSGFHPSGSVVAVGTLTGRWFVFDTETKDLVTVHTDGNEQLSVMRYSPDGNFLAIGSHDNCIYIYGVSDNGRKYTRVGKCSGHSSFITHLDWSVNSQFLVSNSGDYEILYWVPSACKQVVSVETTRDIEWATYTCTLGFHVFGVWPEGSDGTDINAVCRAHEKKLLSTGDDFGKVHLFSYPCSQFRAPSHIYGGHSSHVTNVDFLCEDSHLISTGGKDTSIMQWRVI

SEQ ID NO: 1604 - protein, 485 aa, Homo sapiens
MLTCNKAGSRMVVDAANSNGPFQPVVLLHIRDVPPADQEKLFIQKLRQCCVLFDFVSDPLSDLKWKEVKRAALSEMVEYITHNRNVITEPIYPEVVHMFAVNMFRTLPPSSNPTGAEFDPEEDEPTLEAAWPHLQLVYEFFLRFLESPDFQPNIAKKYIDQKFVLQLLELFDSEDPRERDFLKTTLHRIYGKFLGLRAYIRKQINNIFYRFIYETEHHNGIAELLEILGSIINGFALPLKEEHKIFLLKVLLPLHKVKSLSVYHPQLAYCVVQFLEKDSTLTEPVVMALLKYWPKTHSPKEVMFLNELEEILDVIEPSEFVKIMEPLFRQLAKCVSSPHFQVAERALYYWNNEYIMSLISDNAAKILPIMFPSLYRNSKTHWNKTIHGLIYNALKLFMEMNQKLFDDCTQQFKAEKLKEKLKMKEREEAWVKIENLAKANPQAQKDPKKDRPLARRKSELPQDPHTKKALEAHCRADELASQDGR

SEQ ID NO: 1605 - protein, 711 aa, Homo sapiens
MPADVNLSQKPQVLGPEKQDGSCEASVSFEDVTVDFSREEWQQLDPAQRCLYRDVMLELYSHLFAVGYHIPNPEVIFRMLKEKEPRVEEAEVSHQRCQEREFGLEIPQKEISKKASFQKDMVGEFTRDGSWCSILEELRLDADRTKKDEQNQIQPMSHSAFFNKKTLNTESNCEYKDPGKMIRTRPHLASSQKQPQKCCLFTESLKLNLEVNGQNESNDTEQLDDVVGSGQLFSHSSSDACSKNIHTGETFCKGNQCRKVCGHKQSLKQHQIHTQKKPDGCSECGGSFTQKSHLFAQQRIHSVGNLHECGKCGKAFMPQLKLSVYLTDHTGDIPCICKECGKVFIQRSELLTHQKTHTRKKPYKCHDCGKAFFQMLSLFRHQRTHSREKLYECSECGKGFSQNSTLIIHQKIHTGERQYACSECGKAFTQKSTLSLHQRIHSGQKSYVCIECGQAFIQKAHLIVHQRSHTGEKPYQCHNCGKSFISKSQLDIHHRIHTGEKPYECSDCGKTFTQKSHLNIHQKIHTGERHHVCSECGKAFNQKSILSMHQRIHTGEKPYKCSECGKAFTSKSQFKEHQRIHTGEKPYVCTECGKAFNGRSNFHKHQITHTRERPFVCYKCGKAFVQKSELITHQRTHMGEKPYECLDCGKSFSKKPQLKVHQRIHTGERPYVCSECGKAFNNRSNFNKHQTTHTRDKSYKCSYSVKGFTKQ

SEQ ID NO: 1606 - protein, 364 aa, Homo sapiens
MPLLLLLPLLWAGALAMDPNFWLQVQESVTVQEGLCVLVPCTFFHPIPYYDKNSPVHGYWFREGAIISRDSPVATNKLDQEVQEETQGRFRLLGDPSRNNCSLSIVDARRRDNGSYFFRMERGSTKYSYKSPQLSVHVTDLTHRPKILIPGTLEPGHSKNLTCSVSWACEQGTPPIFSWLSAAPTSLGPRTTHSSVLIITPRPQDHGTNLTCQVKFAGAGVTTERTIQLNVTYVPQNPTTGIFPGDGSGKQETRAGVVHGAIGGAGVTALLALCLCLIFFIVKTHRRKAARTAVGRNDTHPTTGSASPKHQKKSKLHGPTETSSCSGAAPTVEMDEELHYASLNFHGMNPSKDTSTEYSEVRTQ

SEQ ID NO: 1607 - protein, 290 aa, Homo sapiens
MANPKLLGMGLSEAEAIGADSARFEELLLQASKELQQAQTTRPESTQIQPQPGFCIKTNSSEGKVFINICHSPSIPPPADVTEEELLQMLEEDQAGFRIPMSLGEPHAELDAKGQGCTAYDVAVNSDFYRRMQNSDFLRELVITIAREGLEDKYNLQLNPEWRMMKNRPFMGSISQQNIRSEQRPRIQELGDLYTPAPGRAESGPEKPHLNLWLEAPDLLLAEVDLPKLDGALGLSLEIGENRLVMGGPQQLYHLDAYIPLQINSHESKAAFHRKRKQLMVAMPLLPVPS

SEQ ID NO: 1608 - protein, 689 aa, Homo sapiens
MKFGAVTRIGGPPLGNQSPSSCSLLHEKDPPTTSGPQTDQPKKHLTNFKSATRRVARTQWLTADRQTWASISSVPWAQTISEKKPGGSLWETRSSPPTTAGTEEAMNTTSLLAPAAEIMATPGSPSQASPTLGAFTHGTQTPSPTKATAPRYPQTGDLSAEWPFTAGEEPVLVPRPHQVSRVRSSCCLSPILCSPAMIAFLLTSVLMIPHAGGHPLDTPHLPQELPPGLPNNINITFFSGMFKNVESVAEIFDCLGPHFTWLQAVFTNFPVLIQFVNGMKCVAGLCPRDFEDYGCTCRFEMEGLPVDESDSCCFQHRRCYEEAAEMDCLQDPAKLSTEVNCVSKKIICESKDNCEHLLCTCDKAAIECLARSSLNSSLNLLDTSFCLAQTPETTIKEDLTTLLPRVVPVEPTDTSLTALSGEVAAETEADRLITLSKKKAGHDQEGVGAARATSPPGSAEIVATRVTAKIVTLVPAGIKSLGLAVSSVENDPEETTEKACDRFTFLHLGSGDNMQVMPQLGEMLFCLTSRCPEEFESYGCYCGQEGRGEPRDDLDRCCLSHHCCLEQVRRLGCLLERLPWSPVVCVDHTPKCGGQSLCEKLLCACDQTAAECMTSASFNQSLKSPSRLGCPGQPAACEDSLHPVPAAPTLGSSSEEDSEEDPPQEDLGRAKRFLRKSLGPLGIGPLHGR

SEQ ID NO: 1609 - protein, 452 aa, Homo sapiens
MELALRRSPVPRWLLLLPLLLGLNAGAVIDWPTEEGKEVWDYVTVRKDAYMFWWLYYATNSCKNFSELPLVMWLQGGPGGSSTGFGNFEEIGPLDSDLKPRKTTWLQAASLLFVDNPVGTGFSYVNGSGAYAKDLAMVASDMMVLLKTFFSCHKEFQTVPFYIFSESYGGKMAAGIGLELYKAIQRGTIKCNFAGVALGDSWISPVDSVLSWGPYLYSMSLLEDKGLAEVSKVAEQVLNAVNKGLYREATELWGKAEMIIEQNTDGVNFYNILTKSTPTSTMESSLEFTQSHLVCLCQRHVRHLQRDALSQLMNGPIRKKLKIIPEDQSWGGQATNVFVNMEEDFMKPVISIVDELLEAGINVTVYNGQLDLIVDTMGQEAWVRKLKWPELPKFSQLKWKALYSDPKSLETSAFVKSYKNLAFYWILKAGHMVPSDQGDMALKMMRLVTQQE

SEQ ID NO: 1610 - protein, 712 aa, Homo sapiens
MRVLLHLPALLASLILLQAAASTTRAQTTRTSAISDTVSQAKVQVNKAFLDSRTRLKTAMSSETPTSRQLSEYLKHAKGRTRTAIRNGQVWEESLKRLRQKASLTNVTDPSLDLTSLSLEVGCGAPAPVVRCDPCSPYRTITGDCNNRRKPALGAANRALARWLPAEYEDGLSLPFGWTPGKTRNGFPLPLAREVSNKIVGYLNEEGVLDQNRSLLFMQWGQIVDHDLDFAPDTELGSSEYSKAQCDEYCIQGDNCFPIMFPPNDPKAGTQGKCMPFFRAGFVCPTPPYKSLAREQINALTSFLDASFVYSSEPSLASRLRNLSSPLGLMAVNQEVSDHGLPYLPYDSKKPSPCEFINTTARVPCFLAGDSRASEHILLATSHTLFLREHNRLARELKRLNPQWDGEKLYQEARKILGAFVQIITFRDYLPILLGDHMQKWIPPYQGYSESVDPRISNVFTFAFRFGHLEVPSSMFRLDENYQPWGPEPELPLHTLFFNTWRMVKDGGIDPLVRGLLAKKSKLMKQNKMMTGELRNKLFQPTHRIHGFDLAAINTQRCRDHGQPGYNSWRAFCDLSQPQTLEELNTVLKSKMLAKKLLGLYGTPDNIDIWIGAIAEPLVERGRVGPLLACLLGKQFQQIRDGDRFWWENPGVFTNEQKDSLQKMSFSRLVCDNTRITKVPRDPFWANSYPYDFVDCSAIDKLDLSPWASVKN

SEQ ID NO: 1611 - protein, 964 aa, Homo sapiens
MDEQSVESIAEVFRCFICMEKLRDARLCPHCSKLCCFSCIRRWLTEQRAQCPHCRAPLQLRELVNCRWAEEVTQQLDTLQLCSLTKHEENEKDKCENHHEKLSVFCWTCKKCICHQCALWGGMHGGHTFKPLAEIYEQHVTKVNEEVAKLRRRLMELISLVQEVERNVEAVRNAKDERVREIRNAVEMMIARLDTQLKNKLITLMGQKTSLTQETELLESLLQEVEHQLRSCSKSELISKSSEILMMFQQVHRKPMASFVTTPVPPDFTSELVPSYDSATFVLENFSTLRQRADPVYSPPLQVSGLCWRLKVYPDGNGVVRGYYLSVFLELSAGLPETSKYEYRVEMVHQSCNDPTKNIIREFASDFEVGECWGYNRFFRLDLLANEGYLNPQNDTVILRFQVRSPTFFQKSRDQHWYITQLEAAQTSYIQQINNLKERLTIELSRTQKSRDLSPPDNHLSPQNDDALETRAKKSACSDMLLEGGPTTASVREAKEDEEDEEKIQNEDYHHELSDGDLDLDLVYEDEVNQLDGSSSSASSTATSNTEENDIDEETMSGENDVEYNNMELEEGELMEDAAAAGPAGSSHGYVGSSSRISRRTHLCSAATSSLLDIDPLILIHLLDLKDRSSIENLWGLQPRPPASLLQPTASYSRKDKDQRKQQAMWRVPSDLKMLKRLKTQMAEVRCMKTDVKNTLSEIKSSSAASGDMQTSLFSADQAALAACGTENSGRLQDLGMELLAKSSVANCYIRNSTNKKSNSPKPARSSVAGSLSLRRAVDPGENSRSKGDCQTLSEGSPGSSQSGSRHSSPRALIHGSIGDILPKTEDRQCKALDSDAVVVAVFSGLPAVEKRRKMVTLGANAKGGHLEGLQMTDLENNSETGELQPVLPEGASAAPEEGMSSDSDIECDTENEEQEEHTSVGGFHDSFMVMTQPPDEDTHSSFPDGEQIGPEDLSFNTDENSGR

SEQ ID NO: 1612 - protein, 567 aa, Homo sapiens
MRPDSPTMAAPAESLRRRKTGYSDPEPESPPAPGRGPAGSPAHLHTGTFWLTRIVLLKALAFVYFVAFLVAFHQNKQLIGDRGLLPCRVFLKNFQQYFQDRTSWEVFSYMPTILWLMDWSDMNSNLDLLALLGLGISSFVLITGCANMLLMAALWGLYMSLVNVGHVWYSFGWESQLLETGFLGIFLCPLWTLSRLPQHTPTSRIVLWGFRWLIFRIMLGAGLIKIRGDRCWRDLTCMDFHYETQPMPNPVAYYLHHSPWWFHRFETLSNHFIELLVPFFLFLGRRACIIHGVLQILFQAVLIVSGNLSFLNWLTMVPSLACFDDATLGFLFPSGPGSLKDRVLQMQRDIRGARPEPRFGSVVRRAANVSLGVLLAWLSVPVVLNLLSSRQVMNTHFNSLHIVNTYGAFGSITKERAEVILQGTASSNASAPDAMWEDYEFKCKPGDPSRRPCLISPYHYRLDWLMWFAAFQTYEHNDWIIHLAGKLLASDAEALSLLAHNPFAGRPPPRWVRGEHYRYKFSRPGGRHAAEGKWWVRKRIGAYFPPLSLEELRPYFRDRGWPLPGPL

SEQ ID NO: 1613 - protein, 4303 aa, Homo sapiens
MPPAAPARLALALGLGLWLGALAGGPGRGCGPCEPPCLCGPAPGAACRVNCSGRGLRTLGPALRIPADATALDVSHNLLRALDVGLLANLSALAELDISNNKISTLEEGIFANLFNLSEINLSGNPFECDCGLAWLPRWAEEQQVRVVQPEAATCAGPGSLAGQPLLGIPLLDSGCGEEYVACLPDNSSGTVAAVSFSAAHEGLLQPEACSAFCFSTGQGLAALSEQGWCLCGAAQPSSASFACLSLCSGPPPPPAPTCRGPTLLQHVFPASPGATLVGPHGPLASGQLAAFHIAAPLPVTATRWDFGDGSAEVDAAGPAASHRYVLPGRYHVTAVLALGAGSALLGTDVQVEAAPAALELVCPSSVQSDESLDLSIQNRGGSGLEAAYSIVALGEEPARAVHPLCPSDTEIFPGNGHCYRLVVEKAAWLQAQEQCQAWAGAALAMVDSPAVQRFLVSRVTRSLDVWIGFSTVQGVEVGPAPQGEAFSLESCQNWLPGEPHPATAEHCVRLGPTGWCNTDLCSAPHSYVCELQPGGPVQDAENLLVGAPSGDLQGPLTPLAQQDGLSAPHEPVEVMVFPGLRLSREAFLTTAEFGTQELRRPAQLRLQVYRLLSTAGTPENGSEPESRSPDNRTQLAPACMPGGRWCPGANICLPLDASCHPQACANGCTSGPGLPGAPYALWREFLFSVPAGPPAQYSVTLHGQDVLMLPGDLVGLQHDAGPGALLHCSPAPGHPGPRAPYLSANASSWLPHLPAQLEGTWACPACALRLLAATEQLTVLLGLRPNPGLRLPGRYEVRAEVGNGVSRHNLSCSFDVVSPVAGLRVIYPAPRDGRLYVPTNGSALVLQVDSGANATATARWPGGSVSARFENVCPALVATFVPGCPWETNDTLFSVVALPWLSEGEHVVDVVVENSASRANLSLRVTAEEPICGLRATPSPEARVLQGVLVRYSPVVEAGSDMVFRWTINDKQSLTFQNVVFNVIYQSAAVFKLSLTASNHVSNVTVNYNVTVERMNRMQGLQVSTVPAVLSPNATLALTAGVLVDSAVEVAFLWTFGDGEQALHQFQPPYNESFPVPDPSVAQVLVEHNVMHTYAAPGEYLLTVLASNAFENLTQQVPVSVRASLPSVAVGVSDGVLVAGRPVTFYPHPLPSPGGVLYTWDFGDGSPVLTQSQPAANHTYASRGTYHVRLEVNNTVSGAAAQADVRVFEELRGLSVDMSLAVEQGAPVVVSAAVQTGDNITWTFDMGDGTVLSGPEATVEHVYLRAQNCTVTVGAASPAGHLARSLHVLVFVLEVLRVEPAACIPTQPDARLTAYVTGNPAHYLFDWTFGDGSSNTTVRGCPTVTHNFTRSGTFPLALVLSSRVNRAHYFTSICVEPEVGNVTLQPERQFVQLGDEAWLVACAWPPFPYRYTWDFGTEEAAPTRARGPEVTFIYRDPGSYLVTVTASNNISAANDSALVEVQEPVLVTSIKVNGSLGLELQQPYLFSAVGRGRPASYLWDLGDGGWLEGPEVTHAYNSTGDFTVRVAGWNEVSRSEAWLNVTVKRRVRGLVVNASRTVVPLNGSVSFSTSLEAGSDVRYSWVLCDRCTPIPGGPTISYTFRSVGTFNIIVTAENEVGSAQDSIFVYVLQLIEGLQVVGGGRYFPTNHTVQLQAVVRDGTNVSYSWTAWRDRGPALAGSGKGFSLTVLEAGTYHVQLRATNMLGSAWADCTMDFVEPVGWLMVAASPNPAAVNTSVTLSAELAGGSGVVYTWSLEEGLSWETSEPFTTHSFPTPGLHLVTMTAGNPLGSANATVEVDVQVPVSGLSIRASEPGGSFVAAGSSVPFWGQLATGTNVSWCWAVPGGSSKRGPHVTMVFPDAGTFSIRLNASNAVSWVSATYNLTAEEPIVGLVLWASSKVVAPGQLVHFQILLAAGSAVTFRLQVGGANPEVLPGPRFSHSFPRVGDHVVSVRGKNHVSWAQAQVRIVVLEAVSGLQVPNCCEPGIATGTERNFTARVQRGSRVAYAWYFSLQKVQGDSLVILSGRDVTYTPVAAGLLEIQVRAFNALGSENRTLVLEVQDAVQYVALQSGPCFTNRSAQFEAATSPSPRRVAYHWDFGDGSPGQDTDEPRAEHSYLRPGDYRVQVNASNLVSFFVAQATVTVQVLACREPEVDVVLPLQVLMRRSQRNYLEAHVDLRDCVTYQTEYRWEVYRTASCQRPGRPARVALPGVDVSRPRLVLPRLALPVGHYCFVFVVSFGDTPLTQSIQANVTVAPERLVPIIEGGSYRVWSDTRDLVLDGSESYDPNLEDGDQTPLSFHWACVASTQREAGGCALNFGPRGSSTVTIPRERLAAGVEYTFSLTVWKAGRKEEATNQTVLIRSGRVPIVSLECVSCKAQAVYEVSRSSYVYLEGRCLNCSSGSKRGRWAARTFSNKTLVLDETTTSTGSAGMRLVLRRGVLRDGEGYTFTLTVLGRSGEEEGCASIRLSPNRPPLGGSCRLFPLGAVHALTTKVHFECTGWHDAEDAGAPLVYALLLRRCRQGHCEEFCVYKGSLSSYGAVLPPGFRPHFEVGLAVVVQDQLGAAVVALNRSLAITLPEPNGSATGLTVWLHGLTASVLPGLLRQADPQHVIEYSLALVTVLNEYERALDVAAEPKHERQHRAQIRKNITETLVSLRVHTVDDIQQIAAALAQCMGPSRELVCRSCLKQTLHKLEAMMLILQAETTAGTVTPTAIGDSILNITGDLIHLASSDVRAPQPSELGAESPSRMVASQAYNLTSALMRILMRSRVLNEEPLTLAGEEIVAQGKRSDPRSLLCYGGAPGPGCHFSIPEAFSGALANLSDVVQLIFLVDSNPFPFGYISNYTVSTKVASMAFQTQAGAQIPIERLASERAITVKVPNNSDWAARGHRSSANSANSVVVQPQASVGAVVTLDSSNPAAGLHLQLNYTLLDGHYLSEEPEPYLAVYLHSEPRPNEHNCSASRRIRPESLQGADHRPYTFFISPGSRDPAGSYHLNLSSHFRWSALQVSVGLYTSLCQYFSEEDMVWRTEGLLPLEETSPRQAVCLTRHLTAFGASLFVPPSHVRFVFPEPTADVNYIVMLTCAVCLVTYMVMAAILHKLDQLDASRGRAIPFCGQRGRFKYEILVKTGWGRGSGTTAHVGIMLYGVDSRSGHRHLDGDRAFHRNSLDIFRIATPHSLGSVWKIRVWHDNKGLSPAWFLQHVIVRDLQTARSAFFLVNDWLSVETEANGGLVEKEVLAASDAALLRFRRLLVAELQRGFFDKHIWLSIWDRPPRSRFTRIQRATCCVLLICLFLGANAVWYGAVGDSAYSTGHVSRLSPLSVDTVAVGLVSSVVVYPVYLAILFLFRMSRSKVAGSPSPTPAGQQVLDIDSCLDSSVLDSSFLTFSGLHAEQAFVGQMKSDLFLDDSKSLVCWPSGEGTLSWPDLLSDPSIVGSNLRQLARGQAGHGLGPEEDGFSLASPYSPAKSFSASDEDLIQQVLAEGVSSPAPTQDTHMETDLLSSLSSTPGEKTETLALQRLGELGPPSPGLNWEQPQAARLSRTGLVEGLRKRLLPAWCASLAHGLSLLLVAVAVAVSGWVGASFPPGVSVAWLLSSSASFLASFLGWEPLKVLLEALYFSLVAKRLHPDEDDTLVESPAVTPVSARVPRVRPPHGFALFLAKEEARKVKRLHGMLRSLLVYMLFLLVTLLASYGDASCHGHAYRLQSAIKQELHSRAFLAITRSEELWPWMAHVLLPYVHGNQSSPELGPPRLRQVRLQEALYPDPPGPRVHTCSAAGGFSTSDYDVGWESPHNGSGTWAYSAPDLLGAWSWGSCAVYDSGGYVQELGLSLEESRDRLRFLQLHNWLDNRSRAVFLELTRYSPAVGLHAAVTLRLEFPAAGRALAALSVRPFALRRLSAGLSLPLLTSVCLLLFAVHFAVAEARTWHREGRWRVLRLGAWARWLLVALTAATALVRLAQLGAADRQWTRFVRGRPRRFTSFDQVAQLSSAARGLAASLLFLLLVKAAQQLRFVRQWSVFGKTLCRALPELLGVTLGLVVLGVAYAQLAILLVSSCVDSLWSVAQALLVLCPGTGLSTLCPAESWHLSPLLCVGLWALRLWGALRLGAVILRWRYHALRGELYRPAWEPQDYEMVELFLRRLRLWMGLSKVKEFRHKVRFEGMEPLPSRSSRGSKVSPDVPPPSAGSDASHPSTSSSQLDGLSVSLGRLGTRCEPEPSRLQAVFEALLTQFDRLNQATEDVYQLEQQLHSLQGRRSSRAPAGSSRGPSPGLRPALPSRLARASRGVDLATGPSRTPLRAKNKVHPSST

SEQ ID NO: 1614 - protein, 855 aa, Homo sapiens
MSEARRDSTSSLQRKKPPWLKLDIPSAVPLTAEEPSFLQPLRRQAFLRSVSMPAETAHISSPHHELRRPVLQRQTSITQTIRRGTADWFGVSKDSDSTQKWQRKSIRHCSQRYGKLKPQVLRELDLPSQDNVSLTSTETPPPLYVGPCQLGMQKIIDPLARGRAFRVADDTAEGLSAPHTPVTPGAASLCSFSSSRSGFHRLPRRRKRESVAKMSFRAAAALMKGRSVRDGTFRRAQRRSFTPASFLEEDTTDFPDELDTSFFAREGILHEELSTYPDEVFESPSEAALKDWEKAPEQADLTGGALDRSELERSHLMLPLERGWRKQKEGAAAPQPKVRLRQEVVSTAGPRRGQRIAVPVRKLFAREKRPYGLGMVGRLTNRTYRKRIDSFVKRQIEDMDDHRPFFTYWLTFVHSLVTILAVCIYGIAPVGFSQHETVDSVLRNRGVYENVKYVQQENFWIGPSSEALIHLGAKFSPCMRQDPQVHSFIRSAREREKHSACCVRNDRSGCVQTSEEECSSTLAVWVKWPIHPSAPELAGHKRQFGSVCHQDPRVCDEPSSEDPHEWPEDITKWPICTKNSAGNHTNHPHMDCVITGRPCCIGTKGRCEITSREYCDFMRGYFHEEATLCSQVHCMDDVCGLLPFLNPEVPDQFYRLWLSLFLHAGILHCLVSICFQMTVLRDLEKLAGWHRIAIIYLLSGVTGNLASAIFLPYRAEVGPAGSQFGILACLFVELFQSWQILARPWRAFFKLLAVVLFLFTFGLLPWIDNFAHISGFISGLFLSFAFLPYISFGKFDLYRKRCQIIIFQVVFLGLLAGLVVLFYVYPVRCEWCEFLTCIPFTDKFCEKYELDAQLH

SEQ ID NO: 1615 - protein, 901 aa, Homo sapiens
MANVSKKVSWSGRDRDDEEAAPLLRRTARPGGGTPLLNGAGPGAARQDMDPPHPFPKEIPHNEKLLSLKYESLDYDNSENQLFLEEERRINHTAFRTVEIKRWVICALIGILTGLVACFIDIVVENLAGLKYRVIKGNIDKFTEKGGLSFSLLLWATLNAAFVLVGSVIVAFIEPVAAGSGIPQIKCFLNGVKIPHVVRLKTLVIKVSGVILSVVGGLAVGKEGPMIHSGSVIAAGISQGRSTSLKRDFKIFEYFRRDTEKRDFVSAGAAAGVSAAFGAPVGGVLFSLEEGASFWNQFLTWRIFFASMISTFTLNFVLSIYHGNMWDLSSPGLINFGRFDSEKMAYTIHEIPVFIAMGVVGGVLGAVFNALNYWLTMFRIRYIHRPCLQVIEAVLVAAVTATVAFVLIYSSRDCQPLQGGSMSYPLQLFCADGEYNSMAAAFFNTPEKSVVSLFHDPPGSYNPLTLGLFTLVYFFLACWTYGLTVSAGVFIPSLLIGAAWGRLFGISLSYLTGAAIWADPGKYALMGAAAQLGGIVRMTLSLTVIMMEATSNVTYGFPIMLVLMTAKIVGDVFIEGLYDMHIQLQSVPFLHWEAPVTSHSLTAREVMSTPVTCLRRREKVGVIVDVLSDTASNHNGFPVVEHADDTQPARLQGLILRSQLIVLLKHKVFVERSNLGLVQRRLRLKDFRDAYPRFPPIQSIHVSQDERECTMDLSEFMNPSPYTVPQACVAPTGVQAVPGPGPAAPGGGGQPQSGCRVGDQEGPRQVPPGKERLGGALAGPDVRPSPAHNGHWRWHPGPSAFPPGVTGFSAQTMLPSSGNGEHPAAGRAGGRRGTDPLAGLTLLWAVVSPLGASLRRPSLHSPRLGFFTSRDQLCVCDLPTGLSASWEPAAGPAPACLCPCA

SEQ ID NO: 1616 - protein, 837 aa, Homo sapiens
MEPAPSEVRLAVREAIHALSSSEDGGHIFCTLESLKRYLGEMEPPALPREKEEFASAHFSPVLRCLASRLSPAWLELLPHGRLEELWASFFLEGPADQAFLVLMETIEGAAGPSFRLMKMARLLARFLREGRLAVLMEAQCRQQTQPGFILLRETLLGKVVALPDHLGNRLQQENLAEFFPQNYFRLLGEEVVRVLQAVVDSLQGGLDSSVSFVSQVLGKACVHGRQQEILGVLVPRLAALTQGSYLHQRVCWRLVEQVPDRAMEAVLTGLVEAALGPEVLSRLLGNLVVKNKKAQFVMTQKLLFLQSRLTTPMLQSLLGHLAMDSQRRPLLLQVLKELLETWGSSSAIRHTPLPQQRHVSKAVLICLAQLGEPELRDSRDELLASMMAGVKCRLDSSLPPVRRLGMIVAEVVSARIHPEGPPLKFQYEEDELSLELLALASPQPAGDGASEAGTSLVPATAEPPAETPAEIVDGGVPQAQLAGSDSDLDSDDEFVPYDMSGDRELKSSKAPAYVRDCVEALTTSEDIERWEAALRALEGLVYRSPTATREVSVELAKVLLHLEEKTCVVGFAGLRQRALVAVTVTDPAPVADYLTSQFYALNYSLRQRMDILDVLTLAAQELSRPGCLGRTPQPGSPSPNTPCLPEAAVSQPGSAVASDWRVVVEERIRSKTQRLSKGGPRQGPAGSPSRFNSVAGHFFFPLLQRFDRPLVTFDLLGEDQLVLGRLAHTLGALMCLAVNTTVAVAMGKALLEFVWALRFHIDAYVRQGLLSAVSSVLLSLPAARLLEDLMDELLEARSWLADVAEKDPDEDCRTLALRALLLLQRLKNRLLPPASP

SEQ ID NO: 1617 - protein, 862 aa, Homo sapiens
MNIQEQGFPLDLGASFTEDAPRPPVPGEEGELVSTDPRPASYSFCSGKGVGIKGETSTATPRRSDLDLGYEPEGSASPTPPYLKWAESLHSLLDDQDGISLFRTFLKQEGCADLLDFWFACTGFRKLEPCDSNEEKRLKLARAIYRKYILDNNGIVSRQTKPATKSFIKGCIMKQLIDPAMFDQAQTEIQATMEENTYPSFLKSDIYLEYTRTGSESPKVCSDQSSGSGTGKGISGYLPTLNEDEEWKCDQDMDEDDGRDAAPPGRLPQKLLLETAAPRVSSSRRYSEGREFRYGSWREPVNPYYVNAGYALAPATSANDSEQQSLSSDADTLSLTDSSVDGIPPYRIRKQHRREMQESVQVNGRVPLPHIPRTYRVPKEVRVEPQKFAEELIHRLEAVQRTREAEEKLEERLKRVRMEEEGEDGDPSSGPPGPCHKLPPAPAWHHFPPRCVDMGCAGLRDAHEENPESILDEHVQRVLRTPGRQSPGPGHRSPDSGHVAKMPVALGGAASGHGKHVPKSGAKLDAAGLHHHRHVHHHVHHSTARPKEQVEAEATRRAQSSFAWGLEPHSHGARSRGYSESVGAAPNASDGLAHSGKVGVACKRNAKKAESGKSASTEVPGASEDAEKNQKIMQWIIEGEKEISRHRRTGHGSSGTRKPQPHENSRPLSLEHPWAGPQLRTSVQPSHLFIQDPTMPPHPAPNPLTQLEEARRRLEEEEKRASRAPSKQRYVQEVMRRGRACVRPACAPVLHVVPAVSDMELSETETRSQRKVGGGSAQPCDSIVVAYYFCGEPIPYRTLVRGRAVTLGQFKELLTKKGSYRYYFKKVSDEFDCGVVFEEVREDEAVLPVFEEKIIGKVEKVD

SEQ ID NO: 1618 - protein, 949 aa, Homo sapiens
MSLAFKIFFPQTLRALSRKELCLFRKHHWRDVRQFSQWSETDLLHGHPLFLRRKPVLSFQGSHLRSRATYLVFLPGLHVGLCSGPCEMAEQRFCVDYAKRGTAGCKKCKEKIVKGVCRIGKVVPNPFSESGGDMKEWYHIKCMFEKLERARATTKKIEDLTELEGWEELEDNEKEQITQHIADLSSKAAGTPKKKAVVQAKLTTTGQVTSPVKGASFVTSTNPRKFSGFSAKPNNSGEAPSSPTPKRSLSSSKCDPRHKDCLLREFRKLCAMVADNPSYNTKTQIIQDFLRKGSAGDGFHGDVYLTVKLLLPGVIKTVYNLNDKQIVKLFSRIFNCNPDDMARDLEQGDVSETIRVFFEQSKSFPPAAKSLLTIQEVDEFLLRLSKLTKEDEQQQALQDIASRCTANDLKCIIRLIKHDLKMNSGAKHVLDALDPNAYEAFKASRNLQDVVERVLHNAQEVEKEPGQRRALSVQASLMTPVQPMLAEACKSVEYAMKKCPNGMFSEIKYDGERVQVHKNGDHFSYFSRSLKPVLPHKVAHFKDYIPQAFPGGHSMILDSEVLLIDNKTGKPLPFGTLGVHKKAAFQDANVCLFVFDCIYFNDVSLMDRPLCERRKFLHDNMVEIPNRIMFSEMKRVTKALDLADMITRVIQEGLEGLVLKDVKGTYEPGKRHWLKVKKDYLNEGAMADTADLVVLGAFYGQGSKGGMMSIFLMGCYDPGSQKWCTVTKCAGGHDDATLARLQNELDMVKISKDPSKIPSWLKVNKIYYPDFIVPDPKKAAVWEITGAEFSKSEAHTADGISIRFPRCTRIRDDKDWKSATNLPQLKELYQLSKEKADFTVVAGDEGSSTTGGSSEENKGPSGSAVSRKAPSKPSASTKKAEGKLSNSNSKDGNMQTAKPSAMKVGEKLATKSSPVKVGEKRKAADETLCQTKRRPASEQRGRTVPAGRR

SEQ ID NO: 1619 - protein, 533 aa, Homo sapiens
MSIQVEHPAGGYKKLFETVEELSSPLTAHVTGRIPLWLTGSLLRCGPGLFEVGSEPFYHLFDGQALLHKFDFKEGHVTYHRRFIRTDAYVRAMTEKRIVITEFGTCAFPDPCKNIFSRFFSYFRGVEVTDNALVNVYPVGEDYYACTETNFITKINPETLETIKQVDLCNYVSVNGATAHPHIENDGTVYNIGNCFGKNFSIAYNIVKIPPLQADKEDPISKSEIVVQFPCSDRFKPSYVHSFGLTPNYIVFVETPVKINLFKFLSSWSLWGANYMDCFESNETMGVWLHIADKKRKKYLNNKYRTSPFNLFHHINTYEDNGFLIVDLCCWKGFEFVYNYLYLANLRENWEEVKKNARKAPQPEVRRYVLPLNIDKADTGKNLVTLPNTTATAILCSDETIWLEPEVLFSGPRQAFEFPQINYQKYCGKPYTYAYGLGLNHFVPDRLCKLNVKTKETWVWQEPDSYPSEPIFVSHPDALEEDDGVVLSVVVSPGAGQKPAYLLILNAKDLSEVARAEVEINIPVTFHGLFKKS

SEQ ID NO: 1620 - protein, 2442 aa, Homo sapiens
MAENLLDGPPNPKRAKLSSPGFSANDSTDFGSLFDLENDLPDELIPNGGELGLLNSGNLVPDAASKHKQLSELLRGGSGSSINPGIGNVSASSPVQQGLGGQAQGQPNSANMASLSAMGKSPLSQGDSSAPSLPKQAASTSGPTPAASQALNPQAQKQVGLATSSPATSQTGPGICMNANFNQTHPGLLNSNSGHSLINQASQGQAQVMNGSLGAAGRGRGAGMPYPTPAMQGASSSVLAETLTQVSPQMTGHAGLNTAQAGGMAKMGITGNTSPFGQPFSQAGGQPMGATGVNPQLASKQSMVNSLPTFPTDIKNTSVTNVPNMSQMQTSVGIVPTQAIATGPTADPEKRKLIQQQLVLLLHAHKCQRREQANGEVRACSLPHCRTMKNVLNHMTHCQAGKACQVAHCASSRQIISHWKNCTRHDCPVCLPLKNASDKRNQQTILGSPASGIQNTIGSVGTGQQNATSLSNPNPIDPSSMQRAYAALGLPYMNQPQTQLQPQVPGQQPAQPQTHQQMRTLNPLGNNPMNIPAGGITTDQQPPNLISESALPTSLGATNPLMNDGSNSGNIGTLSTIPTAAPPSSTGVRKGWHEHVTQDLRSHLVHKLVQAIFPTPDPAALKDRRMENLVAYAKKVEGDMYESANSRDEYYHLLAEKIYKIQKELEEKRRSRLHKQGILGNQPALPAPGAQPPVIPQAQPVRPPNGPLSLPVNRMQVSQGMNSFNPMSLGNVQLPQAPMGPRAASPMNHSVQMNSMGSVPGMAISPSRMPQPPNMMGAHTNNMMAQAPAQSQFLPQNQFPSSSGAMSVGMGQPPAQTGVSQGQVPGAALPNPLNMLGPQASQLPCPPVTQSPLHPTPPPASTAAGMPSLQHTTPPGMTPPQPAAPTQPSTPVSSSGQTPTPTPGSVPSATQTQSTPTVQAAAQAQVTPQPQTPVQPPSVATPQSSQQQPTPVHAQPPGTPLSQAAASIDNRVPTPSSVASAETNSQQPGPDVPVLEMKTETQAEDTEPDPGESKGEPRSEMMEEDLQGASQVKEETDIAEQKSEPMEVDEKKPEVKVEVKEEEESSSNGTASQSTSPSQPRKKIFKPEELRQALMPTLEALYRQDPESLPFRQPVDPQLLGIPDYFDIVKNPMDLSTIKRKLDTGQYQEPWQYVDDVWLMFNNAWLYNRKTSRVYKFCSKLAEVFEQEIDPVMQSLGYCCGRKYEFSPQTLCCYGKQLCTIPRDAAYYSYQNRYHFCEKCFTEIQGENVTLGDDPSQPQTTISKDQFEKKKNDTLDPEPFVDCKECGRKMHQICVLHYDIIWPSGFVCDNCLKKTGRPRKENKFSAKRLQTTRLGNHLEDRVNKFLRRQNHPEAGEVFVRVVASSDKTVEVKPGMKSRFVDSGEMSESFPYRTKALFAFEEIDGVDVCFFGMHVQEYGSDCPPPNTRRVYISYLDSIHFFRPRCLRTAVYHEILIGYLEYVKKLGYVTGHIWACPPSEGDDYIFHCHPPDQKIPKPKRLQEWYKKMLDKAFAERIIHDYKDIFKQATEDRLTSAKELPYFEGDFWPNVLEESIKELEQEEEERKKEESTAASETTEGSQGDSKNAKKKNNKKTNKNKSSISRANKKKPSMPNVSNDLSQKLYATMEKHKEVFFVIHLHAGPVINTLPPIVDPDPLLSCDLMDGRDAFLTLARDKHWEFSSLRRSKWSTLCMLVELHTQGQDRFVYTCNECKHHVETRWHCTVCEDYDLCINCYNTKSHAHKMVKWGLGLDDEGSSQGEPQSKSPQESRRLSIQRCIQSLVHACQCRNANCSLPSCQKMKRVVQHTKGCKRKTNGGCPVCKQLIALCCYHAKHCQENKCPVPFCLNIKHKLRQQQIQHRLQQAQLMRRRMATMNTRNVPQQSLPSPTSAPPGTPTQQPSTPQTPQPPAQPQPSPVSMSPAGFPSVARTQPPTTVSTGKPTSQVPAPPPPAQPPPAAVEAARQIEREAQQQQHLYRVNINNSMPPGRTGMGTPGSQMAPVSLNVPRPNQVSGPVMPSMPPGQWQQAPLPQQQPMPGLPRPVISMQAQAAVAGPRMPSVQPPRSISPSALQDLLRTLKSPSSPQQQQQVLNILKSNPQLMAAFIKQRTAKYVANQPGMQPQPGLQSQPGMQPQPGMHQQPSLQNLNAMQAGVPRPGVPPQQQAMGGLNPQGQALNIMNPGHNPNMASMNPQYREMLRRQLLQQQQQQQQQQQQQQQQQQGSAGMAGGMAGHGQFQQPQGPGGYPPAMQQQQRMQQHLPLQGSSMGQMAAQMGQLGQMGQPGLGADSTPNIQQALQQRILQQQQMKQQIGSPGQPNPMSPQQHMLSGQPQASHLPGQQIATSLSNQVRSPAPVQSPRPQSQPPHSSPSPRIQPQPSPHHVSPQTGSPHPGLAVTMASSIDQGHLGNPEQSAMLPQLNTPSRSALSSELSLVGDTTGDTLEKFVEGL

SEQ ID NO: 1621 - protein, 464 aa, Homo sapiens
MAASCLVLLALCLLLPLLLLGGWKRWRRGRAARHVVAVVLGDVGRSPRMQYHALSLAMHGFSVTLLGFCNSKPHDELLQNNRIQIVGLTELQSLAVGPRVFQYGVKVVLQAMYLLWKLMWREPGAYIFLQNPPGLPSIAVCWFVGCLCGSKLVIDWHNYGYSIMGLVHGPNHPLVLLAKWYEKFFGRLSHLNLCVTNAMREDLADNWHIRAVTVYDKPASFFKETPLDLQHRLFMKLGSMHSPFRARSEPEDPVTERSAFTERDAGSGLVTRLRERPALLVSSTSWTEDEDFSILLAALEKFEQLTLDGHNLPSLVCVITGKGPLREYYSRLIHQKHFQHIQVCTPWLEAEDYPLLLGSADLGVCLHTSSSGLDLPMKVVDMFGCCLPVCAVNFKCLHELVKHEENGLVFEDSEELAAQLQMLFSNFPDPAGKLNQFRKNLRESQQLRWDESWVQTVLPLVMDT

SEQ ID NO: 1622 - protein, 1134 aa, Homo sapiens
MSEPHRVQFTSLPGSLNPAFLKKSRKEEAGAGEQHQDCEPAAAAVRITLTLFEPDHKRCPEFFYPELVKNIRGKVKGLQPGDKKKDLSDPFNDEEKERHKVEALARKFEEKYGGKKRRKDRIQDLIDMGYGYDESDSFIDNSEAYDELVPASLTTKYGGFYINSGTLQFRQASESEDDFIKEKKKKSPKKRKLKEGGEKIKKKKKDDTYDKEKKSKKSKFSKAGFTALNASKEKKKKKYSGALSVKEMLKKFQKEKEAQKKREEEHKPVAVPSAEAQGLRELEGASDPLLSLFGSTSDNDLLQAATAMDSLTDLDLEHLLSESPEGSPFRDMDDGSDSLGVGLDQEFRQPSSLPEGLPAPLEKRVKELAQAARAAEGESRQKFFTQDINGILLDIEAQTRELSSQVRSGVYAYLASFLPCSKDALLKRARKLHLYEQGGRLKEPLQKLKEAIGRAMPEQMAKYQDECQAHTQAKVAKMLEEEKDKEQRDRICSDEEEDEEKGGRRIMGPRKKFQWNDEIRELLCQVVKIKLESQDLERNNKAQAWEDCVKGFLDAEVKPLWPKGWMQARTLFKESRRGHGHLTSILAKKKVMAPSKIKVKESSTKPDKKVSVPSGQIGGPIALPSDHQTGGLSIGASSRELPSQASGGLANPPPVNLEDSLDEDLIRNPASSVEAVSKELAALNSRAAGNSEFTLPAPSKAPAEKVGGVLCTEEKRNFAKPSPSAPPPASSLQSPLNFLAEQALALGQSSQEKKPESSGYKELSCQAPLNKGLPEVHQSKAKHHSLPRTSHGPQVAVPVPGPQVKVFHAGTQQQKNFTPPSPFANKLQGPKASPTQCHRSLLQLVKTAAKGQGFHPSAPATSGGLSASSSSSHKTPASSSSALSHPAKPHSVSSAGSSYKNNPFASSISKHGVSSGSSSSGGTPVQSSVSGSLVPGIQPPSVGQATSRPVPSSAGKKMPVSQKLTLVAPPGGPNGDSSGGTQGVAKLLTSPSLKPSAVSSVTSSTSLSKGASGTVLLAGSSLMASPYKSSSPKLSGAMSSNSLGIITPVPIPVHVLSFSADSSAKAGVSKDAIVTGPAPGSFHHGLGHSLLAGLHSSPPHAAPLPHAAVPTHIPQSLPGASQLHGKGPAVPRKL

SEQ ID NO: 1623 - protein, 1284 aa, Homo sapiens
MHKKRVEEGEASDFSLAWDSSVTAAGGLEGEPECDQKTSRALEDRNSVTSQEERNEDDEDMEDESIYTCDHCQQDFESLADLTDHRAHRCPGDGDDDPQLSWVASSPSSKDVASPTQMIGDGCDLGLGEEEGGTGLPYPCQFCDKSFIRLSYLKRHEQIHSDKLPFKCTYCSRLFKHKRSRDRHIKLHTGDKKYHCHECEAAFSRSDHLKIHLKTHSSSKPFKCTVCKRGFSSTSSLQSHMQAHKKNKEHLAKSEKEAKKDDFMCDYCEDTFSQTEELEKHVLTRHPQLSEKADLQCIHCPEVFVDENTLLAHIHQAHANQKHKCPMCPEQFSSVEGVYCHLDSHRQPDSSNHSVSPDPVLGSVASMSSATPDSSASVERGSTPDSTLKPLRGQKKMRDDGQGWTKVVYSCPYCSKRDFNSLAVLEIHLKTIHADKPQQSHTCQICLDSMPTLYNLNEHVRKLHKNHAYPVMQFGNISAFHCNYCPEMFADINSLQEHIRVSHCGPNANPSDGNNAFFCNQCSMGFLTESSLTEHIQQAHCSVGSAKLESPVVQPTQSFMEVYSCPYCTNSPIFGSILKLTKHIKENHKNIPLAHSKKSKAEQSPVSSDVEVSSPKRQRLSASANSISNGEYPCNQCDLKFSNFESFQTHLKLHLELLLRKQACPQCKEDFDSQESLLQHLTVHYMTTSTHYVCESCDKQFSSVDDLQKHLLDMHTFVLYHCTLCQEVFDSKVSIQVHLAVKHSNEKKMYRCTACNWDFRKEADLQVHVKHSHLGNPAKAHKCIFCGETFSTEVELQCHITTHSKKYNCKFCSKAFHAIILLEKHLREKHCVFDAATENGTANGVPPMATKKAEPADLQGMLLKNPEAPNSHEASEDDVDASEPMYGCDICGAAYTMEVLLQNHRLRDHNIRPGEDDGSRKKAEFIKGSHKCNVCSRTFFSENGLREHLQTHRGPAKHYMCPICGERFPSLLTLTEHKVTHSKSLDTGTCRICKMPLQSEEEFIEHCQMHPDLRNSLTGFRCVVCMQTVTSTLELKIHGTFHMQKLAGSSAASSPNGQGLQKLYKCALCLKEFRSKQDLVKLDVNGLPYGLCAGCMARSANGQVGGLAPPEPADRPCAGLRCPECSVKFESAEDLESHMQVDHRDLTPETSGPRKGTQTSPVPRKKTYQCIKCQMTFENEREIQIHVANHMIEEGINHECKLCNQMFDSPAKLLCHLIEHSFEGMGGTFKCPVCFTVFVQANKLQQHIFAVHGQEDKIYDCSQCPQKFFFQTELQNHTMSQHAQ

SEQ ID NO: 1624 - protein, 896 aa, Homo sapiens
MAARAVLDEFTAPAEKAELLEQSRGRIEGLFGVSLAVLGALGAEEPLPARIWLQLCGAQEAVHSAKEYIKGICEPELEERECYPKDMHCIFVGAESLFLKSLIQDTCADLCILDIGLLGIRGSAEAVVMARSHIQQFVKLFENKENLPSSQKESEVKREFKQFVEAHADNYTMDLLILPTSLKKELLTLTQGEENLFETGDDEVIEMRDSQQTEFTQNAATGLNISRDETVLQEEARNKAGTPVSELTKQMDTVLSSSPDVLFDPINGLTPDEEALSNERICQKRRFSDSEERHTKKQFSLENVQEGEILHDAKTLAGNVIADLSDSSADSENLSPDIKETTEEMEYNILVNFFKTMGYSQEIVEKVIKVYGPSTEPLLLLEEIEKENKRFQEDREFSAGTVYPETNKTKNKGVYSSTNELTTDSTPKKTQAHTQQNMVEKFSQLPFKVEAKPCTSNCRINTFRTVPIEQKHEVWGSNQNYICNTDPETDGLSPSVASPSPKEVNFVSRGASSHQPRVPLFPENGLHQQPEPLLPNNMKSACEKRLGCCSSPHSKPNCSTLSPPMPLPQLLPSVTDARSAGPSDHIDSSVTGVQRFRDTLKIPYKLELKNEPGRTDLKHIVIDGSNVAITHGLKKFFSCRGIAIAVEYFWKLGNRNITVFVPQWRTRRDPNVTEQHFLTQLQELGILSLTPARMVFGERIASHDDRFLLHLADKTGGIIVTNDNFREFVNESVSWREIITKRLLQYTFVGDIFMVPDDPLGRSGPRLEEFLQKEVCLRDMQPLLSALPNVGMFDPSFRVPGTQAASTSHQPPTRIQGAPSSHWLPQQPHFPLLPALPSLQQNLPMPAQRSSAETNELREALLKIFPDSEQRLKIDQILVAHPYMKDLNALSAMVLD

SEQ ID NO: 1625 - protein, 470 aa, Homo sapiens
MPGFDYKFLEKPKRRLLCPLCGKPMREPVQVSTCGHRFCDTCLQEFLSEGVFKCPEDQLPLDYAKIYPDPELEVQVLGLPIRCIHSEEGCRWSGPLRHLQGHLNTCSFNVIPCPNRCPMKLSRRDLPAHLQHDCPKRRLKCEFCGCDFSGEAYESHEGMCPQESVYCENKCGARMMRRLLAQHATSECPKRTQPCTYCTKEFVFDTIQSHQYQCPRLPVACPNQCGVGTVAREDLPGHLKDSCNTALVLCPFKDSGCKHRCPKLAMARHVEESVKPHLAMMCALVSRQRQELQELRRELEELSVGSDGVLIWKIGSYGRRLQEAKAKPNLECFSPAFYTHKYGYKLQVSAFLNGNGSGEGTHLSLYIRVLPGAFDNLLEWPFARRVTFSLLDQSDPGLAKPQHVTETFHPDPNWKNFQKPGTWRGSLDESSLGFGYPKFISHQDIRKRNYVRDDAVFIRAAVELPRKILS

SEQ ID NO: 1626 - protein, 674 aa, Homo sapiens
MTIRHQGQQYRPRMAFLQKIEALVKDMQNPETGVRMQNQRVLVTSVPHAMTGSDVLQWIVQRLWISSLEAQNLGNFIVRYGYIYPLQDPKNLILKPDGSLYRFQTPYFWPTQQWPAEDTDYAIYLAKRNIKKKGILEEYEKENYNFLNQKMNYKWDFVIMQAKEQYRAGKERNKADRYALDCQEKAYWLVHRCPPGMDNVLDYGLDRVTNPNEVKVNQKQTVVAVKKEIMYYQQALMRSTVKSSVSLGGIVKYSEQFSSNDAIMSGCLPSNPWITDDTQFWDLNAKLVEIPTKMRVERWAFNFSELIRDPKGRQSFQYFLKKEFSGENLGFWEACEDLKYGDQSKVKEKAEEIYKLFLAPGARRWINIDGKTMDITVKGLKHPHRYVLDAAQTHIYMLMKKDSYARYLKSPIYKDMLAKAIEPQETTKKSSTLPFMRRHLRSSPSPVILRQLEEEAKAREAANTVDITQPGQHMAPSPHLTVYTGTCMPPSPSSPFSSSCRSPRKPFASPSRFIRRPSTTICPSPIRVALESSSGLEQKGECSGSMAPRGPSVTESSEASLDTSWPRSRPRAPPKARMALSFSRFLRRGCLASPVFARLSPKCPAVSHGRVQPLGDVGQQLPRLKSKRVANFFQIKMDVPTGSGTCLMDSEDAGTGESGDRATEKEVICPWESL

SEQ ID NO: 1627 - protein, 1039 aa, Homo sapiens
MARALCPLQALWLLEWVLLLLGPCAAPPAWALNLDPVQLTFYAGPNGSQFGFSLDFHKDSHGRVAIVVGAPRTLGPSQEETGGVFLCPWRAEGGQCPSLLFDLRDETRNVGSQTLQTFKARQGLGASVVSWSDVIVACAPWQHWNVLEKTEEAEKTPVGSCFLAQPESGRRAEYSPCRGNTLSRIYVENDFSWDKRYCEAGFSSVVTQAGELVLGAPGGYYFLGLLAQAPVADIFSSYRPGILLWHVSSQSLSFDSSNPEYFDGYWGYSVAVGEFDGDLNTTEYVVGAPTWSWTLGAVEILDSYYQRLHRLRGEQMASYFGHSVAVTDVNGDGRHDLLVGAPLYMESRADRKLAEVGRVYLFLQPRGPHALGAPSLLLTGTQLYGRFGSAIAPLGDLDRDGYNDIAVAAPYGGPSGRGQVLVFLGQSEGLRSRPSQVLDSPFPTGSAFGFSLRGAVDIDDNGYPDLIVGAYGANQVAVYRAQPVVKASVQLLVQDSLNPAVKSCVLPQTKTPVSCFNIQMCVGATGHNIPQKLSLNAELQLDRQKPRQGRRVLLLGSQQAGTTLNLDLGGKHSPICHTTMAFLRDEADFRDKLSPIVLSLNVSLPPTEAGMAPAVVLHGDTHVQEQTRIVLDCGEDDVCVPQLQLTASVTGSPLLVGADNVLELQMDAANEGEGAYEAELAVHLPQGAHYMRALSNVEGFERLICNQKKENETRVVLCELGNPMKKNAQIGIAMLVSVGNLEEAGESVSFQLQIRSKNSQNPNSKIVLLDVPVRAEAQVELRGNSFPASLVVAAEEGEREQNSLDSWGPKVEHTYELHNNGPGTVNGLHLSIHLPGQSQPSDLLYILDIQPQGGLQCFPQPPVNPLKVDWGLPIPSPSPIHPAHHKRDRRQIFLPEPEQPSRLQDPVLVSCDSAPCTVVQCDLQEMARGQRAMVTVLAFLWLPSLYQRPLDQFVLQSHAWFNVSSLPYAVPPLSLPRGEAQVWTQLLRALEERAIPIWWVLVGVLGGLLLLTILVLAMWKVGFFKRNRPPLEEDDEEGE

SEQ ID NO: 1628 - protein, 758 aa, Homo sapiens
MAEPRQEFEVMEDHAGTYGLGDRKDQGGYTMHQDQEGDTDAGLKESPLQTPTEDGSEEPGSETSDAKSTPTAEDVTAPLVDEGAPGKQAAAQPHTEIPEGTTAEEAGIGDTPSLEDEAAGHVTQEPESGKVVQEGFLREPGPPGLSHQLMSGMPGAPLLPEGPREATRQPSGTGPEDTEGGRHAPELLKHQLLGDLHQEGPPLKGAGGKERPGSKEEVDEDRDVDESSPQDSPPSKASPAQDGRPPQTAAREATSIPGFPAEGAIPLPVDFLSKVSTEIPASEPDGPSVGRAKGQDAPLEFTFHVEITPNVQKEQAHSEEHLGRAAFPGAPGEGPEARGPSLGEDTKEADLPEPSEKQPAAAPRGKPVSRVPQLKARMVSKSKDGTGSDDKKAKTSTRSSAKTLKNRPCLSPKHPTPGSSDPLIQPSSPAVCPEPPSSPKYVSSVTSRTGSSGAKEMKLKGADGKTKIATPRGAAPPGQKGQANATRIPAKTPPAPKTPPSSGEPPKSGDRSGYSSPGSPGTPGSRSRTPSLPTPPTREPKKVAVVRTPPKSPSSAKSRLQTAPVPMPDLKNVKSKIGSTENLKHQPGGGKVQIINKKLDLSNVQSKCGSKDNIKHVPGGGSVQIVYKPVDLSKVTSKCGSLGNIHHKPGGGQVEVKSEKLDFKDRVQSKIGSLDNITHVPGGGNKKIETHKLTFRENAKAKTDHGAEIVYKSPVVSGDTSPRHLSNVSSTGSIDMVDSPQLATLADEVSASLAKQGL

SEQ ID NO: 1629 - protein, 1220 aa, Homo sapiens [sequence omitted]

SEQ ID NO: 1630 - protein, 911 aa, Homo sapiens
MEELQDDYEDMMEENLEQEEYEDPDIPESQMEEPAAHDTEATATDYHTTSHPGTHKVYVELQELVMDEKNQELRWMEAARWVQLEENLGENGAWGRPHLSHLTFWSLLELRRVFTKGTVLLDLQETSLAGVANQLLDRFIFEDQIRPQDREELLRALLLKHSHAGELEALGGVKPAVLTRSGDPSQPLLPQHSSLETQLFCEQGDGGTEGHSPSGILEKIPPDSEATLVLVGRADFLEQPVLGFVRLQEAAELEAVELPVPIRFLFVLLGPEAPHIDYTQLGRAAATLMSERVFRIDAYMAQSRGELLHSLEGFLDCSLVLPPTDAPSEQALLSLVPVQRELLRRRYQSSPAKPDSSFYKGLDLNGGPDDPLQQTGQLFGGLVRDIRRRYPYYLSDITDAFSPQVLAAVIFIYFAALSPAITFGGLLGEKTRNQMGVSELLISTAVQGILFALLGAQPLLVVGFSGPLLVFEEAFFSFCETNGLEYIVGRVWIGFWLILLVVLVVAFEGSFLVRFISRYTQEIFSFLISLIFIYETFSKLIKIFQDHPLQKTYNYNVLMVPKPQGPLPNTALLSLVLMAGTFFFAMMLRKFKNSSYFPGKLRRVIGDFGVPISILIMVLVDFFIQDTYTQKLSVPDGFKVSNSSARGWVIHPLGLRSEFPIWMMFASALPALLVFILIFLESQITTLIVSKPERKMVKGSGFHLDLLLVVGMGGVAALFGMPWLSATTVRSVTHANALTVMGKASTPGAAAQIQEVKEQRISGLLVAVLVGLSILMEPILSRIPLAVLFGIFLYMGVTSLSGIQLFDRILLLFKPPKYHPDVPYVKRVKTWRMHLFTGIQIICLAVLWVVKSTPASLALPFVLILTVPLRRVLLPLIFRNVELQCLDADDAKATFDEEEGRDEYDEVAMPV

SEQ ID NO: 1631 - protein, 1105 aa, Homo sapiens
MAAMAPALTDAAAEAHHIRFKLAPPSSTLSPGSAENNGNANILIAANGTKRKAIAAEDPSLDFRNNPTKEDLGKLQPLVASYLCSDVTSVPSKESLKLQGVFSKQTVLKSHPLLSQSYELRAELLGRQPVLEFSLENLRTMNTSGQTALPQAPVNGLAKKLTKSSTHSDHDNSTSLNGGKRALTSSALHGGEMGGSESGDLKGGMTNCTLPHRSLDVEHTTLYSNNSTANKSSVNSMEQPALQGSSRLSPGTDSSSNLGGVKLEGKKSPLSSILFSALDSDTRITALLRRQADIESRARRLQKRLQVVQAKQVERHIQHQLGGFLEKTLSKLPNLESLRPRSQLMLTRKAEAALRKAASETTTSEGLSNFLKSNSISEELERFTASGIANLRCSEQAFDSDVTDSSSGGESDIEEEELTRADPEQRHVPLRRRSEWKWAADRAAIVSRWNWLQAHVSDLEYRIRQQTDIYKQIRANKGLIVLGEVPPPEHTTDLFLPLSSEVKTDHGTDKLIESVSQPLENHGAPIIGHISESLSTKSCGALRPVNGVINTLQPVLADHIPGDSSDAEEQLHKKQRLNLVSSSSDGTCVAARTRPVLSCKKRRLVRPNSIVPLSKKVHRNSTIRPGCDVNPSCALCGSGSINTMPPEIHYEAPLLERLSQLDSCVHPVLAFPDDVPTSLHFQSMLKSQWQNKPFDKIKPPKKLSLKHRAPMPGSLPDSARKDRHKLVSSFLTTAKLSHHQTRPDRTHRQHLDDVGAVPMVERVTAPKAERLLNPPPPVHDPNHSKMRLRDHSSERSEVLKHHTDMSSSSYLAATHHPPHSPLVRQLSTSSDSPAPASSSSQVTASTSQQPVRRRRGESSFDINNIVIPMSVAATTRVEKLQYKEILTPSWREVDLQSLKGSPDEENEEIEDLSDAAFAALHAKCEEMERARWLWTTSVPPQRRGSRSYRSSDGRTTPQLGSANPSTPQPASPDVSSSHSLSEYSHGQSPRSPISPELHSAPLTPVARDTPRHLASEDTRCSTPELGLDEQSVQPWERRTFPLAHSPQAECEDQLDAQERAARCTRRTSGSKTGRETEAAPTSPPIVPLKSRHLVAAATAQRPTHR

SEQ ID NO: 1632 - protein, 946 aa, Homo sapiens
MVEGRVSEFLKKLGFSGGGRQYQALEKDEEEALIDEQSELKAIEKEKKVTALPPKEACKCQKEDLARAFCVDLHTGLSEFSVTQRRLAHGWNEFVADNSEPVWKKYLDQFKNPLILLLLGSALVSVLTKEYEDAVSIATAVLVVVTVAFIQEYRSEKSLEELTKLVPPECNCLREGKLQHLLARELVPGDVVSLSIGDRIPADIRLTEVTDLLVDESSFTGEAEPCSKTDSPLTGGGDLTTLSNIVFMGTLVQYGRGQGVVIGTGESSQFGEVFKMMQAEETPKTPLQKSMDRLGKQLTLFSFGIIGLIMLIGWSQGKQLLSMFTIGVSLAVAAIPEGLPIVVMVTLVLGVLRMAKKRVIVKKLPIVETLGCCSVLCSDKTGTLTANEMTVTQLVTSDGLRAEVSGVGYDGQGTVCLLPSKEVIKEFSNVSVGKLVEAGCVANNAVIRKNAVMGQPTEGALMALAMKMDLSDIKNSYIRKKEIPFSSEQKWMAVKCSLKTEDQEDIYFMKGALEEVIRYCTMYNNGGIPLPLTPQQRSFCLQEEKRMGSLGLRVLALASGPELGRLTFLGLVGIIDPPRVGVKEAVQVLSESGVSVKMITGDALETALAIGRNIGLCNGKLQAMSGEEVDSVEKGELADRVGKVSVFFRTSPKHKLKIIKALQESGAIVAMTGDGVNDAVALKSADIGIAMGQTGTDVSKEAANMILVDDDFSAIMNAVEEGKGIFYNIKNFVRFQLSTSISALSLITLSTVFNLPSPLNAMQILWINIIMDGPPAQSLGVEPVDKDAFRQPPRSVRDTILSRALILKILMSAAIIISGTLFIFWKEMPEDRASTPRTTTMTFTCFVFFDLFNALTCRSQTKLIFEIGFLRNHMFLYSVLGSILGQLAVIYIPPLQRVFQTENLGALDLLFLTGLASSVFILSELLKLCEKYCCSPKRVQMHPEDV

SEQ ID NO: 1633 - protein, 493 aa, Homo sapiens
MRGFGPGLTARRLLPLRLPPRPPGPRLASGQAAGALERAMDELLRRAVPPTPAYELREKTPAPAEGQCADFVSFYGGLAETAQRAELLGRLARGFGVDHGQVAEQSAGVLHLRQQQREAAVLLQAEDRLRYALVPRYRGLFHHISKLDGGVRFLVQLRADLLEAQALKLVEGPDVREMNGVLKGMLSEWFSSGFLNLERVTWHSPCEVLQKISEAEAVHPVKNWMDMKRRVGPYRRCYFFSHCSTPGEPLVVLHVALTGDISSNIQAIVKEHPPSETEEKNKITAAIFYSISLTQQGLQGVELGTFLIKRVVKELQREFPHLGVFSSLSPIPGFTKWLLGLLNSQTKEHGRNELFTDSECKEISEITGGPINETLKLLLSSSEWVQSEKLVRALQTPLMRLCAWYLYGEKHRGYALNPVANFHLQNGAVLWRINWMADVSLRGITGSCGLMANYRYFLEETGPNSTSYLGSKIIKASEQVLSLVAQFQKNSKL

SEQ ID NO: 1634 - protein, 4486 aa, Homo sapiens
MRLAEERAALAAENADGEPGADRRLRLLGTYVAMSLRPAAGAWERCAGSAEAEQLLQAFLGRDAAEGPRPLLVVRPGPRGLAIRPGLEVGPESGLAGAKALFFLRTGPEPPGPDSFRGAVVCGDLPAAPLEHLAALFSEVVLPVLANEKNRLNWPHMICEDVRRHAHSLQCDLSVILEQVKGKTLLPLPAGSEKMEFADSKSETVLDSIDKSVIYAIESAVIKWSYQVQVVLKRESSQPLLQGENPTPKVELEFWKSRYEDLKYIYNQLRTITVRGMAKLLDKLQSSYFPAFKAMYRDVVAALAEAQDIHVHLIPLQRHLEALENAEFPEVKPQLRPLLHVVCLIWATCKSYRSPGRLTVLLQEICNLLIQQASNYLSPEDLLRSEVEESQRKLQVVSDTLSFFKQEFQDRRENLHTYFKENQEVKEWDFQSSLVFVRLDGFLGQLHVVEGLLKTALDFHKLGKVEFSGVRGNALSQQVQQMHEEFQEMYRLLSGSSSDCLYLQSTDFENDVSEFNQKVEDLDRRLGTIFIQAFDDAPGLEHAFKLLDIAGNLLERPLVARDTSDKYLVLIQMFNKDLDAVRMIYSQHVQEEAELGFSPVHKNMPTVAGGLRWAQELRQRIQGPFSNFGRITHPCMESAEGKRMQQKYEDMLSLLEKYETRLYEDWCRTVSEKSQYNLSQPLLKRDPETKEITINFNPQLISVLKEMSYLEPREMKHMPETAAAMFSSRDFYRQLVANLELMANWYNKVMKTLLEVEFPLVEEELQNIDLRLRAAEETLNWKTEGICDYVTEITSSIHDLEQRIQKTKDNVEEIQNIMKTWVTPIFKTKDGKRESLLSLDDRHDRMEKYYNLIKESGLKIHALVQENLGLFSADPTSNIWKTYVNSIDNLLLNGFFLAIECSLKYLLENTECKAGLTPIFEAQLSLAIPELVFYPSLESGVKGGFCDIVEGLITSIFRIPSLVPRLSPQNGSPHYQVDLDGIPDLANMRRTLMERVQRMMGLCCGYQSTFSQYSYLYVEDRKEVLGQFLLYGHILTPEEIEDHVEDGIPENPPLLSQFKVQIDSYETLYEEVCRLEPIKVFDGWMKIDIRPFKASLLNIIKRWSLLFKQHLVDHVTHSLANLDAFIKKSESGLLKKVEKGDFQGLVEIMGHLMAVKERQSNTDEMFEPLKQTIELLKTYEQELPETVFKQLEELPEKWNNIKKVAITVKQQVAPLQANEVTLLRQRCTAFDAEQQQFWEQFHKEAPFRFDSIHPHQMLDARHIEIQQMESTMASISESASLFEVNVPDYKQLRQCRKEVCQLKELWDTIGMVTSSIHAWETTPWRNINVEAMELECKQFARHIRNLDKEVRAWDAFTGLESTVWNTLSSLRAVAELQNPAIRERHWRQLMQATGVSFTMDQDTTLAHLLQLQLHHYEDEVRGIVDKAAKEMGMEKTLKELQTTWAGMEFQYEPHPRTNVPLLCSDEDLIEVLEDNQVQLQNLVMSKYVAFFLEEVSGWQKKLSTVDAVISIWFEVQRTWTHLESIFTGSEDIRAQLPQDSKRFEGIDIDFKELAYDAQKIPNVVQTTNKPGLYEKLEDIQGRLCLCEKALAEYLDTKRLAFPRFYFLSSSDLLDILSNGTAPQQVQRHLSKLFDNMAKMRFQLDASGEPTKTSLGMYSKEEEYVAFSEPCDCSGQVEIWLNHVLGHMKATVRHEMTEGVTAYEEKPREQWLFDHPAQVALTCTQIWWTTEVGMAFARLEEGYESAMKDYYKKQVAQLKTLITMLIGQLSKGDRQKIMTICTIDVHARDVVAKMIAQKVDNAQAFLWLSQLRHRWDDEVKHCFANICDAQFLYSYEYLGNTPRLVITPLTDRCYITLTQSLHLTMSGAPAGPAGTGKTETTKDLGRALGILVYVFNCSEQMDYKSCGNIYKGLAQTGAWGCFDEFNRISVEVLSVVAVQVKSIQDAIRDKKQWFSFLGEEISLNPSVGIFITMNPGYAGRTELPENLKSLFRPCAMVVPDFELICEIMLVAEGFIEAQSLARKFITLYQLCKELLSKQDHYDWGLRAIKSVLVVAGSLKRGDPDRPEDQVLMRSLRDFNIPKIVTDDMPIFMGLIGDLFPALDVPRRRDPNFEALVRKAIVDLKLQAEDNFVLKVVQLEELLAVRHSVFVVGGAGTGKSQVLRSLHKTYQIMKRRPVWTDLNPKAVTNDELFGIINPATGEWKDGLFSSIMRELANITHDGPKWILLDGDIDPMWIESLNTVMDDNKVLTLASNERIPLNPTMKLLFEISHLRTATPATVSRAGILYINPADLGWNPPVSSWIEKREIQTERANLTILFDKYLPTCLDTLRTRFKKIIPIPEQSMVQMVCHLLECLLTTEDIPADCPKEIYEHYFVFAAIWAFGGAMVQDQLVDYRAEFSKWWLTEFKTVKFPSQGTIFDYYIDPETKKFEPWSKLVPQFEFDPEMPLQACLVHTSETIRVCYFMERLMARQRPVMLVGTAGTGKSVLVGAKLASLDPEAYLVKNVPFNYYTTSAMLQAVLEKPLEKKAGRNYGPPGNKKLIYFIDDMNMPEVDAYGTVQPHTIIRQHLDYGHWYDRSKLSLKEITNVQYVSCMNPTAGSFTINPRLQRHFSVFVLSFPGADALSSIYSIILTQHLKLGNFPASLQKSIPPLIDLALAFHQKIATTFLPTGIKFHYIFNLRDFANIFQGILFSSVECVKSTWDLIRLYLHESNRVYRDKMVEEKDFDLFDKIQTEVLKKTFDDIEDPVEQTQSPNLYCHFANGIGEPKYMPVQSWELLTQTLVEALENHNEVNTVMDLVLFEDAMRHVCHINRILESPRGNALLVGVGGSGKQSLTRLAAFISSMDVFQITLRKGYQIQDFKMDLASLCLKAGVKNLNTVFLMTDAQVADERFLVLINDLLASGEIPDLYSDDEVENIISNVRNEVKSQGLVDNRENCWKFFIDRIRRQLKVTLCFSPVGNKLRVRSRKFPAIVNCTAIHWFHEWPQQALESVSLRFLQNTEGIEPTVKQSISKFMAFVHTSVNQTSQSYLSNEQRYNYTTPKSFLEFIRLYQSLLHRHRKELKCKTERLENGLLKLHSTSAQVDDLKAKLAAQEVELKQKNEDADKLIQVVGVETDKVSREKAMADEEEQKVAVIMLEVKQKQKDCEEDLAKAEPALTAAQAALNTLNKTNLTELKSFGSPPLAVSNVSAAVMVLMAPRGRVPKDRSWKAAKVTMAKVDGFLDSLINFNKENIHENCLKAIRPYLQDPEFNPEFVATKSYAAAGLCSWVINIVRFYEVFCDVEPKRQALNKATADLTAAQEKLAAIKAKIAHLNENLAKLTARFEKATADKLKCQQEAEVTAVTISLANRLVGGLASENVRWADAVQNFKQQERTLCGDILLITAFISYLGFFTKKYRQSLLDRTWRPYLSQLKTPIPVTPALDPLRMLMDDADVAAWQNEGLPADRMSVENATILINCERWPLMVDPQLQGIKWIKNKYGEDLRVTQIGQKGYLQIIEQALEAGAVVLIENLEESIDPVLGPLLGREVIKKGRFIKIGDKECEYNPKFRLILHTKLANPHYQPELQAQATLINFTVTRDGLEDQLLAAVVSMERPDLEQLKSDLTKQQNGFKITLKTLEDSLLSRLSSASGNFLGETVLVENLEITKQTAAEVEKKVQEAKVTEVKINEAREHYRPAAARASLLYFIMNDLSKIHPMYQFSLKAFSIVFQKAVERAAPDESLRERVANLIDSITFSVYQYTIRGLFECDKLTYLAQLTFQILLMNREVNAVELDFLLRSPVQTGTASPVEFLSHQAWGAVKVLSSMEEFSNLDRDIEGSAKSWKKFVESECPEKEKLPQEWKNKTALQRLCMLRAMRPDRMTYALRDFVEEKLGSKYVVGRALDFATSFEESGPATPMFFILSPGVDPLKDVESQGRKLGYTFNNQNFHNVSLGQGQEVVAEAALDLAAKKGHWVILQNIHLVAKWLSTLEKKLEEHSENSHPEFRVFMSAEPAPSPEGHIIPQGILENSIKITNEPPTGMHANLHKALDNFTQDTLEMCSRETEFKSILFALCYFHAVVAERRKFGPQGWNRSYPFNTGDLTISVNVLYNFLEANAKVPYDDLRYLFGEIMYGGHITDDWDRRLCRTYLGEFIRPEMLEGELSLAPGFPLPGNMDYNGYHQYIDAELPPESPYLYGLHPNAEIGFLTQTSEKLFRTVLELQPRDSQARDGAGATREEKVKALLEEILERVTDEFNIPELMAKVEERTPYIVVAFQECGRMNILTREIQRSLRELELGLKGELTMTSHMENLQNALYFDMVPESWARRAYPSTAGLAAWFPDLLNRIKELEAWTGDFTMPSTVWLTGFFNPQSFLTAIMQSTARKNEWPLDQMALQCDMTKKNREEFRSPPREGAYIHGLFMEGACWDTQAGIITEAKLKDLTPPMPVMFIKAIPADKQDCRSVYSCPVYKTSQRGPTYVWTFNLKTKENPSKWVLAGVALLLQI

SEQ ID NO: 1635 - protein, 774 aa, Homo sapiens
MKKQFNRMRQLANQTVGRAEKTEVLSEDLLQVEKRLELVKQVSHSTHKKLTACLQGQQGAEADKRSKKLPLTTLAQCLMEGSAILGDDTLLGKMLKLCGETEDKLAQELIHFELQVERDVIEPLFLLAEVEIPNIQKQRKHLAKLVLDMDSSRTRWQQTSKSSGLSSSLQPAGAKADALREEMEEAANRVEICRDQLSADMYSFVAKEIDYANYFQTLIEVQAEYHRKSLTLLQAVLPQIKAQQEAWVEKPSFGKPLEEHLTISGREIAFPIEACVTMLLECGMQEEGLFRVAPSASKLKKLKAALDCCVVDVQEYSADPHAIAGALKSYLRELPEPLMTFELYDEWIQASNVQEQDKKLQALWNACEKLPKANHNNIRYLIKFLSKLSEYQDVNKMTPSNMAIVLGPNLLWPQAEGNITEMMTTVSLQIVGIIEPIIQHADWFFPGEIEFNITGNYGSPVHVNHNANYSSMPSPDMDPADRRQPEQARRPLSVATDNMMLEFYKKDGLRKIQSMGVRVMDTNWVARRGSSAGRKVSCAPPSMQPPAPPAELAAPLPSPLPEQPLDSPAAPALSPSGLGLQPGPERTSTTKSKELSPGSAQKGSPGSSQGTACAGTQPGAQPGAQPGASPSPSQPPADQSPHTLRKVSKKLAPIPPKVPFGQPGAMADQSAGQPSPVSLSPTPPSTPSPYGLSYPQGYSLASGQLSPAAAPPLASPSVFTSTLSKSRPTPKPRQRPTLPPPQPPTVNLSASSPQSTEAPMLDGMSPGESMSTAV

SEQ ID NO: 1636 - protein, 399 aa, Homo sapiens
MAAPSPSGGGGSGGGSGSGTPGPVGSPAPGHPAVSSMQGKRKALKLNFANPPFKSTARFTLNPNPTGVQNPHIERLRTHSIESSGKLKISPEQHWDFTAEDLKDLGEIGRGAYGSVNKMVHKPSGQIMAVKRIRSTVDEKEQKQLLMDLDVVMRSSDCPYIVQFYGALFREGDCWICMELMSTSFDKFYKYVYSVLDDVIPEEILGKITLATVKALNHLKENLKIIHRDIKPSNILLDRSGNIKLCDFGISGQLVDSIAKTRDAGCRPYMAPERIDPSASRQGYDVRSDVWSLGITLYELATGRFPYPKWNSVFDQLTQVVKGDPPQLSNSEEREFSPSFINFVNLCLTKDESKRPKYKELLKHPFILMYEERAVEVACYVCKILDQMPATPSSPMYVD

SEQ ID NO: 1637 - protein, 1954 aa, Homo sapiens
MRGPVGTEEELPRLFAEEMENEDEMSEEEDGGLEAFDDFFPVEPVSLPKKKKPKKLKENKCKGKRKKKEGSNDELSENEEDLEEKSESEGSDYSPNKKKKKKLKDKKEKKAKRKKKDEDEDDNDDGCLKEPKSSGQLMAEWGLDDVDYLFSEEDYHTLTNYKAFSQFLRPLIAKKNPKIPMSKMMTVLGAKWREFSANNPFKGSSAAAAAAAVAAAVETVTISPPLAVSPPQVPQPVPIRKAKTKEGKGPGVRKKIKGSKDGKKKGKGKKTAGLKFRFGGISNKRKKGSSSEEDEREESDFDSASIHSASVRSECSAALGKKSKRRRKKKRIDDGDGYETDHQDYCEVCQQGGEIILCDTCPRAYHLVCLDPELEKAPEGKWSCPHCEKEGIQWEPKDDDDEEEEGGCEEEEDDHMEFCRVCKDGGELLCCDACPSSYHLHCLNPPLPEIPNGEWLCPRCTCPPLKGKVQRILHWRWTEPPAPFMVGLPGPDVEPSLPPPKPLEGIPEREFFVKWAGLSYWHCSWVKELQLELYHTVMYRNYQRKNDMDEPPPFDYGSGDEDGKSEKRKNKDPLYAKMEERFYRYGIKPEWMMIHRILNHSFDKKGDVHYLIKWKDLPYDQCTWEIDDIDIPYYDNLKQAYWGHRELMLGEDTRLPKRLLKKGKKLRDDKQEKPPDTPIVDPTVKFDKQPWYIDSTGGTLHPYQLEGLNWLRFSWAQGTDTILADEMGLGKTVQTIVFLYSLYKEGHSKGPYLVSAPLSTIINWEREFEMWAPDFYVVTYTGDKESRSVIRENEFSFEDNAIRSGKKVFRMKKEVQIKFHVLLTSYELITIDQAILGSIEWACLVVDEAHRLKNNQSKFFRVLNSYKIDYKLLLTGTPLQNNLEELFHLLNFLTPERFNNLEGFLEEFADISKEDQIKKLHDLLGPHMLRRLKADVFKNMPAKTELIVRVELSQMQKKYYKFILTRNFEALNSKGGGNQVSLLNIMMDLKKCCNHPYLFPVAAVEAPVLPNGSYDGSSLVKSSGKLMLLQKMLKKLRDEGHRVLIFSQMTKMLDLLEDFLEYEGYKYERIDGGITGGLRQEAIDRFNAPGAQQFCFLLSTRAGGLGINLATADTVIIYDSDWNPHNDIQAFSRAHRIGQNKKVMIYRFVTRASVEERITQVAKRKMMLTHLVVRPGLGSKSGSMTKQELDDILKFGTEELFKDDVEGMMSQGQRPVTPIPDVQSSKGGNLAASAKKKHGSTPPGDNKDVEDSSVIHYDDAAISKLLDRNQDATDDTELQNMNEYLSSFKVAQYVVREEDGVEEVEREIIKQEENVDPDYWEKLLRHHYEQQQEDLARNLGKGKRIRKQVNYNDASQEDQEWQDELSDNQSEYSIGSEDEDEDFEERPEGQSGRRQSRRQLKSDRDKPLPPLLARVGGNIEVLGFNARQRKAFLNAIMRWGMPPQDAFNSHWLVRDLRGKSEKEFRAYVSLFMRHLCEPGADGAETFADGVPREGLSRQHVLTRIGVMSLVRKKVQEFEHVNGKYSTPDLIPEGPEGKKSGEVISSDPNTPVPASPAHLLPAPLGLPDKMEAQLGYMDEKDPGAQKPRQPLEVQALPAALDRVESEDKHESPASKERAREERPEETEKAPPSPEQLPREEVLPEKEKILDKLELSLIHSRGDSSELRPDDTKAEEKEPIETQQNGDKEEDDEGKKEDKKGKFKFMFNIADGGFTELHTLWQNEERAAVSSGKIYDIWHRRHDYWLLAGIVTHGYARWQDIQNDPRYMILNEPFKSEVHKGNYLEMKNKFLARRFKLLEQALVIEEQLRRAAYLNMTQDPNHPAMALNARLAEVECLAESHQHLSKESLAGNKPANAVLHKVLNQLEELLSDMKADVTRLPSMLSRIPPVAARLQMSERSILSRLTNRAGDPTIQQGAFGSSQMYSNNFGPNFRGPGPGGIVNYNQMPLGPYVTDI

SEQ ID NO: 1638 - protein, 1212 aa, Homo sapiens
MEPRPTAPSSGAPGLAGVGETPSAAALAAARVELPGTAVPSVPEDAAPASRDGGGVRDEGPAAAGDGLGRPLGPTPSQSRFQVDLVSENAGRAAAAAAAAAAAAAAAGAGAGAKQTPADGEASGESEPAKGSEEAKGRFRVNFVDPAASSSAEDSLSDAAGVGVDGPNVSFQNGGDTVLSEGSSLHSGGGGGSGHHQHYYYDTHTNTYYLRTFGHNTMDAVPRIDHYRHTAAQLGEKLLRPSLAELHDELEKEPFEDGFANGEESTPTRDAVVTYTAESKGVVKFGWIKGVLVRCMLNIWGVMLFIRLSWIVGQAGIGLSVLVIMMATVVTTITGLSTSAIATNGFVRGGGAYYLISRSLGPEFGGAIGLIFAFANAVAVAMYVVGFAETVVELLKEHSILMIDEINDIRIIGAITVVILLGISVAGMEWEAKAQIVLLVILLLAIGDFVIGTFIPLESKKPKGFFGYKSEIFNENFGPDFREEETFFSVFAIFFPAATGILAGANISGDLADPQSAIPKGTLLAILITTLVYVGIAVSVGSCVVRDATGNVNDTIVTELTNCTSAACKLNFDFSSCESSPCSYGLMNNFQVMSMVSGFTPLISAGIFSATLSSALASLVSAPKIFQALCKDNIYPAFQMFAKGYGKNNEPLRGYILTFLIALGFILIAELNVIAPIISNFFLASYALINFSVFHASLAKSPGWRPAFKYYNMWISLLGAILCCIVMFVINWWAALLTYVIVLGLYIYVTYKKPDVNWGSSTQALTYLNALQHSIRLSGVEDHVKNFRPQCLVMTGAPNSRPALLHLVHDFTKNVGLMICGHVHMGPRRQAMKEMSIDQAKYQRWLIKNKMKAFYAPVHADDLREGAQYLMQAAGLGRMKPNTLVLGFKKDWLQADMRDVDMYINLFHDAFDIQYGVVVIRLKEGLDISHLQGQEELLSSQEKSPGTKDVVVSVEYSKKSDLDTSKPLSEKPITHKVEEEDGKTATQPLLKKESKGPIVPLNVADQKLLEASTQFQKKQGKNTIDVWWLFDDGGLTLLIPYLLTTKKKWKDCKIRVFIGGKINRIDHDRRAMATLLSKFRIDFSDIMVLGDINTKPKKENIIAFEEIIEPYRLHEDDKEQDIADKMKEDEPWRITDNELELYKTKTYRQIRLNELLKEHSSTANIIVMSLPVARKGAVSSALYMAWLEALSKDLPPILLVRGNHQSVLTFYS

SEQ ID NO: 1639 - protein, 619 aa, Homo sapiens
MLLSWLTVLGAGMVVLHFLQKLLFPYFWDDFWFVLKVVLIIIRLKKYEKRGELVTVLDKFLSHAKRQPRKPFIIYEGDIYTYQDVDKRSSRVAHVFLNHSSLKKGDTVALLMSNEPDFVHVWFGLAKLGCVVAFLNTNIRSNSLLNCIRACGPRALVVGADLLGTVEEILPSLSENISVWGMKDSVPQGVISLKEKLSTSPDEPVPRSHHVVSLLKSTCLYIFTSGTTGLPKAAVISQLQVLRGSAVLWAFGCTAHDIVYITLPLYHSSAAILGISGCVELGATCVLKKKFSASQFWSDCKKYDVTVFQYIGELCRYLCKQSKREGEKDHKVRLAIGNGIRSDVWREFLDRFGNIKVCELYAATESSISFMNYTGRIGAIGRTNLFYKLLSTFDLIKYDFQKDEPMRNEQGWCIHVKKGEPGLLISRVNAKNPFFGYAGPYKHTKDKLLCDVFKKGDVYLNTGDLIVQDQDNFLYFWDRTGDTFRWKGENVATTEVADVIGMLDFIQEANVYGVAISGYEGRAGMASIILKPNTSLDLEKVYEQVVTFLPAYACPRFLRIQEKMEATGTFKLLKHQLVEDGFNPLKISEPLYFMDNLKKSYVLLTRELYDQIMLGEIKL

SEQ ID NO: 1640 - protein, 2912 aa, Homo sapiens
MGRRRRLCLQLYFLWLGCVVLWAQGTAGQPQPPPPKPPRPQPPPQQVRSATAGSEGGFLAPEYREEGAAVASRVRRRGQQDVLRGPNVCGSRFHSYCCPGWKTLPGGNQCIVPICRNSCGDGFCSRPNMCTCSSGQISSTCGSKSIQQCSVRCMNGGTCADDHCQCQKGYIGTYCGQPVCENGCQNGGRCIGPNRCACVYGFTGPQCERDYRTGPCFTQVNNQMCQGQLTGIVCTKTLCCATIGRAWGHPCEMCPAQPQPCRRGFIPNIRTGACQDVDECQAIPGICQGGNCINTVGSFECRCPAGHKQSETTQKCEDIDECSIIPGICETGECSNTVGSYFCVCPRGYVTSTDGSRCIDQRTGMCFSGLVNGRCAQELPGRMTKMQCCCEPGRCWGIGTIPEACPVRGSEEYRRLCMDGLPMGGIPGSAGSRPGGTGGNGFAPSGNGNGYGPGGTGFIPIPGGNGFSPGVGGAGVGAGGQGPIITGLTILNQTIDICKHHANLCLNGRCIPTVSSYRCECNMGYKQDANGDCIDVDECTSNPCTNGDCVNTPGSYYCKCHAGFQRTPTKQACIDIDECIQNGVLCKNGRCVNTDGSFQCICNAGFELTTDGKNCVDHDECTTTNMCLNGMCINEDGSFKCICKPGFVLAPNGRYCTDVDECQTPGICMNGHCINSEGSFRCDCPPGLAVGMDGRVCVDTHMRSTCYGGIKKGVCVRPFPGAVTKSECCCANPDYGFGEPCQPCPAKNSAEFHGLCSSGVGITVDGRDINECALDPDICANGICENLRGSYRCNCNSGYEPDASGRNCIDIDECLVNRLLCDNGLCRNTPGSYSCTCPPGYVFRTETETCEDINECESNPCVNGACRNNLGSFNCECSPGSKLSSTGLICIDSLKGTCWLNIQDSRCEVNINGATLKSECCATLGAAWGSPCERCELDTACPRGLARIKGVTCEDVNECEVFPGVCPNGRCVNSKGSFHCECPEGLTLDGTGRVCLDIRMEQCYLKWDEDECIHPVPGKFRMDACCCAVGAAWGTECEECPKPGTKEYETLCPRGAGFANRGDVLTGRPFYKDINECKAFPGMCTYGKCRNTIGSFKCRCNSGFALDMEERNCTDIDECRISPDLCGSGICVNTPGSFECECFEGYESGFMMMKNCMDIDECERNPLLCRGGTCVNTEGSFQCDCPLGHELSPSREDCVDINECSLSDNLCRNGKCVNMIGTYQCSCNPGYQATPDRQGCTDIDECMIMNGGCDTQCTNSEGSYECSCSEGYALMPDGRSCADIDECENNPDICDGGQCTNIPGEYRCLCYDGFMASMDMKTCIDVNECDLNSNICMFGECENTKGSFICHCQLGYSVKKGTTGCTDVDECEIGAHNCDMHASCLNIPGSFKCSCREGWIGNGIKCIDLDECSNGTHQCSINAQCVNTPGSYRCACSEGFTGDGFTCSDVDECAENINLCENGQCLNVPGAYRCECEMGFTPASDSRSCQDIDECSFQNICVFGTCNNLPGMFHCICDDGYELDRTGGNCTDIDECADPINCVNGLCVNTPGRYECNCPPDFQLNPTGVGCVDNRVGNCYLKFGPRGDGSLSCNTEIGVGVSRSSCCCSLGKAWGNPCETCPPVNSTEYYTLCPGGEGFRPNPITIILEDIDECQELPGLCQGGNCINTFGSFQCECPQGYYLSEDTRICEDIDECFAHPGVCGPGTCYNTLGNYTCICPPEYMQVNGGHNCMDMRKSFCYRSYNGTTCENELPFNVTKRMCCCTYNVGKAWNKPCEPCPTPGTADFKTICGNIPGFTFDIHTGKAVDIDECKEIPGICANGVCINQIGSFRCECPTGFSYNDLLLVCEDIDECSNGDNLCQRNADCINSPGSYRCECAAGFKLSPNGACVDRNECLEIPNVCSHGLCVDLQGSYQCICHNGFKASQDQTMCMDVDECERHPCGNGTCKNTVGSYNCLCYPGFELTHNNDCLDIDECSSFFGQVCRNGRCFNEIGSFKCLCNEGYELTPDGKNCIDTNECVALPGSCSPGTCQNLEGSFRCICPPGYEVKSENCIDINECDEDPNICLFGSCTNTPGGFQCLCPPGFVLSDNGRRCFDTRQSFCFTNFENGKCSVPKAFNTTKAKCCCSKMPGEGWGDPCELCPKDDEVAFQDLCPYGHGTVPSLHDTREDVNECLESPGICSNGQCINTDGSFRCECPMGYNLDYTGVRCVDTDECSIGNPCGNGTCTNVIGSFECNCNEGFEPGPMMNCEDINECAQNPLLCAFRCMNTFGSYECTCPIGYALREDQKMCKDLDECAEGLHDCESRGMMCKNLIGTFMCICPPGMARRPDGEGCVDENECRTKPGICENGRCVNIIGSYRCECNEGFQSSSSGTECLDNRQGLCFAEVLQTICQMASSSRNLVTKSECCCDGGRGWGHQCELCPLPGTAQYKKICPHGPGYTTDGRDIDECKVMPNLCTNGQCINTMGSFRCFCKVGYTTDISGTSCIDLDECSQSPKPCNYICKNTEGSYQCSCPRGYVLQEDGKTCKDLDECQTKQHNCQFLCVNTLGGFTCKCPPGFTQHHTACIDNNECGSQPSLCGAKGICQNTPGSFSCECQRGFSLDATGLNCEDVDECDGNHRCQHGCQNILGGYRCGCPQGYIQHYQWNQCVDENECSNPNACGSASCYNTLGSYKCACPSGFSFDQFSSACHDVNECSSSKNPCNYGCSNTEGGYLCGCPPGYYRVGQGHCVSGMGFNKGQYLSLDTEVDEENALSPEACYECKINGYSKKDSRQKRSIHEPDPTAVEQISLESVDMDSPVNMKFNLSHLGSKEHILELRPAIQPLNNHIRYVISQGNDDSVFRIHQRNGLSYLHTAKKKLMPGTYTLEITSIPLYKKKELKKLEESNEDDYLLGELGEALRMRLQIQLY

SEQ ID NO: 1641 - protein, 1375 aa, Homo sapiens
MAGGAWGRLACYLEFLKKEELKEFQLLLANKAHSRSSSGETPAQPEKTSGMEVASYLVAQYGEQRAWDLALHTWEQMGLRSLCAQAQEGAGHSPSFPYSPSEPHLGSPSQPTSTAVLMPWIHELPAGCTQGSERRVLRQLPDTSGRRWREISASLLYQALPSSPDHESPSQESPNAPTSTAVLGSWGSPPQPSLAPREQEAPGTQWPLDETSGIYYTEIREREREKSEKGRPPWAAVVGTPPQAHTSLQPHHHPWEPSVRESLCSTWPWKNEDFNQKFTQLLLLQRPHPRSQDPLVKRSWPDYVEENRGHLIEIRDLFGPGLDTQEPRIVILQGAAGIGKSTLARQVKEAWGRGQLYGDRFQHVFYFSCRELAQSKVVSLAELIGKDGTATPAPIRQILSRPERLLFILDGVDEPGWVLQEPSSELCLHWSQPQPADALLGSLLGKTILPEASFLITARTTALQNLIPSLEQARWVEVLGFSESSRKEYFYRYFTDERQAIRAFRLVKSNKELWALCLVPWVSWLACTCLMQQMKRKEKLTLTSKTTTTLCLHYLAQALQAQPLGPQLRDLCSLAAEGIWQKKTLFSPDDLRKHGLDGAIISTFLKMGILQEHPIPLSYSFIHLCFQEFFAAMSYVLEDEKGRGKHSNCIIDLEKTLEAYGIHGLFGASTTRFLLGLLSDEGEREMENIFHCRLSQGRNLMQWVPSLQLLLQPHSLESLHCLYETRNKTFLTQVMAHFEEMGMCVETDMELLVCTFCIKFSRHVKKLQLIEGRQHRSTWSPTMVVLFRWVPVTDAYWQILFSVLKVTRNLKELDLSGNSLSHSAVKSLCKTLRRPRCLLETLRLAGCGLTAEDCKDLAFGLRANQTLTELDLSFNVLTDAGAKHLCQRLRQPSCKLQRLQLVSCGLTSDCCQDLASVLSASPSLKELDLQQNNLDDVGVRLLCEGLRHPACKLIRLGLDQTTLSDEMRQELRALEQEKPQLLIFSRRKPSVMTPTEGLDTGEMSNSTSSLKRQRLGSERAASHVAQANLKLLDVSKIFPIAEIAGKSHEESSPEVVPVELLCVPSPASQGDLHTKPLGTDDDFWGPTGPVATEVVDKEKNLYRVHFPVAGSYRWPNTGLCFVMREAVTVEIEFCVWDQFLGEINPQHSWMVAGPLLDIKAEPGAVEAVHLPHFVALQGGHVDTSLFQMAHFKEEGMLLEKPARVELHHIVLENPSFSPLGVLLKMIHNALRFIPVTSVVLLYHRVHPEEVTFHLYLIPSDCSIRKAIDDLEMKFQFVRIHKPPPLTPLYMGCRYTVSGSGSGMLEILPKELELCYRSPGEDQLFSEFYVGHLGSGIRLQVKDKKDETLVWEALVKPGRNTSQPWNLRCNRDARRY

SEQ ID NO: 1642 - protein, 974 aa, Homo sapiens
MAKAGRAGGPPPGGGAPWHLRNVLSDSVESSDDEFFDAREEMAEGKNAILIGMSQWNSNDLVEQIETMGKLDEHQGEGTAPCTSSILQEKQRELYRVSLRRQRFPAQGSIEIHEDSEEGCPQRSCKTHVLLLVLHGGNILDTGAGDPSCKAADIHTFSSVLEKVTRAHFPAALGHILIKFVPCPAICSEAFSLVSHLNPYSHDEGCLSSSQDHVPLAALPLLAISSPQYQDAVATVIERANQVYREFLKSSDGIGFSGQVCLIGDCVGGLLAFDAICYSAGPSGDSPASSSRKGSISSTQDTPVAVEEDCSLASSKRLSKSNIDISSGLEDEEPKRPLPRKQSDSSTYDCEAITQHHAFLSSIHSSVLKDESETPAAGGPQLPEVSLGRFDFDVSDFFLFGSPLGLVLAMRRTVLPGLDGFQVRPACSQVYSFFHCADPSASRLEPLLEPKFHLVPPVSVPRYQRFPLGDGQSLLLADALHTHSPLFLEGSSRDSPPLLDAPASPPQASRFQRPGRRMSEGSSHSESSESSDSMAPVGASRITAKWWGSKRIDYALYCPDVLTAFPTVALPHLFHASYWESTDVVAFILRQVMRYESVNIKESARLDPAALSPANPREKWLRKRTQVKLRNVTANHRANDVIAAEDGPQVLVGRFMYGPLDMVALTGEKVDILVMAEPSSGRWVHLDTEITNSSGRITYNVPRPRRLGVGVYPVKMVVRGDQTCAMSYLTVLPRGMECVVFSIDGSFAASVSIMGSDPKVRPGAVDVVRHWQDLGYMILYITGRPDMQKQRVVSWLSQHNFPQGMIFFSDGLVHDPLRQKAIFLRNLMQECFIKISAAYGSTKDISVYSVLGLPASQIFIVGRPTKKYQTQCQFLSEGYAAHLAALEASHRSRPKKNNSRMILRKGSFGLHAQPEFLRKRNHLRRTMSVQQPDPPAANPKPERAQSQPESDKDHERPLPALSWARGPPKFESVP

SEQ ID NO: 1643 - protein, 464 aa, Homo sapiens
MVRLAAELLLLLGLLLLTLHITVLRGSGAADGPDAAAGNASQAQLQNNLNVGSDTTSETSFSLSKEAPREHLDHQAAHQPFPRPRFRQETGHPSLQRDFPRSFLLDLPNFPDLSKADINGQNPNIQVTIEVVDGPDSEADKDQHPENKPSWSVPSPDWRAWWQRSLSLARANSGDQDYKYDSTSDDSNFLNPPRGWDHTAPGHRTFETKDQPEYDSTDGEGDWSLWSVCSVTCGNGNQKRTRSCGYACTATESRTCDRPNCPGIEDTFRTAATEVSLLAGSEEFNATKLFEVDTDSCERWMSCKSEFLKKYMHKVMNDLPSCPCSYPTEVAYSTADIFDRIKRKDFRWKDASGPKEKLEIYKPTARYCIRSMLSLESTTLAAQHCCYGDNMQLITRGKGAGTPNLISTEFSAELHYKVDVLPWIICKGDWSRYNEARPPNNGQKCTESPSDEDYIKQFQEAREY

SEQ ID NO: 1644 - protein, 354 aa, Homo sapiens
MGCTLSAEERAALERSKAIEKNLKEDGISAAKDVKLLLLGAGESGKSTIVKQMKIIHEDGFSGEDVKQYKPVVYSNTIQSLAAIVRAMDTLGIEYGDKERKADAKMVCDVVSRMEDTEPFSAELLSAMMRLWGDSGIQECFNRSREYQLNDSAKYYLDSLDRIGAADYQPTEQDILRTRVKTTGIVETHFTFKNLHFRLFDVGGQRSERKKWIHCFEDVTAIIFCVALSGYDQVLHEDETTNRMHESLMLFDSICNNKFFIDTSIILFLNKKDLFGEKIKKSPLTICFPEYTGPNTYEDAAAYIQAQFESKNRSPNKEIYCHMTCATDTNNIQVVFDAVTDIIIANNLRGCGLY

SEQ ID NO: 1645 - protein, 350 aa, Homo sapiens
MPGPAAGSRARVYAEVNSLRSREYWDYEAHVPSWGNQDDYQLVRKLGRGKYSEVFEAINITNNERVVVKILKPVKKKKIKREVKILENLRGGTNIIKLIDTVKDPVSKTPALVFEYINNTDFKQLYQILTDFDIRFYMYELLKALDYCHSKGIMHRDVKPHNVMIDHQQKKLRLIDWGLAEFYHPAQEYNVRVASRYFKGPELLVDYQMYDYSLDMWSLGCMLASMIFRREPFFHGQDNYDQLVRIAKVLGTEELYGYLKKYHIDLDPHFNDILGQHSRKRWENFIHSENRHLVSPEALDLLDKLLRYDHQQRLTAKEAMEHPYFYPVVKEQSQPCADNAVLSSGLTAAR

SEQ ID NO: 1646 - protein, 1866 aa, Homo sapiens
MDPVGLQLGNKNLWSCLVRLLTKDPEWLNAKMKFFLPNTDLDSRNETLDPEQRVILQLNKLHVQGSDTWQSFIHCVCMQLEVPLDLEVLLLSTFGYDDGFTSQLGAEGKSQPESQLHHGLKRPHQSCGSSPRRKQCKKQQLELAKKYLQLLRTSAQQRYRSQIPGSGQPHAFHQVYVPPILRRATASLDTPEGAIMGDVKVEDGADVSISDLFNTRVNKGPRVTVLLGKAGMGKTTLAHRLCQKWAEGHLNCFQALFLFEFRQLNLITRFLTPSELLFDLYLSPESDHDTVFQYLEKNADQVLLIFDGLDEALQPMGPDGPGPVLTLFSHLCNGTLLPGCRVMATSRPGKLPACLPAEAAMVHMLGFDGPRVEEYVNHFFSAQPSREGALVELQTNGRLRSLCAVPALCQVACLCLHHLLPDHAPGQSVALLPNMTQLYMQMVLALSPPGHLPTSSLLDLGEVALRGLETGKVIFYAKDIAPPLIAFGATHSLLTSFCVCTGPGHQQTGYAFTHLSLQEFLAALHLMASPKVNKDTLTQYVTLHSRWVQRTKARLGLSDHLPTFLAGLASCTCRPFLSHLAQGNEDCVGAKQAAVVQVLKKLATRKLTGPKVVELCHCVDETQEPELASLTAQSLPYQLPFHNFPLTCTDLATLTNILEHREAPIHLDFDGCPLEPHCPEALVGCGQIENLSFKSRKCGDAFAEALSRSLPTMGRLQMLGLAGSKITARGISHLVKALPLCPQLKEVSFRDNQLSDQVVLNIVEVLPHLPRLRKLDLSSNSICVSTLLCLARVAVTCPTVRMLQAREADLIFLLSPPTETTAELQRAPDLQESDGQRKGAQSRSLTLRLQKCQLQVHDAEALIALLQEGPHLEEVDLSGNQLEDEGCRLMAEAASQLHIARKLDLSNNGLSVAGVHCVLRAVSACWTLAELHISLQHKTVIFMFAQEPEEQKGPQERAAFLDSLMLQMPSELPLSSRRMRLTHCGLQEKHLEQLCKALGGSCHLGHLHLDFSGNALGDEGAARLAQLLPGLGALQSLNLSENGLSLDAVLGLVRCFSTLQWLFRLDISFESQHILLRGDKTSRDMWATGSLPDFPAAAKFLGFRQRCIPRSLCLSECPLEPPSLTRLCATLKDCPGPLELQLSCEFLSDQSLETLLDCLPQLPQLSLLQLSQTGLSPKSPFLLANTLSLCPRVKKVDLRSLHHATLHFRSNEEEEGVCCGRFTGCSLSQEHVESLCWLLSKCKDLSQVDLSANLLGDSGLRCLLECLPQVPISGLLDLSHNSISQESALYLLETLPSCPRVREASVNLGSEQSFRIHFSREDQAGKTLRLSECSFRPEHVSRLATGLSKSLQLTELTLTQCCLGQKQLAILLSLVGRPAGLFSLRVQEPWADRARVLSLLEVCAQASGSVTEISISETQQQLCVQLEFPRQEENPEAVALRLAHCDLGAHHSLLVGQLMETCARLQQLSLSQVNLCEDDDASSLLLQSLLLSLSELKTFRLTSSCVSTEGLAHLASGLGHCHHLEELDLSNNQFDEEGTKALMRALEGKWMLKRLDLSHLLLNSSTLALLTHRLSQMTCLQSLRLNRNSIGDVGCCHLSEALRAATSLEELDLSHNQIGDAGVQHLATILPGLPELRKIDLSGNSISSAGGVQLAESLVLCRRLEELMLGCNALGDPTALGLAQELPQHLRVLHLPFSHLGPGGALSLAQALDGSPHLEEISLAENNLAGGVLRFCMELPLLRQIDLVSCKIDNQTAKLLTSSFTSCPALEVILLSWNLLGDEAAAELAQVLPQMGRLKRVDLEKNQITALGAWLLAEGLAQGSSIQVIRLWNNPIPCDMAQHLKSQEPRLDFAFFDNQPQAPWGT

SEQ ID NO: 1647 - protein, 3230 aa, Homo sapiens
MQSSPSPAHPQLPVLQTQMVSDGMTGSNPVSPASSSSPASSGAGGISPQHIAQDSSLDGPPGPPDGATVPLEGFSLSQAADLANKGPKWEKSHAEIAEQAKHEAEIETRIAELRKEGFWSLKRLPKVPEPPRPKGHWDYLCEEMQWLSADFAQERRWKRGVARKVVRMVIRHHEEQRQKEERARREEQAKLRRIASTMAKDVRQFWSNVEKVVQFKQQSRLEEKRKKALDLHLDFIVGQTEKYSDLLSQSLNQPLTSSKAGSSPCLGSSSAASSPPPPASRLDDEDGDFQPQEDEEEDDEETIEVEEQQEGNDAEAQRREIELLRREGELPLEELLRSLPPQLLEGPSSPSQTPSSHDSDTRDGPEEGAEEEPPQVLEIKPPPSAVTQRNKQPWHPDEDDEEFTANEEEAEDEEDTIAAEEQLEGEVDHAMELSELAREGELSMEELLQQYAGAYAPGSGSSEDEDEDEVDANSSDCEPEGPVEAEEPPQEDSSSQSDSVEDRSEDEEDEHSEEEETSGSSASEESESEESEDAQSQSQADEEEEDDDFGVEYLLARDEEQSEADAGSGPPTPGPTTLGPKKEITDIAAAAESLQPKGYTLATTQVKTPIPLLLRGQLREYQHIGLDWLVTMYEKKLNGILADEMGLGKTIQTISLLAHLACEKGNWGPHLIIVPTSVMLNWEMELKRWCPSFKILTYYGAQKERKLKRQGWTKPNAFHVCITSYKLVLQDHQAFRRKNWRYLILDEAQNIKNFKSQRWQSLLNFNSQRRLLLTGTPLQNSLMELWSLMHFLMPHVFQSHREFKEWFSNPLTGMIEGSQEYNEGLVKRLHKVLRPFLLRRVKVDVEKQMPKKYEHVIRCRLSKRQRCLYDDFMAQTTTKETLATGHFMSVINILMQLRKVCNHPNLFDPRPVTSPFITPGICFSTASLVLRATDVHPLQRIDMGRFDLIGLEGRVSRYEADTFLPRHRLSRRVLLEVATAPDPPPRPKPVKMKVNRMLQPVPKQEGRTVVVVNNPRAPLGPVPVRPPPGPELSAQPTPGPVPQVLPASLMVSASPAGPPLIPASRPPGPVLLPPLQPNSGSLPQVLPSPLGVLSGTSRPPTPTLSLKPTPPAPVRLSPAPPPGSSSLLKPLTVPPGYTFPPAAATTTSTTTATATTTAVPAPTPAPQRLILSPDMQARLPSGEVVSIGQLASLAQRPVANAGGSKPLTFQIQGNKLTLTGAQVRQLAVGQPRPLQRNVVHLVSAGGQHHLISQPAHVALIQAVAPTPGPTPVSVLPSSTPSTTPAPTGLSLPLAANQVPPTMVNNTGVVKIVVRQAPRDGLTPVPPLAPAPRPPSSGLPAVLNPRPTLTPGRLPTPTLGTARAPMPTPTLVRPLLKLVHSPSPEVSASAPGAAPLTISSPLHVPSSLPGPASSPMPIPNSSPLASPVSSTVSVPLSSSLPISVPTTLPAPASAPLTIPISAPLTVSASGPALLTSVTPPLAPVVPAAPGPPSLAPSGASPSASALTLGLATAPSLSSSQTPGHPLLLAPTSSHVPGLNSTVAPACSPVLVPASALASPFPSAPNPAPAQASLLAPASSASQALATPLAPMAAPQTAILAPSPAPPLAPLPVLAPSPGAAPVLASSQTPVPVMAPSSTPGTSLASASPVPAPTPVLAPSSTQTMLPAPVPSPLPSPASTQTLALAPALAPTLGGSSPSQTLSLGTGNPQGPFPTQTLSLTPASSLVPTPAQTLSLAPGPPLGPTQTLSLAPAPPLAPASPVGPAPAHTLTLAPASSSASLLAPASVQTLTLSPAPVPTLGPAAAQTLALAPASTQSPASQASSLVVSASGAAPLPVTMVSRLPVSKDEPDTLTLRSGPPSPPSTATSFGGPRPRRQPPPPPRSPFYLDSLEEKRKRQRSERLERIFQLSEAHGALAPVYGTEVLDFCTLPQPVASPIGPRSPGPSHPTFWTYTEAAHRAVLFPQQRLDQLSEIIERFIFVMPPVEAPPPSLHACHPPPWLAPRQAAFQEQLASELWPRARPLHRIVCNMRTQFPDLRLIQYDCGKLQTLAVLLRQLKAEGHRVLIFTQMTRMLDVLEQFLTYHGHLYLRLDGSTRVEQRQALMERFNADKRIFCFILSTRSGGVGVNLTGADTVVFYDSDWNPTMDAQAQDRCHRIGQTRDVHIYRLISERTVEENILKKANQKRMLGDMAIEGGNFTTAYFKQQTIRELFDMPLEEPSSSSVPSAPEEEEETVASKQTHILEQALCRAEDEEDIRAATQAKAEQVAELAEFNENDGFPAGEGEEAGRPGAEDEEMSRAEQEIAALVEQLTPIERYAMKFLEASLEEVSREELKQAEEQVEAARKDLDQAKEEVFRLPQEEEEGPGAGDESSCGTGGGTHRRSKKAKAPERPGTRVSERLRGARAETQGANHTPVISAHQTRSTTTPPRCSPARERVPRPAPRPRPTPASAPAAIPALVPVPVSAPVPISAPNPITILPVHILPSPPPPSQIPPCSSPACTPPPACTPPPAHTPPPAQTCLVTPSSPLLLGPPSVPISASVTNLPLGLRPEAELCAQALASPESLELASVASSETSSLSLVPPKDLLPVAVEILPVSEKNLSLTPSAPSLTLEAGSIPNGQEQEAPDSAEGTTLTVLPEGEELPLCVSESNGLELPPSAASDEPLQEPLEADRTSEELTEAKTPTSSPEKPQELVTAEVAAPSTSSSATSSPEGPSPARPPRRRTSADVEIRGQGTGRPGQPPGPKVLRKLPGRLVTVVEEKELVRRRRQQRGAASTLVPGVSETSASPGSPSVRSMSGPESSPPIGGPCEAAPSSSLPTPPQQPFIARRHIELGVTGGGSPENGDGALLAITPPAVKRRRGRPPKKNRSPADAGRGVDEAPSSTLKGKTNGADPVPGPETLIVADPVLEPQLIPGPQPLGPQPVHRPNPLLSPVEKRRRGRPPKARDLPIPGTISSAGDGNSESRTQPPPHPSPLTPLPPLLVCPTATVANTVTTVTISTSPPKRKRGRPPKNPPSPRPSQLPVLDRDSTSVLESCGLGRRRQPQGQGESEGSSSDEDGSRPLTRLARLRLEAEGMRGRKSGGSMVVAVIQDDLDLADSGPGGLELTPPVVSLTPKLRSTRLRPGSLVPPLETEKLPRKRAGAPVGGSPGLAKRGRLQPPSPLGPEGSVEESEAEASGEEEEGDGTPRRRPGPRRLVGTTNQGDQRILRSSAPPSLAGPAVSHRGRKAKT

SEQ ID NO: 1648 - protein, 1707 aa, Homo sapiens
MDQEGGGDGQKAPSFQWRNYKLIVDPALDPALRRPSQKVYRYDGVHFSVNDSKYIPVEDLQDPRCHVRSKNRDFSLPVPKFKLDEFYIGQIPLKEVTFARLNDNVRETFLKDMCRKYGEVEEVEILLHPRTRKHLGLARVLFTSTRGAKETVKNLHLTSVMGNIIHAQLDIKGQQRMKYYELIVNGSYTPQTVPTGGKALSEKFQGSGAATETAESRRRSSSDTAAYPAGTTAVGTPGNGTPCSQDTSFSSSRQDTPSSFGQFTPQSSQGTPYTSRGSTPYSQDSAYSSSTTSTSFKPRRSENSYQDAFSRRHFSASSASTTASTAIAATTAATASSSASSSSLSSSSSSSSSSSSSQFRSSDANYPAYYESWNRYQRHTSYPPRRATREEPPGAPFAENTAERFPPSYTSYLPPEPSRPTDQDYRPPASEAPPPEPPEPGGGGGGGGPSPEREEVRTSPRPASPARSGSPAPETTNESVPFAQHSSLDSRIEMLLKEQRSKFSFLASDTEEEEENSSMVLGARDTGSEVPSGSGHGPCTPPPAPANFEDVAPTGSGEPGATRESPKANGQNQASPCSSGDDMEISDDDRGGSPPPAPTPPQQPPPPPPPPPPPPPYLASLPLGYPPHQPAYLLPPRPDGPPPPEYPPPPPPPPHIYDFVNSLELMDRLGAQWGGMPMSFQMQTQMLTRLHQLRQGKGLIAASAGPPGGAFGEAFLPFPPPQEAAYGLPYALYAQGQEGRGAYSREAYHLPMPMAAEPLPSSSVSGEEARLPPREEAELAEGKTLPTAGTVGRVLAMLVQEMKSIMQRDLNRKMVENVAFGAFDQWWESKEEKAKPFQNAAKQQAKEEDKEKTKLKEPGLLSLVDWAKSGGTTGIEAFAFGSGLRGALRLPSFKVKRKEPSEISEASEEKRPRPSTPAEEDEDDPEQEKEAGEPGRPGTKPPKRDEERGKTQGKHRKSFALDSEGEEASQESSSEKDEEDDEEDEEDEDREEAVDTTKKETEVSDGEDEESDSSSKCSLYADSDGENDSTSDSESSSSSSSSSSSSSSSSSSSSSSSSESSSEDEEEEERPAALPSASPPPREVPVPTPAPVEVPVPERVAGSPVTPLPEQEASPARPAGPTEESPPSAPLRPPEPPAGPPAPAPRPDERPSSPIPLLPPPKKRRKTVSFSAIEVVPAPEPPPATPPQAKFPGPASRKAPRGVERTIRNLPLDHASLVKSWPEEVSRGGRSRAGGRGRLTEEEEAEPGTEVDLAVLADLALTPARRGLPALPAVEDSEATETSDEAERPRPLLSHILLEHNYALAVKPTPPAPALRPPEPVPAPAALFSSPADEVLEAPEVVVAEAEEPKPQQLQQQREEGEEEGEEEGEEEEEESSDSSSSSDGEGALRRRSLRSHARRRRPPPPPPPPPPRAYEPRSEFEQMTILYDIWNSGLDSEDMSYLRLTYERLLQQTSGADWLNDTHWVHHTITNLTTPKRKRRPQDGPREHQTGSARSEGYYPISKKEKDKYLDVCPVSARQLEGVDTQGTNRVLSERRSEQRRLLSAIGTSAIMDSDLLKLNQLKFRKKKLRFGRSRIHEWGLFAMEPIAADEMVIEYVGQNIRQMVADMREKRYVQEGIGSSYLFRVDHDTIIDATKCGNLARFINHCCTPNCYAKVITIESQKKIVIYSKQPIGVDEEITYDYKFPLEDNKIPCLCGTESCRGSLN

SEQ ID NO: 1649 - protein, 196 aa, Homo sapiens
MADSAQAQKLVYLVTGGCGFLGEHVVRMLLQREPRLGELRVFDQHLGPWLEELKTGPVRVTAIQGDVTQAHEVAAAVAGAHVVIHTAGLVDVFGRASPKTIHEVNVQGTRNVIEACVQTGTRFLVYTSSMEVVGPNTKGHPFYRGNEDTPYEAVHRHPYPCSKALAEWLVLEANGRKAMLPGCTCWQPGSWSSGQP

SEQ ID NO: 1650 - protein, 869 aa, Homo sapiens
MEPETALWGPDLQGPEQSPNDAHRGAESENEEESPRQESSGEEIIMGDPAQSPESKDSTEMSLERSSQDPSVPQNPPTPLGHSNPLDHQIPLDPPAPEVVPTPSDWTKACEASWQWGALTTWNSPPVVPANEPSLRELVQGRPAGAEKPYICNECGKSFSQWSKLLRHQRIHTGERPNTCSECGKSFTQSSHLVQHQRTHTGEKPYKCPDCGKCFSWSSNLVQHQRTHTGEKPYKCTECEKAFTQSTNLIKHQRSHTGEKPYKCGECRRAFYRSSDLIQHQATHTGEKPYKCPECGKRFGQNHNLLKHQKIHAGEKPYRCTECGKSFIQSSELTQHQRTHTGEKPYECLECGKSFGHSSTLIKHQRTHLREDPFKCPVCGKTFTLSATLLRHQRTHTGERPYKCPECGKSFSVSSNLINHQRIHRGERPYICADCGKSFIMSSTLIRHQRIHTGEKPYKCSDCGKSFIRSSHLIQHRRTHTGEKPYKCPECGKSFSQSSNLITHVRTHMDENLFVCSDCGKAFLEAHELEQHRVIHERGKTPARRAQGDSLLGLGDPSLLTPPPGAKPHKCLVCGKGFNDEGIFMQHQRIHIGENPYKNADGLIAHAAPKPPQLRSPRLPFRGNSYPGAAEGRAEAPGQPLKPPEGQEGFSQRRGLLSSKTYICSHCGESFLDRSVLLQHQLTHGNEKPFLFPDYRIGLGEGAGPSPFLSGKPFKCPECKQSFGLSSELLLHQKVHAGGKSSQKSPELGKSSSVLLEHLRSPLGARPYRCSDCRASFLDRVALTRHQETHTQEKPPNPEDPPPEAVTLSTDQEGEGETPTPTESSSHGEGQNPKTLVEEKPYLCPECGAGFTEVAALLLHRSCHPGVSL

SEQ ID NO: 1651 - protein, 463 aa, Homo sapiens
MGKKGKKEKKGRGAEKTAAKMEKKVSKRSRKEETFLYNELYVYNTRKDTWTKVDIPSPPPRRCAHQAVVVPQGGGQLWVFGGEFASPNGEQFYHYKDLWVLHLATKTWEQVKSTGGPSGRSGHRMVAWKRQLILFGGFHESTRDYIYYNDVYAFNLDTFTWSKLSPSGTGPTPRSGCQMSVTPQGGIVVYGGYSKQRVKKDVDKGTRHSDMFLLKPEDGREDKWVWTRMNPSGVKPTPRSGFSVAMAPNHQTLFFGGVCDEEEEESLSGEFFNDLYFYDATRNRWFEGQLKGPKSEKKKRRRGRKEEPEGGSRPACGGAGTQGPVQLVKEVVAEDGTVVTIKQVLTAPGSAGQPRSEDEDSLEEAGSPAPGPCPRSNAMLAVKHGVLYVYGGMFEAGDRQVTLSDLHCLDLHRMEAWKALVEMDPETQEWLEETDSEEDSEEVEGAEGGVDDEDSGEESGAED

SEQ ID NO: 1652 - protein, 839 aa, Homo sapiens
MTSRLRALGGRINNIRTSELPKEKTRSEVICSIHFLDGVVQTFKVTKQDTGQVLLDMVHNHLGVTEKEYFGLQHDDDSVDSPRWLEASKAIRKQLKGGFPCTLHFRVRFFIPDPNTLQQEQTRHLYFLQLKMDICEGRLTCPLNSAVVLASYAVQSHFGDYNSSIHHPGYLSDSHFIPDQNEDFLTKVESLHEQHSGLKQSEAESCYINIARTLDFYGVELHSGRDLHNLDLMIGIASAGVAVYRKYICTSFYPWVNILKISFKRKKFFIHQRQKQAESREHIVAFNMLNYRSCKNLWKSCVEHHTFFQAKKLLPQEKNVLSQYWTMGSRNTKKSVNNQYCKKVIGGMVWNPAMRRSLSVEHLETKSLPSRSPPITPNWRSPRLRHEIRKPRHSSADNLANEMTYITETEDVFYTYKGSLAPQDSDSEVSQNRSPHQESLSENNPAQSYLTQKSSSSVSPSSNAPGSCSPDGVDQQLLDDFHRVTKGGSTEDASQYYCDKNDNGDSYLVLIRITPDEDGKFGFNLKGGVDQKMPLVVSRINPESPADTCIPKLNEGDQIVLINGRDISEHTHDQVVMFIKASRESHSRELALVIRRRAVRSFADFKSEDELNQLFPEAIFPMCPEGGDTLEGSMAQLKKGLESGTVLIQFEQLYRKKPGLAITFAKLPQNLDKNRYKDVLPYDTTRVLLQGNEDYINASYVNMEIPAANLVNKYIATQGPLPHTCAQFWQVVWDQKLSLIVMLTTLTERGRTKCHQYWPDPPDVMNHGGFHIQCQSEDCTIAYVSREMLVTNTQVSRSLRGTVEGQVLNQRPLSSQVVTLLGVHSVCTWQACQPGKNTQ

SEQ ID NO: 1653 - protein, 638 aa, Homo sapiens
MKGGCVSQWKAAAGFLFCVMVFASAERPVFTNHFLVELHKGGEDKARQVAAEHGFGVRKLPFAEGLYHFYHNGLAKAKRRRSLHHKQQLERDPRVKMALQQEGFDRKKRGYRDINEIDINMNDPLFTKQWYLINTGQADGTPGLDLNVAEAWELGYTGKGVTIGIMDDGIDYLHPDLASNYNAEASYDFSSNDPYPYPRYTDDWFNSHGTRCAGEVSAAANNNICGVGVAYNSKVAGIRMLDQPFMTDIIEASSISHMPQLIDIYSASWGPTDNGKTVDGPRELTLQAMADGVNKGRGGKGSIYVWASGDGGSYDDCNCDGYASSMWTISINSAINDGRTALYDESCSSTLASTFSNGRKRNPEAGVATTDLYGNCTLRHSGTSAAAPEAAGVFALALEANLGLTWRDMQHLTVLTSKRNQLHDEVHQWRRNGVGLEFNHLFGYGVLDAGAMVKMAKDWKTVPERFHCVGGSVQDPEKIPSTGKLVLTLTTDACEGKENFVRYLEHVQAVITVNATRRGDLNINMTSPMGTKSILLSRRPRDDDSKVGFDKWPFMTTHTWGEDARGTWTLELGFVGSAPQKGVLKEWTLMLHGTQSAPYIDQVVRDYQSKLAMSKKEELEEELDEAVERSLKSILNKN

SEQ ID NO: 1654 - protein, 227 aa, Homo sapiens
MGGTTSTRRVTFEADENENITVVKGIRLSENVIDRMKESSPSGSKSQRYSGAYGASVSDEELKRRVAEELALEQAKKESEDQKRLKQAKELDRERAAANEQLTRAILRERICSEEERAKAKHLARQLEEKDRVLKKQDAFYKEQLARLEERSSEFYRVTTEQYQKAAEEVEAKFKRYESHPVCADLQAKILQCYRENTHQTLKCSALATQYMHCVNHAKQSMLEKGG

SEQ ID NO: 1655 - protein, 948 aa, Homo sapiens
MEEKEILRRQIRLLQGLIDDYKTLHGNAPAPGTPAASGWQPPTYHSGRAFSARYPRPSRRGYSSHHGPSWRKKYSLVNRPPGPSDPPADHAVRPLHGARGGQPPVPQQHVLERQVQLSQGQNVVIKVKPPSKSGSASASGAQRGSLEEFEETPWSDQRPREGEGEPPRGQLQPSRPTRARGTCSVEDPLLVCQKEPGKPRMVKSVGSVGDSPREPRRTVSESVIAVKASFPSSALPPRTGVALGRKLGSHSVASCAPQLLGDRRVDAGHTDQPVPSGSVGGPARPASGPRQAREASLVVTCRTNKFRKNNYKWVAASSKSPRVARRALSPRVAAENVCKASAGMANKVEKPQLIADPEPKPRKPATSSKPGSAPSKYKWKASSPSASSSSSFRWQSEASSKDHASQLSPVLSRSPSGDRPAVGHSGLKPLSGETPLSAYKVKSRTKIIRRRSSTSLPGDKKSGTSPAATAKSHLSLRRRQALRGKSSPVLKKTPNKGLVQVTTHRLCRLPPSRAHLPTKEASSLHAVRTAPTSKVIKTRYRIVKKTPASPLSAPPFPLSLPSWRARRLSLSRSLVLNRLRPVASGGGKAQPGSPWWRSKGYRCIGGVLYKVSANKLSKTSGQPSDAGSRPLLRTGRLDPAGSCSRSLASRAVQRSLAIIRQARQRREKRKEYCMYYNRFGRCNRGERCPYIHDPEKVAVCTRFVRGTCKKTDGTCPFSHHVSKEKMPVCSYFLKGICSNSNCPYSHVYVSRKAEVCSDFLKGYCPLGAKCKKKHTLLCPDFARRGACPRGAQCQLLHRTQKRHSRRAATSPAPGPSDATARSRVSASHGPRKPSASQRPTRQTPSSAALTAAAVAAPPHCPGGSASPSSSKASSSSSSSSSPPASLDHEAPSLQEAALAAACSNRLCKLPSFISLQSSPSPGAQPRVRAPRAPLTKDSGKPLHIKPRL

SEQ ID NO: 1656 - protein, 1198 aa, Homo sapiens
MRSLRKKREKPRPEQWKGLPGPPRAPEPEDVAVPGGVDLLTLPQLCFPGGVCVATEPKEDCVHFLVLTDVCGNRTYGVVAQYYRPLHDEYCFYNGKTHRECPGCFVPFAVCVVSRFPYYNSLKDCLSCLLALLKPCKDFEVDSHIKDFAAKLSLIPSPPPGPLHLVFNMKSLQIVLPARADPESPILDLDLHLPLLCFRPEKVLQILTCILTEQRIVFFSSDWALLTLVTECFMAYLYPLQWQHPFVPILSDQMLDFVMAPTSFLMGCHLDHFEEVSKEADGLVLINIDHGSITYSKSTDDNVDIPDVPLLAAQTFIQRVQSLQLHHELHAAHLLSSTDLKEGRAHRRSWQQKLNCQIQQTTLQLLVSIFRDVKNHLNYEHRVFNSEEFLKTRAPGDHQFYKQVLDTYMFHSFLKARLNRRMDAFAQMDLDTQSEEDRINGMLLSPRRPTVEKRASRKSSHLHVTHRRMVVSMPNLQDIAMPELAPRNSSLRLTDTAGCRGSSAVLNVTPKSPYTFKIPEIHFPLESKCVQAYHAHFVSMLSEAMCFLAPDNSLLLARYLYLRGLVYLMQGQLLNALLDFQNLYKTDIRIFPTDLVKRTVESMSAPEWEGAEQAPELMRLISEILDKPHEASKLDDHVKKFKLPKKHMQLGDFMKRVQESGIVKDASIIHRLFEALTVGQEKQIDPETFKDFYNCWKETEAEAQEVSLPWLVMEHLDKNECVCKLSSSVKTNLGVGKIAMTQKRLFLLTEGRPGYLEISTFRNIEEVRRTTTTFLLRRIPTLKIRVASKKEVFEANLKTECDLWHLMVKEMWAGKKLADDHKDPHYVQQALTNVLLMDAVVGTLQSPGAIYAASKLSYFDKMSNEMPMTLPETTLETLKHKINPSAGEAFPQAVDVLLYTPGHLDPAEKVEDAHPKLWCALSEGKVTVFNASSWTIHQHSFKVGTAKVNCMVMADQNQVWVGSEDSVIYIINVHSMSCNKQLTAHCSSVTDLIVQDGQEAPSNVYSCSMDGMVLVWNVSTLQVTSRFQLPRGGLTSIRLHGGRLWCCTGNSIMVMKMNGSLHQELKIEENFKDTSTSFLAFQLLPEEEQLWAACAGRSEVYIWSLKDLAQPPQRVPLEDCSEINCMIRVKKQVWVGSRGLGQGTPKGKIYVIDAERKTVEKELVAHMDTVRTLCSAEDRYVLSGSGREEGKVAIWKGE

SEQ ID NO: 1657 - protein, 306 aa, Homo sapiens [sequence omitted]

SEQ ID NO: 1658 - protein, 1301 aa, Homo sapiens
MYKEDPVQGKSNGELSLSRESEGQKNVSSIPGKTGKRRGRPPKRKKLQEEILLSEKQEENSLASEPQTRHGSQGPGQGTWWLLCQTEEEWRQVTESFRERTSLRERQLYKLLSEDFLPEICNMIAQKGKRPQRTKAELHPRWMSDHLSIKPVKQEETPVLTRIEKQKRKEEEEERQILLAVQKKEQEQMLKEERKRELEEKVKAVEDRAKRRKLREERAWLLAQGKELPPELSHLDPNSPMREEKKTKDLFELDDDFTAMYKVLDVVKAHKDSWPFLEPVDESYAPNYYQIIKAPMDISSMEKKLNGGLYCTKEEFVNDMKTMFRNCRKYNGESSEYTKMSDNLERCFHRAMMKHFPGEDGDTDEEFWIREDEKREKRRSRAGRSGGSHVWTRSRDPEGSSRKQQPMENGGKSLPPTRRAPSSGDDQSSSSTQPPREVGTSNGRGFSHPLHCGGTPSQAPFLNQMRPAVPGTFGPLRGSDPATLYGSSGVPEPHPGEPVQQRQPFTMQPPVGINSLRGPRLGTPEEKQMCGGLTHLSNMGPHPGSLQLGQISGPSQDGSMYAPAQFQPGFIPPRHGGAPARPPDFPESSEIPPSHMYRSYKYLNRVHSAVWNGNHGATNQGPLGPDEKPHLGPGPSHQPRTLGHVMDSRVMRPPVPPNQWTEQSGFLPHGVPSSGYMRPPCKSAGHRLQPPPVPAPSSLFGAPAQALRGVQGGDSMMDSPEMIAMQQLSSRVCPPGVPYHPHQPAHPRLPGPFPQVAHPMSVTVSAPKPALGNPGRAPENSEAQEPENDQAEPLPGLEEKPPGVGTSEGVYLTQLPHPTPPLQTDCTRQSSPQERETVGPELKSSSSESADNCKAMKGKNPWPSDSSYPGPAAQGCVRDLSTVADRGALSENGVIGEASPCGSEGKGLGSSGSEKLLCPRGRTLQETMPCTGQNAATPPSTDPGLTGGTVSQFPPLYMPGLEYPNSAAHYHISPGLQGVGPVMGGKSPASHPQHFPPRGFQSNHPHSGGFPRYRPPQGMRYSYHPPPQPSYHHYQRTPYYACPQSFSDWQRPLHPQGSPSGPPASQPPPPRSLFSDKNAMASLQGCETLNAALTSPTRMDAVAAKVPNDGQNPGPEEEKLDESMERPESPKEFLDLDNHNAATKRQSSLSASEYLYGTPPPLSSGMGFGSSAFPPHSVMLQTGPPYTPQRPASHFQPRAYSSPVAALPPHHPGATQPNGLSQEGPIYRCQEEGLGHFQAVMMEQIGTRSGIRGPFQEMYRPSGMQMHPVQSQASFPKTPTAATSQEEVPPHKPPTLPLDQS

SEQ ID NO: 1659 - protein, 358 aa, Homo sapiens
MSADAAAGAPLPRLCCLEKGPNGYGFHLHGEKGKLGQYIRLVEPGSPAEKAGLLAGDRLVEVNGENVEKETHQQVVSRIRAALNAVRLLVVDPETDEQLQKLGVQVREELLRAQEAPGQAEPPAAAEVQGAGNENEPREADKSHPEQRELRPRLCTMKKGPSGYGFNLHSDKSKPGQFIRSVDPDSPAEASGLRAQDRIVEVNGVCMEGKQHGDVVSAIRAGGDETKLLVVDRETDEFFKKCRVIPSQEHLNGPLPVPFTNGEIQKENSREALAEAALESPRPALVRSASSDTSEELNSQDSPPKQDSTAPSSTSSSDPILDFNISLAMAKERAHQKRSSKRAPQMDWSKKNELFSNL

SEQ ID NO: 1660 - protein, 424 aa, Homo sapiens
MTLRPGTMRLACMFSSILLFGAAGLLLFISLQDPTELAPQQVPGIKFNIRPRQPHHDLPPGGSQDGDLKEPTERVTRDLSSGAPRGRNLPAPDQPQPPLQRGTRLRLRQRRRRLLIKKMPAAATIPANSSDAPFIRPGPGTLDGRWVSLHRSQQERKRVMQEACAKYRASSSRRAVTPRHVSRIFVEDRHRVLYCEVPKAGCSNWKRVLMVLAGLASSTADIQHNTVHYGSALKRLDTFDRQGILHRLSTYTKMLFVREPFERLVSAFRDKFEHPNSYYHPVFGKAILARYRANASREALRTGSGVRFPEFVQYLLDVHRPVGMDIHWDHVSRLCSPCLIDYDFVGKFESMEDDANFFLSLIRAPRNLTFPRFKDRHSQEARTTARIAHQYFAQLSALQRQRTYDFYYMDYLMFNYSKPFADLY

SEQ ID NO: 1661 - protein, 1035 aa, Homo sapiens
MGKAENYELYSVELGPGPGGDMAAKMSKKKKAGGGGGKRKEKLENMKKEMEINDHQLSVAELEQKYQTSATKGLSASLAAELLLRDGPNALRPPRGTPEYVKFARQLAGGLQCLMWVAAAICLIAFAIQASEGDLTTDDNLYLAIALIAVVVVTGCFGYYQEFKSTNIIASFKNLVPQQATVIRDGDKFQINADQLVVGDLVEMKGGDRVPADIRILAAQGCKVDNSSLTGESEPQTRSPECTHESPLETRNIAFFSTMCLEGTVQGLVVNTGDRTIIGRIASLASGVENEKTPIAIEIEHFVDIIAGLAILFGATFFIVAMCIGYTFLRAMVFFMAIVVAYVPEGLLATVTVCLSLTAKRLASKNCVVKNLEAVETLGSTSVICSDKTGTLTQNRMTVSHLWFDNHIHTADTTEDQSGQTFDQSSETWRALCRVLTLCNRAAFKSGQDAVPVPKRIVIGDASETALLKFSELTLGNAMGYRDRFPKVCEIPFNSTNKFQLSIHTLEDPRDPRHLLVMKGAPERVLERCSSILIKGQELPLDEQWREAFQTAYLSLGGLGERVLGFCQLYLNEKDYPPGYAFDVEAMNFPSSGLCFAGLVSMIDPPRATVPDAVLKCRTAGIRVIMVTGDHPITAKAIAASVGIISEGSETVEDIAARLRVPVDQVNRKDARACVINGMQLKDMDPSELVEALRTHPEMVFARTSPQQKLVIVESCQRLGAIVAVTGDGVNDSPALKKADIGVAMGIAGSDAAKNAADMILLDDNFASIVTGVEQGRLIFDNLKKSIAYTLTKNIPELTPYLIYITVSVPLPLGCITILFIELCTDIFPSVSLAYEKAESDIMHLRPRNPKRDRLVNEPLAAYSYFQIGAIQSFAGFTDYFTAMAQEGWFPLLCVGLRAQWEDHHLQDLQDSYGQEWTFGQRLYQQYTCYTVFFISIEVCQIADVLIRKTRRLSAFQQGFFRNKILVIAIVFQVCIGCFLCYCPGMPNIFNFMPIRFQWWLVPLPYGILIFVYDEIRKLGVRCCPGSWWDQELYY

SEQ ID NO: 1662 - protein, 633 aa, Homo sapiens
MLRMRVPALLVLLFCFRGRAGPSPHFLQQPEDLVVLLGEEARLPCALGAYWGLVQWTKSGLALGGQRDLPGWSRYWISGNAANGQHDLHIRPVELEDEASYECQATQAGLRSRPAQLHVLVPPEAPQVLGGPSVSLVAGVPANLTCRSRGDARPTPELLWFRDGVLLDGATFHQTLLKEGTPGSVESTLTLTPFSHDDGATFVCRARSQALPTGRDTAITLSLQYPPEVTLSASPHTVQEGEKVIFLCQATAQPPVTGYRWAKGGSPVLGARGPRLEVVADASFLTEPVSCEVSNAVGSANRSTALDVLFGPILQAKPEPVSVDVGEDASFSCAWRGNPLPRVTWTRRGGAQVLGSGATLRLPSVGPEDAGDYVCRAEAGLSGLRGGAAEARLTVNAPPVVTALHSAPAFLRGPARLQCLVFASPAPDAVVWSWDEGFLEAGSQGRFLVETFPAPESRGGLGPGLISVLHISGTQESDFSRSFNCSARNRLGEGGAQASLGRRDLLPTVRIVAGVAAATTTLLMVITGVALCCWRHSKASASFSEQKNLMRIPGSSDGSSSRGPEEEETGSREDRGPIVHTDHSDLVLEEEGTLETKDPTNGYYKVRGVSPPASPDSRVTSFQWKSPGISNLP

SEQ ID NO: 1663 - protein, 480 aa, Homo sapiens
MAGAGPAPGLPGAGGPVVPGPGAGIPGKSGEERLKEMEAEMALFEQEVLGAPVPGIPTAVPAVPTVPTVPTVEAMQVPAAPVIRPIIATNTYQQVQQTLEARAAAAATVVPPMVGGPPFVGPVGFGPGDRSHLDSPEAREAMFLRRAAVAPQRAPILRPAFVPHVLQRADSALSSAAAGPRPMALRPPHQALVGPPLPGPPGPPMMLPPMARAPGPPLGSMAALRPPLEEPAAPRELGLGLGLGLKEKEEAVVAAAAGLEEASAAVAVGAGGAPAGPAVIGPSLPLALAMPLPEPEPLPLPLEVVRGLLPPLRIPELLSLRPRPRPPRPEPPPGLMALEVPEPLGEDKKKGKPEKLKRCIRTAAGSSWEDPSLLEWDADDFRIFCGDLGNEVNDDILARAFSRFPSFLKAKVIRDKRTGKTKGYGFVSFKDPSDYVRAMREMNGKYVGSRPIKLRKSMWKDRNLDVVRKKQKEKKKLGLR

SEQ ID NO: 1664 - protein, 410 aa, Homo sapiens
MPRERRERDAKERDTMKEDGGAEFSARSRKRKANVTVFLQDPDEEMAKIDRTARDQCGSQPWDNNAVCADPCSLIPTPDKEDDDRVYPNSTCKPRIIAPSRGSPLPVLSWANREEVWKIMLNKEKTYLRDQHFLEQHPLLQPKMRAILLDWLMEVCEVYKLHRETFYLAQDFFDRYMATQENVVKTLLQLIGISSLFIAAKLEEIYPPKLHQFAYVTDGACSGDEILTMELMIMKALKWRLSPLTIVSWLNVYMQVAYLNDLHEVLLPQYPQQIFIQIAELLDLCVLDVDCLEFPYGILAASALYHFSSSELMQKVSGYQWCDIENCVKWMVPFAMVIRETGSSKLKHFRGVADEDAHNIQTHRDSLDLLDKARAKKAMLSEQNRASPLPSGLLTPPQSGKKQSSGPEMA

SEQ ID NO: 1665 - protein, 680 aa, Homo sapiens
MVPGVPGAVLTLCLWLAASSGCLAAGPGAAAARRLDESLSAGSVQRARCASRCLSLQITRISAFFQHFQNNGSLVWCQNHKQCSKCLEPCKESGDLRKHQCQSFCEPLFPKKSYECLTSCEFLKYILLVKQGDCPAPEKASGFAAACVESCEVDNECSGVKKCCSNGCGHTCQVPKTLYKGVPLKPRKELRFTELQSGQLEVKWSSKFNISIEPVIYVVQRRWNYGIHPSEDDATHWQTVAQTTDERVQLTDIRPSRWYQFRVAAVNVHGTRGFTAPSKHFRSSKDPSAPPAPANLRLANSTVNSDGSVTVTIVWDLPEEPDIPVHHYKVFWSWMVSSKSLVPTKKKRRKTTDGFQNSVILEKLQPDCDYVVELQAITYWGQTRLKSAKVSLHFTSTHATNNKEQLVKTRKGGIQTQLPFQRRRPTRPLEVGAPFYQDGQLQVKVYWKKTEDPTVNRYHVRWFPEACAHNRTTGSEASSGMTHENYIILQDLSFSCKYKVTVQPIRPKSHSKAEAVFFTTPPCSALKGKSHKPVGCLGEAGHVLSKVLAKPENLSASFIVQDVNITGHFSWKMAKANLYQPMTGFQVTWAEVTTESRQNSLPNSIISQSQILPSDHYVLTVPNLRPSTLYRLEVQVLTPGGEGPATIKTFRTPELPPSSAHRSHLKHRHPHHYKPSPERY

SEQ ID NO: 1666 - protein, 903 aa, Homo sapiens
MSDSGSQLGSMGSLTMKSQLQITVISAKLKENKKNWFGPSPYVEVTVDGQSKKTEKCNNTNSPKWKQPLTVIVTPVSKLHFRVWSHQTLKSDVLLGTAALDIYETLKSNNMKLEEVVVTLQLGGDKEPTETIGDLSICLDGLQLESEVVTNGETTCSENGVSLCLPRLECNSAISAHCNLCLPGLSDSPISASRVAGFTGASQNDDGSRSKDETRVSTNGSDDPEDAGAGENRRVSGNNSPSLSNGGFKPSRPPRPSRPPPPTPRRPASVNGSPSATSESDGSSTGSLPPTNTNTNTSEGATSGLIIPLTISGGSGPRPLNPVTQAPLPPGWEQRVDQHGRVYYVDHVEKRTTWDRPEPLPPGWERRVDNMGRIYYVDHFTRTTTWQRPTLESVRNYEQWQLQRSQLQGAMQQFNQRFIYGNQDLFATSQSKEFDPLGPLPPGWEKRTDSNGRVYFVNHNTRITQWEDPRSQGQLNEKPLPEGWEMRFTVDGIPYFVDHNRRTTTYIDPRTGKSALDNGPQIAYVRDFKAKVQYFRFWCQQLAMPQHIKITVTRKTLFEDSFQQIMSFSPQDLRRRLWVIFPGEEGLDYGGVAREWFFLLSHEVLNPMYCLFEYAGKDNYCLQINPASYINPDHLKYFRFIGRFIAMALFHGKFIDTGFSLPFYKRILNKPVGLKDLESIDPEFYNSLIWVKENNIEECDLEMYFSVDKEILGEIKSHDLKPNGGNILVTEENKEEYIRMVAEWRLSRGVEEQTQAFFEGFNEILPQQYLQYFDAKELEVLLCGMQEIDLNDWQRHAIYRHYARTSKQIMWFWQFVKEIDNEKRMRLLQFVTGTCRLPVGGFADLMGSNGPQKFCIEKVGKENWLPRSHTCFNRLDLPPYKSYEQLKEKLLFAIEETEGFGQE

SEQ ID NO: 1667 - protein, 41 aa, Homo sapiens
LGGRSSCEDPGCPRDEERAPRGNRCHELQSFQDVPLKMDCI

SEQ ID NO: 1668 - protein, 604 aa, Homo sapiens
MAKESGISLKEIQVLARQWKVGPEKRVPAMPGSPVEVKIQSRSSPPTMPPLPPINPGGPRPVSFTPTALSNGINHSPPTLNGAPSPPQRFSNGPASSTSSALTNQQLPATCGARQLSKLKRFLTTLQQFGNDISPEIGEKVRTLVLALVNSTVTIEEFHCKLQEATNFPLRPFVIPFLKANLPLLQRELLHCARAAKQTPSQYLAQHEHLLLNTSIASPADSSELLMEVHGNGKRPSPERREENSFDRDTIAPEPPAKRVCTISPAPRHSPALTVPLMNPGGQFHPTPPPLQHYTLEDIATSHLYREPNKMLEHREVRDRHHSLGLNGGYQDELVDHRLTEREWADEWKHLDHALNCIMEMVEKTRRSMAVLRRCQESDREELNYWKRRYNENTELRKTGTELVSRQHSPGSADSLSNDSQREFNSRPGTGYVPVEFWKKTEEAVNKVKIQAMSEVQKAVAEAEQKAFEVIATERARMEQTIADVKRQAAEDAFLVINEQEESTENCWNCGRKASETCSGCNIARYCGSFCQHKDWERHHRLCGQNLHGQSPHGQGRPLLPVGRGSSARSADCSVPSPALDKTSATTSRSSTPASVTAIDTNGL

SEQ ID NO: 1669 - protein, 433 aa, Homo sapiens
MEYEVKKGKKGFVSPIRRLVFPKAGRRAACRSSVSRRPLHSMPLYPPDYLIDPQILLCDYLEKEVKFLGHLTWVTSSLNPSSRDELLQLLDTARQLKELPLKTTAEQDSILSLSARCLLLTWRDNEELILRIPTHEIAAASYLQDDALHLLVLKTGLGVDPVPAGVDASPGGAGRDPGPPGGAPEKRRVGTAERRHTICSLDWRMGWGGGAAEARAGGGGGGSLERQRAGARASGSWERRQTFSGSWERRHGGGGGGGGAGKPGGSWERRQAGSGGGGSWERRHPGPNPLDPQDPSPDAYCNLVILAVANRDAAEESCALICQVFQIIYGDQSIECVDRAGYHYTSTPERPWLCSRIMAPRTPLKHVTAARPHLLSMAPTAAAATTAVWAWSSYRITWSRCGVSWGPSRSSSLRCCCGSTGWGCPSRTIAQAC

SEQ ID NO: 1670 - protein, 550 aa, Homo sapiens
MTALDLFLTNQFSEALSYLKPRTKESMYHSLTYATILEMQAMMTFDPQDILLAGNMMKEAQMLCQRHRRKSSVTDSFSSLVNRPTLGQFTEEEIHAEVCYAECLLQRAALTFLQDENMVSFIKGGIKVRNSYQTYKELDSLVQSSQYCKGENHPHFEGGVKLGVGAFNLTLSMLPTRILRLLEFVGFSGNKDYGLLQLEEGASGHSFRSVLCVMLLLCYHTFLTFVLGTGNVNIEEAEKLLKPYLNRYPKGAIFLFFAGRIEVIKGNIDAAIRRFEECCEAQQHWKQFHHMCYWELMWCFTYKGQWKMSYFYADLLSKENCWSKATYIYMKAAYLSMFGKEDHKPFGDDEVELFRAVPGLKLKIAGKSLPTEKFAIRKSRRYFSSNPISLPVPALEMMYIWNGYAVIGKQPKLTDGILEIITKAEEMLEKGPENEYSVDDECLVKLLKGLCLKYLGRVQEAEENFRSISANEKKIKYDHYLIPNALLELALLLMEQDRNEEAIKLLESAKQNYKNYSMESRTHFRIQAATLQAKSSLENSSRSMVSSVSL

SEQ ID NO: 1671 - protein, 420 aa, Homo sapiens
MDSSPSLPLIRTPESSLHEALDQCMTALDLFLTNQFSEALSYLKPRTKESMYHSLTYATILEMQAMMTFDPQDILLAGNMMKEAQMLCQRHRRKSSVTDSFSSLVNRPTLGQFTEEEIHAEVCYAECLLQRAALTFLQGSSHGGAVRPRALHDPSHACSCPPGPGRQHLFLLQDENMVSFIKGGIKVRNSYQTYKELDSLVQSSQYCKGENHPHFEGGVKLGVGAFNLTLSMLPTRILRLLEFVGFSGNKDYGLLQLEEGASGHSFRSVLCVMLLLCYHTFLTFVLGTGNVNIEEAEKLLKPYLNRYPKGAIFLFFAGRIEVIKGNIDAVSDGGPGRGWGSLGVSQTSRKSGTCDILRDRIDWGRGGGQERTNQRAGAGEALLAEQPGKTREEEAFVVPGILTGRYRTAALQWREVEGGA

SEQ ID NO: 1672 - protein, 1151 aa, Homo sapiens
MLRRVTVAAVCATRRKLCEAGRELAALWGIETRGRCEDSAAARPFPILAMPGRNKAKSTCSCPDLQPNGQDLGENSRVARLGADESEEEGRRGSLSNAGDPEIVKSPSDPKQYRYIKLQNGLQALLISDLSNMEGKTGNTTDDEEEEEVEEEEEDDDEDSGAEIEDDDEEGFDDEDEFDDEHDDDLDTEDNELEELEERAEARKKTTEKQSAAALCVGVGSFADPDDLPGLAHFLEHMVFMGSLKYPDENGFDAFLKKHGGSDNASTDCERTVFQFDVQRKYFKEALDRWAQFFIHPLMIRDAIDREVEAVDSEYQLARPSDANRKEMLFGSLARPGHPMGKFFWGNAETLKHEPRKNNIDTHARLREFWMRYYSSHYMTLVVQSKETLDTLEKWVTEIFSQIPNNGLPRPNFGHLTDPFDTPAFNKLYRVVPIRKIHALTITWALPPQQQHYRVKPLHYISWLVGHEGKGSILSFLRKKCWALALFGGNGETGFEQNSTYSVFSISITLTDEGYEHFYEVAYTVFQYLKMLQKLGPEKRIFEEIRKIEDNEFHYQEQTDPVEYVENMCENMQLYPLQDILTGDQLLFEYKPEVIGEALNQLVPQKANLVLLSGANEGKCDLKEKWFGTQYSIEDIENSWAELWNSNFELNPDLHLPAENKYIATDFTLKAFDCPETEYPVKIVNTPQGCLWYKKDNKFKIPKAYIRFHLISPLIQKSAANVVLFDIFVNILTHNLAEPAYEADVAQLEYKLVAGEHGLIIRVKGFNHKLPLLFQLIIDYLAEFNSTPAVFTMITEQLKKTYFNILIKPETLAKDVRLLILEYARWSMIDKYQALMDGLSLESLLSFVKEFKSQLFVEGLVQGNVTSTESMDFLKYVVDKLNFKPLEQEMPVQFQVVELPSGHHLCKVKALNKGDANSEVTVYYQSGTRSLREYTLMELLVMHMEEPCFDFLRTKQTLGYHVYPTCRNTSGILGFSVTVGTQATKYNSEVVDKKIEEFLSSFEEKIENLTEEAFNTQVTALIKLKECEDTHLGEEVDRNWNEVVTQQYLFDRLAHEIEALKSFSKSDLVNWFKAHRGPGSKMLSVHVVGYGKYELEEDGTPSSEDSNSSCEVMQLTYLPTSPLLADCIIPITDIRAFTTTLNLLPYHKIVK

SEQ ID NO: 1673 - protein, 1341 aa, Homo sapiens
MWRRKHPRTSGGTRGVLSGNRGVEYGSGRGHLGTFEGRWRKLPKMPEAVGTDPSTSRKMAELEEVTLDGKPLQALRVTDLKAALEQRGLAKSGQKSALVKRLKGALMLENLQKHSTPHAAFQPNSQIGEEMSQNSFIKQYLEKQQELLRQRLEREAREAAELEEASAESEDEMIHPEGVASLLPPDFQSSLERPELELSRHSPRKSSSISEEKGDSDDEKPRKGERRSSRVRQARAAKLSEGSQPAEEEEDQETPSRNLRVRADRNLKTEEEEEEEEEEEEDDEEEEGDDEGQKSREAPILKEFKEEGEEIPRVKPEEMMDERPKTRSQEQEVLERGGRFTRSQEEARKSHLARQQQEKEMKTTSPLEEEEREIKSSQGLKEKSKSPSPPRLTEDRKKASLVALPEQTASEEETPPPLLTKEASSPPPHPQLHSEEEIEPMEGPAPAVLIQLSPPNTDADTRELLVSQHTVQLVGGLSPLSSPSDTKAESPAEKVPEESVLPLVQKSTLADYSAQKDLEPESDRSAQPLPLKIEELALAKGITEECLKQPSLEQKEGRRASHTLLPSHRLKQSADSSSSRSSSSSSSSSRSRSRSPDSSGSRSHSPLRSKQRDVAQARTHANPRGRPKMGSRSTSESRSRSRSRSRSASSNSRKSLSPGVSRDSSTSYTETKDPSSGQEVATPPVPQLQVCEPKERTSTSSSSVQARRLSQPESAEKHVTQRLQPERGSPKKCEAEEAEPPAATQPQTSETQTSHLPESERIHHTVEEKEEVTMDTSENRPENDVPEPPMPIADQVSNDDRPEGSVEDEEKKESSLPKSFKRKISVVSATKGVPAGNSDTEGGQPGRKRRWGASTATTQKKPSISITTESLKSLIPDIKPLAGQEAVVDLHADDSRISEDETERNGDDGTHDKGLKICRTVTQVVPAEGQENGQREEEEEEKEPEAEPPVPPQVSVEVALPPPAEHEVKKVTLGDTLTRRSISQQKSGVSITIDDPVRTAQVPSPPRGKISNIVHISNLVRPFTLGQLKELLGRTGTLVEEAFWIDKIKSHCFVTYSTVEEAVATRTALHGVKWPQSNPKFLCADYAEQDELDYHRGLLVDRPSETKTEEQGIPRPLHPPPPPPVQPPQHPRAEQREQERAVREQWAEREREMERRERTRSEREWDRDKVREGPRSRSRSRDRRRKERAKSKEKKSEKKEKAQEEPPAKLLDDLFRKTKAAPCIYWLPLTDSQIVQKEAERAERAKEREKRRKEQEEEEQKEREKEAERERNRQLEREKRREHSRERDRERERERERDRGDRDRDRERDRERGRERDRRDTKRHSRSRSRSTPVRDRGGRR

SEQ ID NO: 1674 - protein, 538 aa, Homo sapiens
MERLGEKASRLLEKFGRRKGESSRSGSDGTPGPGKGRLSGLGGPRKSGPRGATGGPGDEPLEPAREQGSLDAERNQRGSFEAPRYEGSFPAGPPPTRALPLPQSLPPDFRLEPTAPALSPRSSFASSSASDASKPSSPRGSLLLDGAGAGGAGGSRPCSNRTSGISMGYDQRHGSPLPAGPCLFGPPLAGAPAGYSPGGVPSAYPELHAALDRLYAQRPAGFGCQESRHSYPPALGSPGALAGAGVGAAGPLERRGAQPGRHSVTGYGDCAVGARYQDELTALLRLTVGTGGREAGARGEPSGIEPSGLEEPPGPFVPEAARARMREPEAREDYFGTCIKCNKGIYGQSNACQALDSLYHTQCFVCCSCGRTLRCKAFYSVNGSVYCEEDYLFSGFQEAAEKCCVCGHLILEKILQAMGKSYHPGCFRCIVCNKCLDGIPFTVDFSNQVYCVTDYHKNYAPKCAACGQPILPSEGCEDIVRVISMDRDYHFECYHCEDCRMQLSDEEGCCCFPLDGHLLCHGCHMQRLNARQPPANYI

SEQ ID NO: 1675 - protein, 2627 aa, Homo sapiens
MEKLHGHVSAHPDILSLENRCLAMLPDLQPLEKLHQHVSTHSDILSLKNQCLATLPDLKTMEKPHGYVSAHPDILSLENQCLATLSDLKTMEKPHGHVSAHPDILSLENRCLATLSSLKSTVSASPLFQSLQISHMTQADLYRVNNSNCLLSEPPSWRAQHFSKGLDLSTCPIALKSISATETAQEATLGRWFDSEEKKGAETQMPSYSLSLGEEEEVEDLAVKLTSGDSESHPEPTDHVLQEKKMALLSLLCSTLVSEVNMNNTSDPTLAAIFEICRELALLEPEFILKASLYARQQLNVRNVANNILAIAAFLPACRPHLRRYFCAIVQLPSDWIQVAELYQSLAEGDKNKLVPLPACLRTAMTDKFAQFDEYQLAKYNPRKHRAKRHPRRPPRSPGMEPPFSHRCFPRYIGFLREEQRKFEKAGDTVSEKKNPPRFTLKKLVQRLHIHKPAQHVQALLGYRYPSNLQLFSRSRLPGPWDSSRAGKRMKLSRPETWERELSLRGNKASVWEELIENGKLPFMAMLRNLCNLLRVGISSRHHELILQRLQHAKSVIHSRQFPFRFLNAHDAIDALEAQLRNQALPFPSNITLMRRILTRNEKNRPRRRFLCHLSRQQLRMAMRIPVLYEQLKREKLRVHKARQWKYDGEMLNRYRQALETAVNLSVKHSLPLLPGRTVLVYLTDANADRLCPKSNPQGPPLNYALLLIGMMITRAEQVDVVLCGGDTLKTAVLKAEEGILKTAIKLQAQVQEFDENDGWSLNTFGKYLLSLAGQRVPVDRVILLGQSMDDGMINVAKQLYWQRVNSKCLFVGILLRRVQYLSTDLNPNDVTLSGCTDAILKFIAEHGASHLLEHVGQMDKIFKIPPPPGKTGVQSLRPLEEDTPSPLAPVSQQGWRSIRLFISSTFRDMHGERDLLLRSVLPALQARAAPHRISLHGIDLRWGVTEEETRRNRQLEVCLGEVENAQLFVGILGSRYGYIPPSYNLPDHPHFHWAQQYPSGRSVTEMEVMQFLNRNQRLQPSAQALIYFRDSSFLSSVPDAWKSDFVSESEEAARRISELKSYLSRQKGITCRRYPCEWGGVAAGRPYVGGLEEFGQLVLQDVWNMIQKLYLQPGALLEQPVSIPDDDLVQATFQQLQKPPSPARPRLLQDTVQRLMLPHGRLSLVTGQSGQGKTAFLASLVSALQAPDGAKVASLVFFHFSGARPDQGLALTLLRRLCTYLRGQLKEPGALPSTYRSLVWELQQRLLPKSAESLHPGQTQVLIIDGADRLVDQNGQLISDWIPKKLPRCVHLVLSVSSDAGLGETLEQSQGAHVLALGPLEASARARLVREELALYGKRLEESPFNNQMRLLLVKRESGRPLYLRLVTDHLRLFTLYEQVSERLRTLPATVPLLLQHILSTLEKEHGPDVLPQALTALEVTRSGLTVDQLHGVLSVWRTLPKGTKSWEEAVAAGNSGDPYPMGPFACLVQSLRSLLGEGPLERPGARLCLPDGPLRTAAKRCYGKRPGLEDTAHILIAAQLWKTCDADASGTFRSCPPEALGDLPYHLLQSGNRGLLSKFLTNLHVVAAHLELGLVSRLLEAHALYASSVPKEEQKLPEADVAVFRTFLRQQASILSQYPRLLPQQAANQPLDSPLCHQASLLSRRWHLQHTLRWLNKPRTMKNQQSSSLSLAVSSSPTAVAFSTNGQRAAVGTANGTVYLLDLRTWQEEKSVVSGCDGISACLFLSDDTLFLTAFDGLLELWDLQHGCRVLQTKAHQYQITGCCLSPDCRLLATVCLGGCLKLWDTVRGQLAFQHTYPKSLNCVAFHPEGQVIATGSWAGSISFFQVDGLKVTKDLGAPGASIRTLAFNVPGGVVAVGRLDSMVELWAWREGARLAAFPAHHGFVAAALFLHAGCQLLTAGEDGKVQVWSGSLGRPRGHLGSLSLSPALSVALSPDGDRVAVGYRADGIRIYKISSGSQGAQGQALDVAVSALAWLSPKVLVSGAEDGSLQGWALKECSLQSLWLLSRFQKPVLGLATSQELLASASEDFTVQLWPRQLLTRPHKAEDFPCGTELRGHEGPVSCCSFSTDGGSLATGGRDRSLLCWDVRTPKTPVLIHSFPACHRDWVTGCAWTKDNLLISCSSDGSVGLWDPESGQRLGQFLGHQSAVSAVAAVEEHVVSVSRDGTLKVWDHQGVELTSIPAHSGPISHCAAAMEPRAAGQPGSELLVVTVGLDGATRLWHPLLVCQTHTLLGHSGPVRAAAVSETSGLMLTASEDGSVRLWQVPKEADDTCIPRSSAAVTAVAWAPDGSMAVSGNQAGELILWQEAKAVATAQAPGHIGALIWSSAHTFFVLSADEKISEWQVKLRKGSAPGNLSLHLNRILQEDLGVLTSLDWAPDGHFLILAKADLKLLCMKPGDAPSEIWSSYTENPMILSTHKEYGIFVLQPKDPGVLSFLRQKESGEFEERLNFDINLENPSRTLISITQAKPESESSFLCASSDGILWNLAKCSPEGEWTTGNMWQKKANTPETQTPGTDPSTCRESDASMDSDASMDSEPTPHLKTRQRRKIHSGSVTALHVLPELLVTASKDRDVKLWERPSMQLLGLFRCEGSVSCLEPWLGANSTLQLAVGDVQGNVYFLNWE

SEQ ID NO: 1676 - protein, 801 aa, Homo sapiens
MWTSGRMSNAKNWLGLGMSLYFWGLMDLTTTVLSDTPTPQGELEALLSDKPQSHQRTKRSWVWNQFFVLEEYTGTDPLYVGKLHSDMDRGDGSIKYILSGEGAGIVFTIDDTTGDIHAIQRLDREERAQYTLRAQALDRRTGRPMEPESEFIIKIQDINDNEPKFLDGPYVATVPEMSPVGTSVIQVTATDADDPTYGNSARVVYSILQGQPYFSVDSKTGVIRTALMNMDREAKEYYEVIIQAKDMGGQLGGLAGTTTVNITLSDVNDNPPRFPQKHYQMSVLESAPISSTVGRVFAKDLDEGINAEMKYTIVDGDGADAFDISTDPNFQVGIITVKKPLSFESKKSYTLKVEGANPHLEMRFLNLGPFQDTTTVHISVEDVDEPPVFEPGFYFVEVPEDVAIGTTIQIISAKDPDVTNNSIRYSIDRSSDPGRFFYVDITTGALMTARPLDREEFSWHNITVLAMEMNNPSQVGSVPVTIKVLDVNDNAPEFPRFYEAFVCENAKAGQLIQTVSAVDQDDPRNGQHFYYSLAPEAANNPNFTIRDNQDNTARILTRRSGFRQQEQSVFHLPILIADSGQPVLSSTGTLTIQVCSCDDDGHVMSCSPEAYMLPVSLSRGALIAILACIFVLLVLVLLILSMRRHRKQPYIIDDEENIHENIVRYDDEGGGEEDTEAFDIAAMWNPREAQAGAAPKTRQDMLPEIESLSRYVPQTCAVNSTVHSYVLAKLYEADMDLWAPPFDSLQTYMFEGDGSVAGSLSSLQSATSDSEQSFDFLTDWGPRFRKLAELYGASEGPAPLW

SEQ ID NO: 1677 - protein, 1717 aa, Homo sapiens
MEPAAAATVQRLPELGREDRASAPAAAAAAAAAAAAAAAALAAAAGGGRSPEPALTPAAPSGGNGSGSGAREEAPGEAPPGPLPGRAGGAGRRRRRGAPQPIAGGAAPVPGAGGGANSLLLRRGRLKRNLSAAAAAASSSSSSSAAAASHSPGAAGLPASCSASASLCTRSLDRKTLLLKHRQTLQLQPSDRDWVRHQLQRGCVHVFDRHMASTYLRPVLCTLDTTAGEVAARLLQLGHKGGGVVKVLGQGPGAAAAREPAEPPPEAGPRLAPPEPRDSEVPPARSAPGAFGGPPRAPPADLPLPVGGPGGWSRRASPAPSDSSPGEPFVGGPVSSPRAPRPVVSDTESFSLSPSAESVSDRLDPYSSGGGSSSSSEELEADAASAPTGVPGQPRRPGHPAQPLPLPQTASSPQPQQKAPRAIDSPGGAVREGSCEEKAAAAVAPGGLQSTPGRSGVTAEKAPPPPPPPTLYVQLHGETTRRLEAEEKPLQIQNDYLFQLGFGELWRVQEEGMDSEIGCLIRFYAGKPHSTGSSERIQLSGMYNVRKGKMQLPVNRWTRRQVILCGTCLIVSSVKDSLTGKMHVLPLIGGKVEEVKKHQHCLAFSSSGPQSQTYYICFDTFTEYLRWLRQVSKVASQRISSVDLSCCSLEHLPANLFYSQDLTHLNLKQNFLRQNPSLPAARGLNELQRFTKLKSLNLSNNHLGDFPLAVCSIPTLAELNVSCNALRSVPAAVGVMHNLQTFLLDGNFLQSLPAELENMKQLSYLGLSFNEFTDIPEVLEKLTAVDKLCMSGNCVETLRLQALRKMPHIKHVDLRLNVIRKLIADEVDFLQHVTQLDLRDNKLGDLDAMIFNNIEVLHCERNQLVTLDICGYFLKALYASSNELVQLDVYPVPNYLSYMDVSRNRLENVPEWVCESRKLEVLDIGHNQICELPARLFCNSSLRKLLAGHNQLARLPERLERTSVEVLDVQHNQLLELPPNLLMKADSLRFLNASANKLESLPPATLSEETNSILQELYLTNNSLTDKCVPLLTGHPHLKILHMAYNRLQSFPASKMAKLEELEEIDLSGNKLKAIPTTIMNCRRMHTVIAHSNCIEVFPEVMQLPEIKCVDLSCNELSEVTLPENLPPKLQELDLTGNPRLVLDHKTLELLNNIRCFKIDQPSTGDASGAPAVWSHGYTEASGVKNKLCVAALSVNNFCDNREALYGVFDGDRNVEVPYLLQCTMSDILAEELQKTKNEEEYMVNTFIVMQRKLGTAGQKLGGAAVLCHIKHDPVDPGGSFTLTSANVGKCQTVLCRNGKPLPLSRSYIMSCEEELKRIKQHKAIITEDGKVNGVTESTRILGYTFLHPSVVPRPHVQSVLLTPQDEFFILGSKGLWDSLSVEEAVEAVRNVPDALAAAKKLCTLAQSYGCHDSISAVVVQLSVTEDSFCCCELSAGGAVPPPSPGIFPPSVNMVIKDRPSDGLGVPSSSSGMASEISSELSTSEMSSEVGSTASDEPPPGALSENSPAYPSEQRCMLHPICLSNSFQRQLSSATFSSAFSDNGLDSDDEEPIEGVFTNGSRVEVEVDIHCSRAKEKEKQQHLLQVPAEASDEGIVISANEDEPGLPRKADFSAVGTIGRRRANGSVAPQERSHNVIEVATDAPLRKPGGYFAAPAQPDPDDQFIIPPELEEEVKEIMKHHQEQQQQQQPPPPPQLQPQLPRHYQLDQLPDYYDTPL

SEQ ID NO: 1678 - protein, 683 aa, Homo sapiens
MERAAPSRRVPLPLLLLGGLALLAAGVDADVLLEACCADGHRMATHQKDCSLPYATESKECRMVQEQCCHSQLEELHCATGISLANEQDRCATPHGDNASLEATFVKRCCHCCLLGRAAQAQGQSCEYSLMVGYQCGQVFQACCVKSQETGDLDVGGLQETDKIIEVEEEQEDPYLNDRCRGGGPCKQQCRDTGDEVVCSCFVGYQLLSDGVSCEDVNECITGSHSCRLGESCINTVGSFRCQRDSSCGTGYELTEDNSCKDIDECESGIHNCLPDFICQNTLGSFRCRPKLQCKSGFIQDALGNCIDINECLSISAPCPIGHTCINTEGSYTCQKNVPNCGRGYHLNEEGTRCVDVDECAPPAEPCGKGHRCVNSPGSFRCECKTGYYFDGISRMCVDVNECQRYPGRLCGHKCENTLGSYLCSCSVGFRLSVDGRSCEDINECSSSPCSQECANVYGSYQCYCRRGYQLSDVDGVTCEDIDECALPTGGHICSYRCINIPGSFQCSCPSSGYRLAPNGRNCQDIDECVTGIHNCSINETCFNIQGGFRCLAFECPENYRRSAATRCERLPCHENRECSKLPLRITYYHLSFPTNIQAPAVVFRMGPSSAVPGDSMQLAITGGNEEGFFTTRKVSPHSGVVALTKPVPEPRDLLLTVKMDLSRHGTVSSFVAKLFIFVSAEL

SEQ ID NO: 1679 - protein, 1501 aa, Homo sapiens
MCKMAIIPDWLRSHPHTRKFTHSRPHSSPCRVYSRNGSPNKFRSSSTTAVANPTLSSLDVKRILFQKITDRGDELQKAFQLLDTGQNLTVSKSELRRIITDFLMPLTREQFQDVLAQIPLSTSGTVPYLAFLSRFGGIDLYINGIKRGGGNEMNCCRTLRELEIQVGEKVFKNIKTVMKAFELIDVNKTGLVRPQELRRVLETFCMKLRDEEYEKFSKHYNIHKDTAVDYNVFLKNLSINNDLNLRYCMGNQEVSLENQQAKNSKKERLLGSASSEDIWRNYSLDEIERNFCLQLSKSYEKVEKALSAGDPCKGGYVSFNYLKIVLDTFVYQIPRRIFIQLMKRFGLKATTKINWKQFLTSFHEPQGLQVSSKGPLTKRNSINSRNESHKENIITKLFRHTEDHSASLKKALLIINTKPDGPITREEFRYILNCMAVKLSDSEFKELMQMLDPGDTGVVNTSMFIDLIEENCRMRKTSPCTDAKTPFLLAWDSVEEIVHDTITRNLQAFYNMLRSYDLGDTGRIGRNNFKKIMHVFCPFLTNAHFIKLCSKIQDIGSGRILYKKLLACIGIDGPPTVSPVLVPKDQLLSEHLQKDEQQQPDLSERTKLTEDKTTLTKKMTTEEVIEKFKKCIQQQDPAFKKRFLDFSKEPNGKINVHDFKKVLEDTGMPMDDDQYALLTTKIGFEKEGMSYLDFAAGFEDPPMRGPETTPPQPPTPSKSYVNSHFITAEECLKLFPRRLKESFRDPYSAFFKTDADRDGIINMHDLHRLLLHLLLNLKDDEFERFLGLLGLRLSVTLNFREFQNLCEKRPWRTDEAPQRLIRPKQKVADSELACEQAHQYLVTKAKNRWSDLSKNFLETDNEGNGILRRRDIKNALYGFDIPLTPREFEKLWARYDTEGKGHITYQEFLQKLGINYSPAVHRPCAEDYFNFMGHFTKPQQLQEEMKELQQSTEKAVAARDKLMDRHQDISKAFTKTDQSKTNYISICKMQEVLEECGCSLTEGELTHLLNSWGVSRHDNAINYLDFLRAVENSKSTGAQPKEKEESMPINFATLNPQEAVRKIQEVVESSQLALSTAFSALDKEDTGFVKATEFGQVLKDFCYKLTDNQYHYFLRKLRIHLTPYINWKYFLQNFSCFLEETADEWAEKMPKGPPPTSPKATADRDILARLHKAVTSHYHAITQEFENFDTMKTNTISREEFRAICNRRVQILTDEQFDRLWNEMPVNAKGRLKYPDFLSRFSSETAATPMATGDSAVAQRGSSVPDVSEGTRSALSLPTQELRPGSKSQSHPCTPASTTVIPGTPPLQNCDPIESRLRKRIQGCWRQLLKECKEKDVARQGDINASDFLALVEKFNLDISKEECQQLIIKYDLKSNGKFAYCDFIQSCVLLLKAKESSLMHRMKIQNAHKMKEAGAETPSFYSALLRIQPKIVHCWRPMRRTFKSYDEAGTGLLSVADFRTVLRQYSINLSEEEFFHILEYYDKTLSSKISYNDFLRAFLQ

SEQ ID NO: 1680 - protein, 643 aa, Homo sapiens
MRTLRRLKFMSSPSLSDLGKREPAAAADERGTQQRRACANATWNSIHNGVIAVFQRKGLPDQELFSLNEGVRQLLKTELGSFFTEYLQNQLLTKGMVILRDKIRFYEGQKLLDSLAETWDFFFSDVLPMLQAIFYPVQGKEPSVRQLALLHFRNAITLSVKLEDALARAHARVPPAIVQMLLVLQGVHESRGVTEDYLRLETLVQKVVSPYLGTYGLHSSEGPFTHSCILELQRDKAAAAAVLGAVRKRPSVVPMAGQDPALSTSHPFYDVARHGILQVAGDDRFGRRVVTFSCCRMPPSHELDHQRLLEYKKNLKALYVVHPTSFIKVLWNILKPLISHKFGKKVIYFNYLSELHEHLKYDQLVIPPEVLRYDEKLQSLHEGRTPPPTKTPPPRPPLPTQQFGVSLQYLKDKNQGELIPPVLRFTVTYLREKGLRTEGLFRRSASVQTVREIQRLYNQGKPVNFDDYGDIHIPAVILKTFLRELPQPLLTFQAYEQILGITCVESSLRVTGCRQILRSLPEHNYVVLRYLMGFLHAVSRESIFNKMNSSNLACVFGLNLIWPSQGVSSLSALVPLNMFTELLIEYYEKIFSTPEAPGEHGLAPWEQGSRAAPLQEAVPRTQATGLTKPTLPPSPLMAARRRL

SEQ ID NO: 1681 - protein, 3014 aa, Homo sapiens
MAPPPPPVLPVLLLLAAAAALPAMGLRAAAWEPRVPGGTRAFALRPGCTYAVGAACTPRAPRELLDVGRDGRLAGRRRVSGAGRPLPLQVRLVARSAPTALSRRLRARTHLPGCGARARLCGTGARLCGALCFPVPGGCAAAQHSALAAPTTLPACRCPPRPRPRCPGRPICLPPGGSVRLRLLCALRRAAGAVRVGLALEAATAGTPSASPSPSPPLPPNLPEARAGPARRARRGTSGRGSLKFPMPNYQVALFENEPAGTLILQLHAHYTIEGEEERVSYYMEGLFDERSRGYFRIDSATGAVSTDSVLDRETKETHVLRVKAVDYSTPPRSATTYITVLVKDTNDHSPVFEQSEYRERVRENLEVGYEVLTIRASDRDSPINANLRYRVLGGAWDVFQLNESSGVVSTRAVLDREEAAEYQLLVEANDQGRNPGPLSATATVYIEVEDENDNYPQFSEQNYVVQVPEDVGLNTAVLRVQATDRDQGQNAAIHYSILSGNVAGQFYLHSLSGILDVINPLDFEDVQKYSLSIKAQDGGRPPLINSSGVVSVQVLDVNDNEPIFVSSPFQATVLENVPLGYPVVHIQAVDADSGENARLHYRLVDTASTFLGGGSAGPKNPAPTPDFPFQIHNSSGWITVCAELDREEVEHYSFGVEAVDHGSPPMSSSTSVSITVLDVNDNDPVFTQPTYELRLNEDAAVGSSVLTLQARDRDANSVITYQLTGGNTRNRFALSSQRGGGLITLALPLDYKQEQQYVLAVTASDGTRSHTAHVLINVTDANTHRPVFQSSHYTVSVSEDRPVGTSIATLSANDEDTGENARITYVIQDPVPQFRIDPDSGTMYTMMELDYENQVAYTLTIMAQDNGIPQKSDTTTLEILILDANDNAPQFLWDFYQGSIFEDAPPSTSILQVSATDRDSGPNGRLLYTFQGGDDGDGDFYIEPTSGVIRTQRRLDRENVAVYNLWALAVDRGSPTPLSASVEIQVTILDINDNAPMFEKDELELFVEENNPVGSVVAKIRANDPDEGPNAQIMYQIVEGDMRHFFQLDLLNGDLRAMVELDFEVRREYVLVVQATSAPLVSRATVHILLVDQNDNPPVLPDFQILFNNYVTNKSNSFPTGVIGCIPAHDPDVSDSLNYTFVQGNELRLLLLDPATGELQLSRDLDNNRPLEALMEVSVSDGIHSVTAFCTLRVTIITDDMLTNSITVRLENMSQEKFLSPLLALFVEGVAAVLSTTKDDVFVFNVQNDTDVSSNILNVTFSALLPGGVRGQFFPSEDLQEQIYLNRTLLTTISTQRVLPFDDNICLREPCENYMKCVSVLRFDSSAPFLSSTTVLFRPIHPINGLRCRCPPGFTGDYCETEIDLCYSDPCGANGRCRSREGGYTCECFEDFTGEHCEVDARSGRCANGVCKNGGTCVNLLIGGFHCVCPPGEYERPYCEVTTRSFPPQSFVTFRGLRQRFHFTISLTFATQERNGLLLYNGRFNEKHDFIALEIVDEQVQLTFSAGETTTTVAPKVPSGVSDGRWHSVQVQYYNKPNIGHLGLPHGPSGEKMAVVTVDDCDTTMAVRFGKDIGNYSCAAQGTQTGSKKSLDLTGPLLLGGVPNLPEDFPVHNRQFVGCMRNLSVDGKNVDMAGFIANNGTREGCAARRNFCDGRRCQNGGTCVNRWNMYLCECPLRFGGKNCEQAMPHPQLFSGESVVSWSDLNIIISVPWYLGLMFRTRKEDSVLMEATSGGPTSFRLQILNNYLQFEVSHGPSDVESVMLSGLRVTDGEWHHLLIELKNVKEDSEMKHLVTMTLDYGMDQNKADIGGMLPGLTVRSVVVGGASEDKVSVRRGFRGCMQGVRMGGTPTNVATLNMNNALKVRVKDGCDVDDPCTSSPCPPNSRCHDAWEDYSCVCDKGYLGINCVDACHLNPCENMGACVRSPGSPQGYVCECGPSHYGPYCENKLDLPCPRGWWGNPVCGPCHCAVSKGFDPDCNKTNGQCQCKENYYKLLAQDTCLPCDCFPHGSHSRTCDMATGQCACKPGVIGRQCNRCDNPFAEVTTLGCEVIYNGCPKAFEAGIWWPQTKFGQPAAVPCPKGSVGNAVRHCSGEKGWLPPELFNCTTISFVDLRAMNEKLSRNETQVDGARALQLVRALRSATQHTGTLFGNDVRTAYQLLGHVLQHESWQQGFDLAATQDADFHEDVIHSGSALLAPATRAAWEQIQRSEGGTAQLLRRLEGYFSNVARNVRRTYLRPFVIVTANMILAVDIFDKFNFTGARVPRFDTIHEEFPRELESSVSFPADFFRPPEEKEGPLLRPAGRRTTPQTTRPGPGTEREAPISRRRRHPDDAGQFAVALVIIYRTLGQLLPERYDPDRRSLRLPHRPIINTPMVSTLVYSEGAPLPRPLERPVLVEFALLEVEERTKPVCVFWNHSLAVGGTGGWSARGCELLSRNRTHVACQCSHTASFAVLMDISRRENGEVLPLKIVTYAAVSLSLAALLVAFVLLSLVRMLRSNLHSIHKHLAVALFLSQLVFVIGINQTENPFLCTVVAILLHYIYMSTFAWTLVESLHVYRMLTEVRNIDTGPMRFYYVVGWGIPAIVTGLAVGLDPQGYGNPDFCWLSLQDTLIWSFAGPIGAVIIINTVTSVLSAKVSCQRKHHYYGKKGIVSLLRTAFLLLLLISATWLLGLLAVNRDALSFHYLFAIFSGLQGPFVLLFHCVLNQEVRKHLKGVLGGRKLHLEDSATTRATLLTRSLNCNTTFGDGPDMLRTDLGESTASLDSIVRDEGIQKLGVSSGLVRGSHGEPDASLMPRSCKDPPGHDSDSDSELSLDEQSSSYASSHSSDSEDDGVGAEEKWDPARGAVHSTPKGDAVANHVPAGWPDQSLAESDSEDPSGKPRLKVETKVSVELHREEQGSHRGEYPPDQESGGAARLASSQPPEQRKGILKNKVTYPPPLTLTEQTLKGRLREKLADCEQSPTSSRTSSLGSGGPDCAITVKSPGREPGRDHLNGVAMNVRTGSAQADGSDSEKP

SEQ ID NO: 1682 - protein, 461 aa, Homo sapiens
MYNTVWSMDRDDADWREVMMPYSTELIFYIEMDPPALPPKPPKPMTSAVPNGMKDSSVSLQDAEWYWGDISREEVNDKLRDMPDGTFLVRDASTKMQGDYTLTLRKGGNNKLIKIYHRDGKYGFSDPLTFNSVVELINHYHHESLAQYNPKLDVKLMYPVSRYQQDQLVKEDNIDAVGKKLQEYHSQYQEKSKEYDRLYEEYTRTSQEIQMKRTAIEAFNETIKIFEEQCHTQEQHSKEYIERFRREGNEKEIERIMMNYDKLKSRLGEIHDSKMRLEQDLKNQALDNREIDKKMNSIKPDLIQLRKIRDQHLVWLNHKGVRQKRLNVWLGIKNEDADENYFINEEDENLPHYDEKTWFVEDINRVQAEDLLYGKPDGAFLIRESSKKGCYACSVVADGEVKHCVIYSTARGYGFAEPYNLYSSLKELVLHYQQTSLVQHNDSLNVRLAYPVHAQMPSLCR

SEQ ID NO: 1683 - protein, 745 aa, Homo sapiens
MLPFAPQDEPWDREMEVFSGGGASSGEVNGLKMVDEPMEEGEADSCHDEGVVKEIPITHHVKEGYEKADPAQFELLKVLGQGSFGKVFLVRKKTGPDAGQLYAMKVLKKASLKVRDRVRTKMERDILVEVNHPFIVKLHYAFQTEGKLYLILDFLRGGDVFTRLSKEVLFTEEDVKFYLAELALALDHLHQLGIVYRDLKPENILLDEIGHIKLTDFGLSKESVDQEKKAYSFCGTVEYMAPEVVNRRGHSQSADWWSYGVLMFEMLTGTLPFQGKDRNETMNMILKAKLGMPQFLSAEAQSLLRMLFKRNPANRLGSEGVEEIKRHLFFANIDWDKLYKREVQPPFKPASGKPDDTFCFDPEFTAKTPKDSPGLPASANAHQLFKGFSFVATSIAEEYKITPITSANVLPIVQINGNAAQFGEVYELKEDIGVGSYSVCKRCIHATTNMEFAVKIIDKSKRDPSEEIEILMRYGQHPNIITLKDVFDDGRYVYLVTDLMKGGELLDRILKQKCFSEREASDILYVISKTVDYLHCQGVVHRDLKPSNILYMDESASADSIRICDFGFAKQLRGENGLLLTPCYTANFVAPEVLMQQGYDAACDIWSLGVLFYTMLAGYTPFANGPNDTPEEILLRIGNGKFSLSGGNWDNISDGAKDLLSHMLHMDPHQRYTAEQILKHSWITHRDQLPNDQPKRNDVSHVVKGAMVATYSALTHKTFQPVLEPVAASSLAQRRSMKKRTSTGL

SEQ ID NO: 1684 - protein, 589 aa, Homo sapiens
MSSSYWSETSSSSCGTQQLPEVLQCQPQHYHCYHQSSQAQQPPEKNVVYERVRTYSGPMNKVVQALDPFNSREVLSPLKTTSSYQNLVWSDHSQELHSPTLKISTCAPSTLHITQNTEQELHSPTVKLTTYPQTTIRKYVVQNPEQEPLSQFLRGSHFFPGNNVIYEKTIRKVEKLNTDQGCHPQAQCHHHIIQQPQVIHSAHWQQPDSSQQIQAITGNNPISTHIGNELCHSGSSQICEQVIIQDDGPEKLDPRYFGELLADLSRKNTDLYHCLLEHLQRIGGSKQDFESTDESEDIESLIPKGLSEFTKQQIRYILQMRGMSDKSLRLVLSTFSNIREELGHLQNDMTSLENDKMRLEKDLSFKDTQLKEYEELLASVRANNHQQQQGLQDSSSKCQALEENNLSLRHTLSDMEYRLKELEYCKRNLEQENQNLRMQVSETCTGPMLQAKMDEIGNHYTEMVKNLRMEKDREICRLRSQLNQYHKDVSKREGSCSDFQFKLHELTSLLEEKDSLIKRQSEELSKLRQEIYSSHNQPSTGGRTTITTKKYRTQYPILGLLYDDYEYIPPGSETQTIVIEKTEDKYTCP

SEQ ID NO: 1685 - protein, 556 aa, Homo sapiens
MAVAAAAAAGPVFWRRLLGLLPGRPGLAALLGRLSDRLGRNRDRQRRRSPWLLLAPLLSPAVPQVTSPPCCLCPEGVHRFQWIRNLVPEFGVSSSHVRVLSSPAEFFELMKGQIRVAKRRVVMASLYLGTGPLEQELVDCLESTLEKSLQAKFPSNLKVSILLDFTRGSRGRKNSRTMLLPLLRRFPEQVRVSLFHTPHLRGLLRLLIPERFNETIGLQHIKVYLFDNSVILSGANLSDSYFTNRQDRYVFLQDCAEIADFFTELVDAVGDVSLQLQGDDTVQVVDGMVHPYKGDRAEYCKAANKRVMDVINSARTRQQMLHAQTFHSNSLLTQEDAAAAGDRRPAPDTWIYPLIQMKPFEIQIDEIVTETLLTEAERGAKVYLTTGYFNLTQAYMDLVLGTRAEYQILLASPEVNGFFGAKGVAGAIPAAYVHIERQFFSEVCSLGQQERVQLQEYWRRGWTFHAKGLWLYLAGSSLPCLTLIGSPNFGYRSVHRDLEAQIAIVTENQALQQQLHQEQEQLYLRSGVVSSATFEQPSRQVKLWVKMVTPLIKNFF

SEQ ID NO: 1686 - protein, 1663 aa, Homo sapiens
MKDAAEELSFARVLLQRVDELEKLFKDREQFLELVSRKLSLVPGAEEVTMVTWEELEQAITDGWRASQAGSETLMGFSKHGGFTSLTSPEGTLSGDSTKQPSIEQALDSASGLGPDRTASGSGGTAHPSDGVSSREQSKVPSGTGRQQQPRARDEAGVPRLHQSSTFQFKSDSDRHRSREKLTSTQPRRNARPGPVQQDLPLARDQPSSVPASQSQVHLRPDRRGLEPTGMNQPGLVPASTYPHGVVPLSMGQLGVPPPEMDDRELIPFVVDEQRMLPPSVPGRDQQGLELPSTDQHGLVSVSAYQHGMTFPGTDQRSMEPLGMDQRGCVISGMGQQGLVPPGIDQQGLTLPVVDQHGLVLPFTDQHGLVSPGLMPISADQQGFVQPSLEATGFIQPGTEQHDLIQSGRFQRALVQRGAYQPGLVQPGADQRGLVRPGMDQSGLAQPGADQRGLVWPGMDQSGLAQPGRDQHGLIQPGTGQHDLVQSGTGQGVLVQPGVDQPGMVQPGRFQRALVQPGAYQPGLVQPGADQIDVVQPGADQHGLVQSGADQSDLAQPGAVQHGLVQPGVDQRGLAQPRADHQRGLVPPGADQRGLVQPGADQHGLVQPGVDQHGLAQPGEVQRSLVQPGIVQRGLVQPGAVQRGLVQPGAVQRGLVQPGVDQRGLVQPGAVQRGLVQPGAVQHGLVQPGADQRGLVQPGVDQRGLVQPGVDQRGLVQPGMDQRGLIQPGADQPGLVQPGAGQLGMVQPGIGQQGMVQPQADPHGLVQPGAYPLGLVQPGAYLHDLSQSGTYPRGLVQPGMDQYGLRQPGAYQPGLIAPGTKLRGSSTFQADSTGFISVRPYQHGMVPPGREQYGQVSPLLASQGLASPGIDRRSLVPPETYQQGLMHPGTDQHSPIPLSTGLGSTHPDQQHVASPGPGEHDQVYPDAAQHGHAFSLFDSHDSMYPGYRGPGYLSADQHGQEGLDPNRTRASDRHGIPAQKAPGQDVTLFRSPDSVDRVLSEGSEVSSEVLSERRNSLRRMSSSFPTAVETFHLMGELSSLYVGLKESMKDLDEEQAGQTDLEKIQFLLAQMVKRTIPPELQEQLKTVKTLAKEVWQEKAKVERLQRILEGEGNQEAGKELKAGELRLQLGVLRVTVADIEKELAELRESQDRGKAAMENSVSEASLYLQDQLDKLRMIIESMLTSSSTLLSMSMAPHKAHTLAPGQIDPEATCPACSLDVSHQVSTLVRRYEQLQDMVNSLAVSRPSKKAKLQRQDEELLGRVQSAILQVQGDCEKLNITTSNLIEDHRQKQKDIAMLYQGLEKLEKEKANREHLEMEIDVKADKSALATKVSRVQFDATTEQLNHMMQELVAKMSGQEQDWQKMLDRLLTEMDNKLDRLELDPVKQLLEDRWKSLRQQLRERPPLYQADEAAAMRRQLLAHFHCLSCDRPLETPVTGHAIPVTPAGPGLPGHHSIRPYTVFELEQVRQHSRNLKLGSAFPRGDLAQMEQSVGRLRSMHSKMLMNIEKVQIHFGGSTKASSQIIRELLHAQCLGSPCYKRVTDMADYTYSTVPRRCGGSHTLTYPYHRSRPQHLPRGLYPTEEIQIAMKHDEVDILGLDGHIYKGRMDTRLPGILRKDSSGTSKRKSQQPRPHVHRPPSLSSNGQLPSRPQSAQISAGNTSER

SEQ ID NO: 1687 - protein, 1211 aa, Homo sapiens
MLSLAAKLVAFFWRTADTPREEAGQLEPELAEGDTKLKTVRGVVTRYCSDYGMIDDMIYFSSDAVTSRVLLNVGQEVIAVVEENKVSNGLKAIRVEAVSDKWEDDSRNHGSPSDCGPRVLIGCVTSLVEGAGCISQTTYFSLESVCEGFEPCKGDWVEAEYRIRPGTWSSEATSVKPLRYKRVDKVCISSLCGRNGVLEESIFFTLDSLKLPDGYTPRRGDVVNAVVVESSQSCYVWRALCMTLVKRRDAAPVHEATHFYGTILLKNKGDIEVTQVTHFGTLKEGRSKTMVIWIENKGDIPQNLVSCKLAGWDKSKQFRFQMLDKDQMCPVVSFVSVPEKENSSDENINSLNSHTKNKTSQMSESSLVNNRGISPGDCTCKGENGEKDNILSRKQMTEPEPGGLVPPGGKTFIVVICDGKNPGRCKELLLLCFSDFLIGRYLEVNVISGEESLIAAREPFSWKKLKSSQALTSAKTTVVVTAQKRNSRRQLPSFLPQYPIPDRLRKCVEQKIDILTFQPLLAELLNMSNYKEKFSTLLWLEEIYAEMELKEYNMSGIILRRNGDLLVLEVPGLAEGRPSLYAGDKLILKTQEYNGHAIEYISYVTEIHEEDVTLKINPEFEQAYNFEPMDVEFTYNRTTSRRCHFALEHVIHLGVKVLFPEEIILQSPQVTGNWNHAQDTKSSGQSTSKKNRKTMTDQAEHGTEERRVGDKDLPVLAPFTAEMSDWVDEIQTPKARKMEFFNPVLNENQKLAVKRILSGDCRPLPYILFGPPGTGKTVTIIEAVLQVHFALPDSRILVCAPSNSAADLVCLRLHESKVLQPATMVRVNATCRFEEIVIDAVKPYCRDGEDIWKASRFRIIITTCSSSGLFYQIGVRVGHFTHVFVDEAGQASEPECLIPLGLMSDISGQIVLAGDPMQLGPVIKSRLAMAYGLNVSFLERLMSRPAYQRDENAFGACGAHNPLLVTKLVKNYRSHEALLMLPSRLFYHRELEVCADPTVVTSLLGWEKLPKKGFPLIFHGVRGSEAREGKSPSWFNPAEAVQVLRYCCLLAHSISSQVSASDIGVITPYRKQVEKIRILLRNVDLMDIKVGSVEEFQGQEYLVIIISTVRSNEDRFEDDRYFLGFLSNSKRFNVAITRPKALLIVLGNPHVLVRDPCFGALLEYSITNGVYMGCDLPPALQSLQNCGEGVADPSYPVVPESTGPEKHQEPS

SEQ ID NO: 1688 - protein, 1118 aa, Homo sapiens
MSVEAYGPSSQTLTFLDTEEAELLGADTQGSEFEFTDFTLPSQTQTPPGGPGGPGGGGAGGPGGAGAGAAAGQLDAQVGPEGILQNGAVDDSVAKTSQLLAELNFEEDEEDTYYTKDLPIHACSYCGIHDPACVVYCNTSKKWFCNGRGNTSGSHIVNHLVRAKCKEVTLHKDGPLGETVLECYNCGCRNVFLLGFIPAKADSVVVLLCRQPCASQSSLKDINWDSSQWQPLIQDRCFLSWLVKIPSEQEQLRARQITAQQINKLEELWKENPSATLEDLEKPGVDEEPQHVLLRYEDAYQYQNIFGPLVKLEADYDKKLKESQTQDNITVRWDLGLNKKRIAYFTLPKTDSDMRLMQGDEICLRYKGDLAPLWKGIGHVIKVPDNYGDEIAIELRSSVGAPVEVTHNFQVDFVWKSTSFDRMQSALKTFAVDETSVSGYIYHKLLGHEVEDVIIKCQLPKRFTAQGLPDLNHSQVYAVKTVLQRPLSLIQGPPGTGKTVTSATIVYHLARQGNGPVLVCAPSNIAVDQLTEKIHQTGLKVVRLCAKSREAIDSPVSFLALHNQIRNMDSMPELQKLQQLKDETGELSSADEKRYRALKRTAERELLMNADVICCTCVGAGDPRLAKMQFRSILIDESTQATEPECMVPVVLGAKQLILVGDHCQLGPVVMCKKAAKAGLSQSLFERLVVLGIRPIRLQVQYRMHPALSAFPSNIFYEGSLQNGVTAADRVKKGFDFQWPQPDKPMFFYVTQGQEEIASSGTSYLNRTEAANVEKITTKLLKAGAKPDQIGIITPYEGQRSYLVQYMQFSGSLHTKLYQEVEIASVDAFQGREKDFIILSCVRANEHQGIGFLNDPRRLNVALTRARYGVIIVGNPKALSKQPLWNHLLNYYKEQKVLVEGPLNNLRESLMQFSKPRKLVNTINPGARFMTTAMYDAREAIIPGSVYDRSSQGRPSSMYFQTHDQIGMISAGPSHVAAMNIPIPFNLVMPPMPPPGYFGQANGPAAGRGTPKGKTGRGGRQKNRFGLPGPSQTNLPNSQASQDVASQPFSQGALTQGYISMSQPSQMSQPGLSQPELSQDSYLGDEFKSQIDVALSQDSTYQGERAYQHGGVTGLSQY

SEQ ID NO: 1689 - protein, 680 aa, Homo sapiens
MQGPPAPAPVPGPGSPRGSPRGSPGLFRKLLVNQSIRLQRRFTVAHPLCFDLENGLSCGRRALDPQSSPGLGRIMQAPVPHSQRRESFLYRSDSDYELSPKAMSRNSSVASDLHGEDMIVTPFAQVLASLRTVRSNVAALARQQCLGAAKQGPVGNPSSSNQLPPAEDTGQKLALETLDELDWCLDQLETLQTRHSVGEMASNKFKRILNRELTHLSETSRSGNQVSEYISRTFLDQQTEVELPKVTAEEAPQPMSRISGLHGLCHSASLSSATVPRFGVQTDQEEQLAKELEDTNKWGLDVFKVAELSGNRPLTAIIFSIFQERDLLKTFQIPADTLATYLLMLEGHYHANVAYHNSLHAADVAQSTHVLLATPALEAVFTDLEILAALFASAIHDVDHPGVSNQFLINTNSELALMYNDASVLENHHLAVGFKLLQAENCDIFQNLSAKQRLSLRRMVIDMVLATDMSKHMNLLADLKTMVETKKVTSLGVLLLDNYSDRIQVLQNLVHCADLSNPTKPLPLYRQWTDRIMAEFFQQGDRERESGLDISPMCDKHTASVEKSQVGFIDYIAHPLWETWADLVHPDAQDLLDTLEDNREWYQSKIPRSPSDLTNPERDGPDRFQFELTLEEAEEEDEEEEEEGEETALAKEALELPDTELLSPEAGPDPGDLPLDNQRT

SEQ ID NO: 1690 - protein, 621 aa, Homo sapiens
MAALKEDRSYGLSCGRVSDGSKVSVFHVKLTDSALRAFESYRARQDSVSLRPSIRFQGSQGHISIPQPDCPAEARTFSFYLSNIGRDNPQGSFDCIQQYVSSHGEVHLDCLGSIQDKITVCATDDSYQKARQSMAQAEEETRSRSAIVIKAGGRYLGKKVQFRKPAPGATDAVPSRKRATPINLASAIRKSGASAVSGGSGVSQRPFRDRVLHLLALRPYRKAELLLRLQKDGLTQADKDALDGLLQQVANMSAKDGTCTLQDCMYKDVQKDWPGYSEGDQQLLKRVLVRKLCQPQSTGSLLGDPAASSPPGERGRSASPPQKRLQPPDFIDPLANKKPRISHFTQRAQPAVNGKLGVPNGREALLPTPGPPASTDTLSSSTHLPPRLEPPRAHDPLADVSNDLGHSGRDCEHGEAAAPAPTVRLGLPLLTDCAQPSRPHGSPSRSKPKKKSKKHKDKERAAEDKPRAQLPDCAPATHATPGAPADTPGLNGTCSVSSVPTSTSETPDYLLKYAAISSSEQRQSYKNDFNAEYSEYRDLHARIERITRRFTQLDAQLRQLSQGSEEYETTRGQILQEYRKIKKTNTNYSQEKHRCEYLHSKLAHIKRLIAEYDQRQLQAWP

SEQ ID NO: 1691 - protein, 1309 aa, Homo sapiens
MDESSLLRRRGLQKELSLPRRGRGCRSGNRKSLVVGTPSPTLSRPLSPLSVPTAGSSPLDSPRNFSAASALNFPFARRADGRRWSLASLPSSGYGTNTPSSTLSSSSSSRERLHQLPFQPTPDELHFLSKHFRSSENVLDEEGGRSPRLRPRSRSLSPGRATGTFDNEIVMMNHVYRERFPKATAQMEGRLQEFLTAYAPGARLALADGVLGFIHHQIVELARDCLAKSGENLVTSRYFLEMQEKLERLLQDAHERSDSEEVSFIVQLVRKLLIIISRPARLLECLEFDPEEFYHLLEAAEGHAREGQGIKTDLPQYIIGQLGLAKDPLEEMVPLSHLEEEQPPAPESPESRALVGQSRRKPCESDFETIKLISNGAYGAVYLVRHRDTRQRFAIKKINKQNLILRNQIQQVFVERDILTFAENPFVVSMFCSFETRRHLCMVMEYVEGGDCATLLKNMGPLPVDMARLYFAETVLALEYLHNYGIVHRDLKPDNLLITSLGHIKLTDFGLSKIGLMSMATNLYEGHIEKDAREFIDKQVCGTPEYIAPEVIFRQGYGKPVDWWAMGVVLYEFLVGCVPFFGDTPEELFGQVVSDEIMWPEGDEALPADAQDLITRLLRQSPLDRLGTGGTHEVKQHPFFLALDWAGLLRHKAEFVPQLEAEDDTSYFDTRSERYRHLGSEDDETNDEESSTEIPQFSSCSHRFSKVYSSSEFLAVQPTPTFAERSFSEDREEGWERSEVDYGRRLSADIRLRSWTSSGSSCQSSSSQPERGPSPSLLNTISLDTMPKFAFSSEDEGVGPGPAGPKRPVFILGEPDPPPAATPVMPKPSSLSADTAALSHARLRSNSIGARHSTPRPLDAGRGRRLGGPRDPAPEKSRASSSGGSGGGSGGRVPKSASVSALSLIITADDGSGGPLMSPLSPRSLSSNPSSRDSSPSRDPSPVCGSLRPPIVIHSSGKKYGFSLRAIRVYMGDSDVYTVHHVVWSVEDGSPAQEAGLRAGDLITHINGESVLGLVHMDVVELLLKSGNKISLRTTALENTSIKVGPARKNVAKGRMARRSKRSRRRETQDRRKSLFKKISKQTSVLHTSRSFSSGLHHSLSSSESLPGSPTHSLSPSPTTPCRSPAPDVPADTTASPPSASPSSSSPASPAAAGHTRPSSLHGLAAKLGPPRPKTGRRKSTSSIPPSPLACPPISAPPPRSPSPLPGHPPAPARSPRLRRGQSADKLGTGERLDGEAGRRTRGPEAELVVMRRLHLSERRDSFKKQEAVQEVSFDEPQEEATGLPTSVPQIAVEGEEAVPVALGPTGRD

SEQ ID NO: 1692 - protein, 613 aa, Homo sapiens
MAAQAAAAAQAAAAQAAQAEAADSWYLALLGFAEHFRTSSPPKIRLCVHCLQAVFPFKPPQRIEARTHLQLGSVLYHHTKNSEQARSHLEKAWLISQQIPQFEDVKFEAASLLSELYCQENSVDAAKPLLRKAIQISQQTPYWHCRLLFQLAQLHTLEKDLVSACDLLGVGAEYARVVGSEYTRALFLLSKGMLLLMERKLQEVHPLLTLCGQIVENWQGNPIQKESLRVFFLVLQVTHYLDAGQVKSVKPCLKQLQQCIQTISTLHDDEILPSNPADLFHWLPKEHMCVLVYLVTVMHSMQAGYLEKAQKYTDKALMQLEKLKMLDCSPILSSFQVILLEHIIMCRLVTGHKATALQEISQVCQLCQQSPRLFSNHAAQLHTLLGLYCVSVNCMDNAEAQFTTALRLTNHQELWAFIVTNLASVYIREGNRHQEVLYSLLERINPDHSFPVSSHCLRAAAFYVRGLFSFFQGRYNEAKRFLRETLKMSNAEDLNRLTACSLVLLGHIFYVLGNHRESNNMVVPAMQLASKIPDMSVQLWSSALLRDLNKACGNAMDAHEAAQMHQNFSQQLLQDHIEACSLPEHNLITWTDGPPPVQFQAQNGPNTSLASLL

SEQ ID NO: 1693 - protein, 342 aa, Homo sapiens
MAAVALMPPPLLLLLLLASPPAASAPSARDPFAPQLGDTQNCQLRCRDRDLGPQPSQAGLEGASESPYDRAVLISACERGCRLFSICRFVARSSKPNATQTECEAACVEAYVKEAEQQACSHGCWSQPAEPEPEQKRKVLEAPSGALSLLDLFSTLCNDLVNSAQGFVSSTWTYYLQTDNGKVVVFQTQPIVESLGFQGGRLQRVEVTWRGSHPEALEVHVDPVGPLDKVRKAKIRVKTSSKAKVESEEPQDNDFLSCMSRRSGLPRWILACCLFLSVLVMLWLSCSTLVTAPGQHLKFQPLTLEQHKGFMMEPDWPLYPPPSHACEDSLPPYKLKLDLTKL

SEQ ID NO: 1694 - protein, 655 aa, Homo sapiens
MPLKWKTSSPAIWKFPVPVLKTSRSTPLSPAYISLVEEEDQHMKLSLGGSEMGLSSHLQSSKAGPTRIFTSNTHSSVVLQGFDQLRLEGLLCDVTLMPGDTDDAFPVHRVMMASASDYFKAMFTGGMKEQDLMCIKLHGVSKVGLRKIIDFIYTAKLSLNMDNLQDTLEAASFLQILPVLDFCKVFLISGVTLDNCVEVGRIANTYNLTEVDKYVNSFVLKNFPALLSTGEFLKLPFERLAFVLSSNSLKHCTELELFKATCRWLRLEEPRMDFAAKLMKNIRFPLMTPQELINYVQTVDFMRTDNTCVNLLLEASNYQMMPYMQPVMQSDRTAIRSDTTHLVTLGGVLRQQLVVSKELRMYDEKAHEWKSLAPMDAPRYQHGIAVIGNFLYVVGGQSNYDTKGKTAVDTVFRFDPRYNKWMQVASLNEKRTFFHLSALKGYLYAVGGRNAAGELPTVECYNPRTNEWTYVAKMSEPHYGHAGTVYGGVMYISGGITHDTFQKELMCFDPDTDKWIQKAPMTTVRGLHCMCTVGERLYVIGGNHFRGTSDYDDVLSCEYYSPILDQWTPIAAMLRGQSDVGVAVFENKIYVVGGYSWNNRCMVEIVQKYDPDKDEWHKVFDLPESLGGIRACTLTVFPPEETTPSPSRESPLSAP

SEQ ID NO: 1695 - protein, 889 aa, Homo sapiens
MVLAQGLLSMALLALCWERSLAGAEETIPLQTLRCYNDYTSHITCRWADTQDAQRLVNVTLIRRVNEDLLEPVSCDLSDDMPWSACPHPRCVPRRCVIPCQSFVVTDVDYFSFQPDRPLGTRLTVTLTQHVQPPEPRDLQISTDQDHFLLTWSVALGSPQSHWLSPGDLEFEVVYKRLQDSWEDAAILLSNTSQATLGPEHLMPSSTYVARVRTRLAPGSRLSGRPSKWSPEVCWDSQPGDEAQPQNLECFFDGAAVLSCSWEVRKEVASSVSFGLFYKPSPDAGEEECSPVLREGLGSLHTRHHCQIPVPDPATHGQYIVSVQPRRAEKHIKSSVNIQMAPPSLNVTKDGDSYSLRWETMKMRYEHIDHTFEIQYRKDTATWKDSKTETLQNAHSMALPALEPSTRYWARVRVRTSRTGYNGIWSEWSEARSWDTESVLPMWVLALIVIFLTIAVLLALRFCGIYGYRLRRKWEEKIPNPSKSHLFQNGSAELWPPGSMSAFTSGSPPHQGPWGSRFPELEGVFPVGFGDSEVSPLTIEDPKHVCDPPSGPDTTPAASDLPTEQPPSPQPGPPAASHTPEKQASSFDFNGPYLGPPHSRSLPDILGQPEPPQEGGSQKSPPPGSLEYLCLPAGGQVQLVPLAQAMGPGQAVEVERRPSQGAAGSPSLESGGGPAPPALGPRVGGQDQKDSPVAIPMSSGDTEDPGVASGYVSSADLVFTPNSGASSVSLVPSLGLPSDQTPSLCPGLASGPPGAPGPVKSGFEGYVELPPIEGRSPRSPRNNPVPPEAKSPVLNPGERPADVSPTSPQPEGLLVLQQVGDYCFLPGLGPGPLSLRSKPSSPGPGPEIKNLDQAFQVKKPPGQAVPQVPVIQLFKALVVSVMSVGPPVP

SEQ ID NO: 1696 - protein, 559 aa, Homo sapiens
MSDGLDNEEKPPAPPLRMNSNNRDSSALNHSSKPLPMAPEEKNKKARLRSIFPGGGDKTNKKKEKERPEISLPSDFEHTIHVGFDAVTGEFTPDLYGSQMCPGKLPEGIPEQWARLLQTSNITKLEQKKNPQAVLDVLKFYDSKETVNNQKYMSFTSGDKSAHGYIAAHPSSTKTASEPPLAPPVSEEEDEEEEEEEDENEPPPVIAPRPEHTKSIYTRSVVESIASPAVPNKEVTPPSAENANSSTLYRNTDRQRKKSKMTDEEILEKLRSIVSVGDPKKKYTRFEKIGQGASGTVYTALDIATGQEVAIKQMNLQQQPKKELIINEILVMRENKNPNIVNYLDSYLVGDELWVVMEYLAGGSLTDVVTETCMDEGQIAAVCRECLQALDFLHSNQVIHRDIKSDNILLGMDGSVKLTDFGFCAQITPEQSKRSTMVGTPYWMAPEVVTRKAYGPKVDIWSLGIMAIEMVEGEPPYLNENPLRALYLIATNGTPELQNPERLSAVFRDFLNRCLEMDVDRRGSAKELLQHPFLKLAKPLSSLTPLIIAAKEAIKNSSR

SEQ ID NO: 1697 - protein, 973 aa, Homo sapiens
MAQLYYKKVNYSPYRDRIPLQIVRAETELSAEEKAFLNAVEKGDYATVKQALQEAEIYYNVNINCMDPLGRSALLIAIENENLEIMELLLNHSVYVGDALLYAIRKEVVGAVELLLSYRRPSGEKQVPTLMMDTQFSEFTPDITPIMLAAHTNNYEIIKLLVQKRVTIPRPHQIRCNCVECVSSSEVDSLRHSRSRLNIYKALASPSLIALSSEDPILTAFRLGWELKELSKVENEFKAEYEELSQQCKLFAKDLLDQARSSRELEIILNHRDDHSEELDPQKYHDLAKLKVAIKYHQKEFVAQPNCQQLLATLWYDGFPGWRRKHWVVKLLTCMTIGFLFPMLSIAYLISPRSNLGLFIKKPFIKFICHTASYLTFLFMLLLASQHIVRTDLHVQGPPPTVVEWMILPWVLGFIWGEIKEMWDGGFTEYIHDWWNLMDFAMNSLYLATISLKIVAYVKYNGSRPREEWEMWHPTLIAEALFAISNILSSLRLISLFTANSHLGPLQISLGRMLLDILKFLFIYCLVLLAFANGLNQLYFYYETRAIDEPNNCKGIRCEKQNNAFSTLFETLQSLFWSVFGLLNLYVTNVKARHEFTEFVGATMFGTYNVISLVVLLNMLIAMMNNSYQLIADHADIEWKFARTKLWMSYFDEGGTLPPPFNIIPSPKSFLYLGNWFNNTFCPKRDPDGRRRRRNLRSFTERNADSLIQNQHYQEVIRNLVKRYVAAMIRNSKTHEGLTEENFKELKQDISSFRYEVLDLLGNRKHPRSFSTSSTELSQRDDNNDGSGGARAKSKSVSFNLGCKKKTCHGPPLIRTMPRSSGAQGKSKAESSSKRSFMGPSLKKLGLLFSKFNGHMSEPSSEPMYTISDGIVQQHCMWQDIRYSQMEKGKAEACSQSEINLSEVELGEVQGAAQSSECPLACSSSLHCASSICSSNSKLLDSSEDVFETWGEACDLLMHKWGDGQEEQVTTRL

SEQ ID NO: 1698 - protein, 4374 aa, Homo sapiens
MKVDRTKLKKTPTEAPADCRALIDKLKVCNDEQLLLELQQIKTWNIGKCELYHWVDLLDRFDGILADAGQTVENMSWMLVCDRPEREQLKMLLLAVLNFTALLIEYSFSRHLYSSIEHLTTLLASSDMQVVLAVLNLLYVFSKRSNYITRLGSDKRTPLLTRLQHLAESWGGKENGFGLAECCRDLHMMKYPPSATTLHFEFYADPGAEVKIEKRTTSNTLHYIHIEQLDKISESPSEIMESLTKMYSIPKDKQMLLFTHIRLAHGFSNHRKRLQAVQARLHAISILVYSNALQESANSILYNGLIEELVDVLQITDKQLMEIKAASLRTLTSIVHLERTPKLSSIIDCTGTASYHGFLPVLVRNCIQAMIDPSMDPYPHQFATALFSFLYHLASYDAGGEALVSCGMMEALLKVIKFLGDEQDQITFVTRAVRVVDLITNLDMAAFQSHSGLSIFIYRLEHEVDLCRKECPFVIKPKIQRPNTTQEGEEMETDMDGVQCIPQRAALLKSMLNFLKKAIQDPAFSDGIRHVMDGSLPTSLKHIISNAEYYGPSLFLLATEVVTVFVFQEPSLLSSLQDNGLTDVMLHALLIKDVPATREVLGSLPNVFSALCLNARGLQSFVQCQPFERLFKVLLSPDYLPAMRRRRSSDPLGDTASNLGSAVDELMRHQPTLKTDATTAIIKLLEEICNLGRDPKYICQKPSIQKADGTATAPPPRSNHAAEEASSEDEEEEEVQAMQSFNSTQQNETEPNQQVVGTEERIPIPLMDYILNVMKFVESILSNNTTDDHCQEFVNQKGLLPLVTILGLPNLPIDFPTSAACQAVAGVCKSILTLSHEPKVLQEGLLQLDSILSSLEPLHRPIESPGGSVLLRELACAGNVADATLSAQATPLLHALTAAHAYIMMFVHTCRVGQSEIRSISVNQWGSQLGLSVLSKLSQLYCSLVWESTVLLSLCTPNSLPSGCEFGQADMQKLVPKDEKAGTTQGGKRSDGEQDGAAGSMDASTQGLLEGIGLDGDTLAPMETDEPTASDSKGKSKITPAMAARIKQIKPLLSASSRLGRALAELFGLLVKLCVGSPVRQRRSHHAASTTTAPTPAARSTASALTKLLTKGLSWQPPPYTPTPRFRLTFFICSVGFTSPMLFDERKYPYHLMLQKFLCSGGHNALFETFNWALSMGGKVPVSEGLEHSDLPDGTGEFLDAWLMLVEKMVNPTTVLESPHSLPAKLPGGVQNFPQFSALRFLVVTQKAAFTCIKNLWNRKPLKVYGGRMAESMLAILCHILRGEPVIRERLSKEKEGSRGEEDTGQEEGGSRREPQVNQQQLQQLMDMGFTREHAMEALLNTSTMEQATEYLLTHPPPIMGGVVRDLSMSEEDQMMRAIAMSLGQDIPMDQRAESPEEVACRKEEEERKAREKQEEEEAKCLEKFQDADPLEQDELHTFTDTMLPGCFHLLDELPDTVYRVCDLIMTAIKRNGADYRDMILKQVVNQVWEAADVLIKAALPLTTSDTKTVSEWISQMATLPQASNLATRILLLTLLFEELKLPCAWVVESSGILNVLIKLLEVVQPCLQAAKEQKEVQTPKWITPVLLLIDFYEKTAISSKRRAQMTKYLQSNSNNWRWFDDRSGRWCSYSASNNSTIDSAWKSGETSVRFTAGRRRYTVQFTTMVQVNEETGNRRPVMLTLLRVPRLNKNSKNSNGQELEKTLEESKEMDIKRKENKGNDTPLALESTNTEKETSLEETKIGEILIQGLTEDMVTVLIRACVSMLGVPVDPDTLHATLRLCLRLTRDHKYAMMFAELKSTRMILNLTQSSGFNGFTPLVTLLLRHIIEDPCTLRHTMEKVVRSAATSGAGSTTSGVVSGSLGSREINYILRVLGPAACRNPDIFTEVANCCIRIALPAPRGSGTASDDEFENLRIKGPNAVQLVKTTPLKPSPLPVIPDTIKEVIYDMLNALAAYHAPEEADKSDPKPGVMTQEVGQLLQDMGDDVYQQYRSLTRQSSDFDTQSGFSINSQVFAADGASTETSASGTSQGEASTPEESRDGKKDKEGDRASEEGKQKGKGSKPLMPTSTILRLLAELVRSYVGIATLIANYSYTVGQSELIKEDCSVLAFVLDHLLPHTQNAEDKDTPALARLFLASLAAAGSGTDAQVALVNEVKAALGRALAMAESTEKHARLQAVMCIISTIMESCPSTSSFYSSATAKTQHNGMNNIIRLFLKKGLVNDLARVPHSLDLSSPNMANTVNAALKPLETLSRIVNQPSSLFGSKSASSKNKSEQDAQGASQDSSSNQQDPGEPGEAEVQEEDHDVTQTEVADGDIMDGEAETDSVVIAGQPEVLSSQEMQVENELEDLIDELLERDGGSGNSTIIVSRSGEDESQEDVLMDEAPSNLSQASTLQANREDSMNILDPEDEEEHTQEEDSSGSNEDEDDSQDEEEEEEEDEEDDQEDDEGEEGDEDDDDDGSEMELDEDYPDMNASPLVRFERFDREDDLIIEFDNMFSSATDIPPSPGNIPTTHPLMVRHADHSSLTLGSGSSTTRLTQGIGRSQRTLRQLTANTGHTIHVHYPGNRQPNPPLILQRLLGPSAAADILQLSSSLPLQSRGRARLLVGNDDVHIIARSDDELLDDFFHDQSTATSQAGTLSSIPTALTRWTEECKVLDAESMHDCVSVVKVSIVNHLEFLRDEELEERREKRRKQLAEEETKITDKGKEDKENRDQSAQCTASKSNDSTEQNLSDGTPMPDSYPTTPSSTDAATSESKETLGTLQSSQQQPTLPTPPALGEVPQELQSPAGEGGSSTQLLMPVEPEELGPTRPSGEAETTQMELSPAPTITSLSPERAEDSDALTAVSSQLEGSPMDTSSLASCTLEEAVGDTSAAGSSEQPRAGSSTPGDAPPAVAEVQGRSDGSGESAQPPEDSSPPASSESSSTRDSAVAISGADSRGILEEPLPSTSSEEEDPLAGISLPEGVDPSFLAALPDDIRREVLQNQLGIRPPTRTAPSTNSSAPAVVGNPGVTEVSPEFLAALPPAIQEEVLAQQRAEQQRRELAQNASSDTPMDPVTFIQTLPSDLRRSVLEDMEDSVLAVMPPDIAAEAQALRREQEARQRQLMHERLFGHSSTSALSAILRSPAFTSRLSGNRGVQYTRLAVQRGGTFQMGGSSSHNRPSGSNVDTLLRLRGRLLLDHEALSCLLVLLFVDEPKLNTSRLHRVLRNLCYHAQTRHWVIRSLLSILQRSSESELCIETPKLTTSEEKGKKSSKSCGSSSHENRPLDLLHKMESKSSNQLSWLSVSMDAALGCRTNIFQIQRSGGRKHTEKHASGGSTVHIHPQAAPVVCRHVLDTLIQLAKVFPSHFTQQRTKETNCESDRERGNKACSPCSSQSSSSGICTDFWDLLVKLDNMNVSRKGKNSVKSVPVSAGGEGETSPYSLEASPLGQLMNMLSHPVIRRSSLLTEKLLRLLSLISIALPENKVSEAQANSGSGASSTTTATSTTSTTTTTAASTTPTPPTAPTPVTSAPALVAATAISTIVVAASTTVTTPTTATTTVSISPTTKGSKSPAKVSDGGSSSTDFKMVSSGLTENQLQLSVEVLTSHSCSEEGLEDAANVLLQLSRGDSGTRDTVLKLLLNGARHLGYTLCKQIGTLLAELREYNLEQQRRAQCETLSPDGLPEEQPQTTKLKGKMQSRFDMAENVVIVASQKRPLGGRELQLPSMSMLTSKTSTQKFFLRVLQVIIQLRDDTRRANKKAKQTGRLGSSGLGSASSIQAAVRQLEAEADAIIQMVREGQRARRQQQAATSESSQSEASVRREESPMDVDQPSPSAQDTQSIASDGTPQGEKEKEERPPELPLLSEQLSLDELWDMLGECLKELEESHDQHAVLVLQPAVEAFFLVHATERESKPPVRDTRESQLAHIKDEPPPLSPAPLTPATPSSLDPFFSREPSSMHISSSLPPDTQKFLRFAETHRTVLNQILRQSTTHLADGPFAVLVDYIRVLDFDVKRKYFRQELERLDEGLRKEDMAVHVRRDHVFEDSYRELHRKSPEEMKNRLYIVFEGEEGQDAGGLLREWYMIISREMFNPMYALFRTSPGDRVTYTINPSSHCNPNHLSYFKFVGRIVAKAVYDNRLLECYFTRSFYKHILGKSVRYTDMESEDYHFYQGLVYLLENDVSTLGYDLTFSTEVQEFGVCEVRDLKPNGANILVTEENKKEYVHLVCQMRMTGAIRKQLAAFLEGFYEIIPKRLISIFTEQELELLISGLPTIDIDDLKSNTEYHKYQSNSIQIQWFWRALRSFDQADRAKFLQFVTGTSKVPLQGFAALEGMNGIQKFQIHRDDRSTDRLPSAHTCFNQLDLPAYESFEKLRHMLLLAIQECSEGFGLA

SEQ ID NO: 1699 - protein, 1722 aa, Homo sapiens
MSDPRQSQEEKHKLGRASSKFKDPPRIMQSDDYFARKFKAINGNMGPTTSLNASNSNETGGGGPANGTPAVPKMGVRARVSEWPPKKDCSKELTCKALWESRSQTSYESITSVLQNGQSDQSEGQQDEQLDLDFVEAKYTIGDIFVHSPQRGLHPIRQRSNSDVTISDIDAEDVLDQNAVNPNTGAALHREYGSTSSIDRQGLSGENFFAMLRGYRVENYDHKAMVPFGFPEFFRCDPAISPSLHAAAQISRGEFVRISGLDYVDSALLMGRDRDKPFKRRLKSESVETSLFRKLRTVKSEHETFKFTSELEESRLERGIRPWNCQRCFAHYDVQSILFNINEAMATRANVGKRKNITTGASAASQTQMPTGQTGNCESPLGSKEDLNSKENLDADEGDGKSNDLVLSCPYFRNETGGEGDRRIALSRANSSSFSSGESCSFESSLSSHCTNAGVSVLEVPRENQPIHREKVKRYIIEHIDLGAYYYRKFFYGKEHQNYFGIDENLGPVAVSIRREKVEDAKEKEGSQFNYRVAFRTSELTTLRGAILEDAIPSTARHGTARGLPLKEVLEYVIPELSIQCLRQASNSPKVSEQLLKLDEQGLSFQHKIGILYCKAGQSTEEEMYNNETAGPAFEEFLDLLGQRVRLKGFSKYRAQLDNKTDSTGTHSLYTTYKDYELMFHVSTLLPYMPNNRQQLLRKRHIGNDIVTIVFQEPGALPFTPKSIRSHFQHVFVIVKVHNPCTENVCYSVGVSRSKDVPPFGPPIPKGVTFPKSAVFRDFLLAKVINAENAAHKSEKFRAMATRTRQEYLKDLAENFVTTATVDTSVKFSFITLGAKKKEKVKPRKDAHLFSIGAIMWHVIARDFGQSADIECLLGISNEFIMLIEKDSKNVVFNCSCRDVIGWTSGLVSIKVFYERGECVLLSSVDNCAEDIREIVQRLVIVTRGCETVEMTLRRNGLGQLGFHVNFEGIVADVEPFGFAWKAGLRQGSRLVEICKVAVATLTHEQMIDLLRTSVTVKVVIIQPHDDGSPRRGCSELCRIPMVEYKLDSEGTPCEYKTPFRRNTTWHRVPTPALQPLSRASPIPGTPDRLPCQQLLQQAQAAIPRSTSFDRKLPDGTRSSPSNQSSSSDPGPGGSGPWRPQVGYDGCQSPLLLEHQGSGPLECDGAREREDTMEASRHPETKWHGPPSKVLGSYKERALQKDGSCKDSPNKLSHIGDKSCSSHSSSNTLSSNTSSNSDDKHFGSGDLMDPELLGLTYIKGASTDSGIDTAPCMPATILGPVHLAGSRSLIHSRAEQWADAADVSGPDDEPAKLYSVHGYASTISAGSAAEGSMGDLSEISSHSSGSHHSGSPSAHCSKSSGSLDSSKVYIVSHSSGQQVPGSMSKPYHRQGAVNKYVIGWKKSEGSPPPEEPEVTECPGMYSEMDVMSTATQHQTVVGDAVAETQHVLSKEDFLKLMLPDSPLVEEGRRKFSFYGNLSPRRSLYRTLSDESICSNRRGSSFGSSRSSVLDQALPNDILFSTTPPYHSTLPPRAHPAPSMGSLRNEFWFSDGSLSDKSKCADPGLMPLPDTATGLDWTHLVDAARAFEGLDSDEELGLLCHHTSYLDQRVASFCTLTDMQHGQDLEGAQELPLCVDPGSGKEFMDTTGERSPSPLTGKVNQLELILRQLQTDLRKEKQDKAVLQAEVQHLRQDNMRLQEESQTATAQLRKFTEWFFTTIDKKS

SEQ ID NO: 1700 - protein, 1941 aa, Homo sapiens
MMDVSELGESARYLRQGYQEMTKVHTIPWDGKKRVWVPDEQDAYVEAEVKSEATGGRVTVETKDQKVLMVREAELQPMNPPRFDLLEDMAMMTHLNEASVLHNLRQRYARWMIYTYSGLFCVTINPYKWLPVYTASVVAAYKGKRRSDSPPHIYAVADNAYNDMLRNRDNQSMLITGESGAGKTVNTKRVIQYFAIVAALGDGPGKKAQFLATKTGGTLEDQIIEANPAMEAFGNAKTLRNDNSSRFGKFIRIHFGPSGKLASADIDSYLLEKSRVIFQLPGERSYHVYYQILSGRKPELQDMLLLSMNPYDYHFCSQGVITVDNMNDGEELIATDHAMDILGFSVDEKCACYKIVGALLHFGNMKFKQKQREEQAEADGTESADKAAYLMGVSSGDLLKGLLHPRVRVGNEYVTKGQSVEQVVFAVGALAKATYDRLFRWLVSRINQTLDTKLPRQFFIGVLDIAGFEIFEFNSFEQLCINFTNEKLQQFFNQHMFVLEQEEYKREGIDWVFIDFGLDLQPCIDLIEKPLGILSILEEECMFPKASDASFRAKLYDNHAGKSPNFQQPRPDKKRKYQAHFEVVHYAGVVPYSIVGWLEKNKDPLNETVVPIFQKSQNRLLATLYENYAGSCSTEPPKSGVKEKRKKAASFQTVSQLHKENLNKLMTNLRATQPHFVRCIVPNENKTPGVMDAFLVLHQLRCNGVLEGIRICRQGFPNRLLYTDFRQRYRILNPSAIPDDTFMDSRKATEKLLGSLDLDHTQYQFGHTKVFFKAGLLGVLEELRDQRLAKVLTLLQARSRGRLMRLEYQRLLGGRDALFTIQWNIRAFNAVKNWSWMKLFFKMKPLLRSAQAEEELAALRAELRGLRGALAAAEAKRQELEETHVSITQEKNDLALQLQAEQDNLADAEERCHLLIKSKVQLEGKVKELSERLEDEEEVNADLAARRRKLEDECTELKKDIDDLELTLAKAEKEKQATENKVKNLTEEMAALDESVARLTKEKKALQEAHQQALGDLQAEEDRVSALTKAKLRLEQQVEDLECSLEQEKKLRMDTERAKRKLEGDLKLTQESVADAAQDKQQLEEKLKKKDSELSQLSLRVEDEQLLGAQMQKKIKELQARAEELEEELEAERAARARVEKQRAEAARELEELSERLEEAGGASAGQREGCRKREAELGRLRRELEEAALRHEATVAALRRKQAEGAAELGEQVDSLQRVRQKLEKEKSELRMEVDDLAANVETLTRAKASAEKLCRTYEDQLSEAKIKVEELQRQLADASTQRGRLQTESGELSRLLEEKECLISQLSRGKALAAQSLEELRRQLEEESKAKSALAHAVQALRHDCDLLREQHEEEAEAQAELQRLLSKANAEVAQWRSKYEADAIQRTEELEEAKKKLALRLQEAEEGVEAANAKCSSLEKAKLRLQTESEDVTLELERATSAAAALDKKQRHLERALEERRRQEEEMQRELEAAQRESRGLGTELFRLRHGHEEALEALETLKRENKNLQEEISDLTDQVSLSGKSIQELEKTKKALEGEKSEIQAALEEAEGALELEETKTLRIQLELSQVKAEVDRKLAEKDEECANLRRNHQRAVESLQASLDAETRARNEALRLKKKMEGDLNDLELQLGHATRQATEAQAATRLMQAQLKEEQAGRDEEQRLAAELHEQAQALERRASLLAAELEELRAALEQGERSRRLAEQELLEATERLNLLHSQNTGLLNQKKKLEADLAQLSGEVEEAAQERREAEEKAKKAITDAAMMAEELKKEQDTSAHLERMKKTLEQTVRELQARLEEAEQAALRGGKKQVQKLEAKVRELEAELDAEQKKHAEALKGVRKHERRVKELAYQAEEDRKNLARMQDLVDKLQSKVKSYKRQFEEAEQQANTNLAKYRKAQHELDDAEERADMAETQANKLRARTRDALGPKHKE

SEQ ID NO: 1701 - protein, 591 aa, Homo sapiens
MQRADSEQPSKRPRCDDSPRTPSNTPSAEADWSPGLELHPDYKTWGPEQVCSFLRRGGFEEPVLLKNIRENEITGALLPCLDESRFENLGVSSLGERKKLLSYIQRLVQIHVDTMKVINDPIHGHIELHPLLVRIIDTPQFQRLRYIKQLGGGYYVFPGASHNRFEHSLGVGYLAGCLVHALGEKQPELQISERDVLCVQIAGLCHDLGHGPFSHMFDGRFIPLARPEVKWTHEQGSVMMFEHLINSNGIKPVMEQYGLIPEEDICFIKEQIVGPLESPVEDSLWPYKGRPENKSFLYEIVSNKRNGIDVDKWDYFARDCHHLGIQNNFDYKRFIKFARVCEVDNELRICARDKEVGNLYDMFHTRNSLHRRAYQHKVGNIIDTMITDAFLKADDYIEITGAGGKKYRISTAIDDMEAYTKLTDNIFLEILYSTDPKLKDAREILKQIEYRNLFKYVGETQPTGQIKIKREDYESLPKEVASAKPKVLLDVKLKAEDFIVDVSQLLPEKFAEQLIRVYCKKVDRKSLYAARQYFVQWCADRNFTKPQDGDVIAPLITPQKKEWNDSTSVQNPTRLREASKSRVQLFKDDPM

SEQ ID NO: 1702 - protein, 1494 aa, Homo sapiens
MYSEWRSLHLVIQNDQGHTSVLHSYPESVGREVANAVVRPLGQVLGTPSVAGSENLLKTDKEVKWTMEVICYGLTLPLDGETVKYCVDVYTDWIMALVLPKDSIPLPVIKEPNQYVQTILKHLQNLFVPRQEQGSSQIRLCLQVLRAIQKLARESSLMARETWEVLLLFLLQINDILLAPPTVQGGIAENLAEKLIGVLFEVWLLACTRCFPTPPYWKTAKEMVANWRHHPAVVEQWSKVICALTSRLLRFTYGPSFPAFKVPDEDASLIPPEMDNECVAQTWFRFLHMLSNPVDLSNPAIISSTPKFQEQFLNVSGMPQELNQYPCLKHLPQIFFRAMRGISCLVDAFLGISRPRSDSAPPTPVNRLSMPQSAAVSTTPPHNRRHRAVTVNKATMKTSTVSTAHASKVQHQTSSTSPLSSPNQTSSEPRPLPAPRRPKVNSILNLFGSWLFDAAFVHCKLHNGINRDSSMTAITTQASMEFRRKGSQMSTDTMVSNPMFDASEFPDNYEAGRAEACGTLCRIFCSKKTGEEILPAYLSRFYMLLIQGLQINDYVCHPVLASVILNSPPLFCCDLKGIDVVVPYFISALETILPDRELSKFKSYVNPTELRRSSINILLSLLPLPHHFGTVKSEVVLEGKFSNDDSSSYDKPITFLSLKLRLVNILIGALQTETDPNNTQMILGAMLNIVQDSALLEAIGCQMEMGGGENNLKSHSRTNSGISSASGGSTEPTTPDSERPAQALLRDYALNTDSAAGLLIRSIHLVTQRLNSQWRQDMSISLAALELLSGLAKVKVMVDSGDRKRAISSVCTYIVYQCSRPAPLHSRDLHSMIVAAFQCLCVWLTEHPDMLDEKDCLKEVLEIVELGISGSKSKNNEQEVKYKGDKEPNPASMRVKDAAEATLTCIMQLLGAFPSPSGPASPCSLVNETTLIKYSRLPTINKHSFRYFVLDNSVILAMLEQPLGNEQNDFFPSVTVLVRGMSGRLAWAQQLCLLPRGAKANQKLFVPEPRPVPKNDVGFKYSVKHRPFPEEVDKIPFVKADLSIPDLHEIVTEELEERHEKLRSGMAQQIAYEIHLEQQSEEELQKRSFPDPVTDCKPPPPAQEFQTARLFLSHFGFLSLEALKEPANSRLPPHLIALDSTIPGFFDDIGYLDLLPCRPFDTVFIFYMKPGQKTNQEILKNVESSRTVQPHFLEFLLSLGWSVDVGRHPGWTGHVSTSWSINCCDDGEGSQQEVISSEDIGASIFNGQKKVLYYADALTEIAFVVPSPVESLTDSLESNISDQDSDSNMDLMPGILKQPSLTLELFPNHTDNLNSSQRLSPSSRMRKLPQGRPVPPLGPETRVSVVWVERYDDIENFPLSELMTEISTGVETTANSSTSLRSTTLEKEVPVIFIHPLNTGLFRIKIQGATGKFNMVIPLVDGMIVSRRALGFLVRQTVINICRRKRLESDSYSPPHVRRKQKITDIVNKYRNKQLEPEFYTSLFQEVGLKNCSS

SEQ ID NO: 1703 - protein, 752 aa, Homo sapiens
MSSRTVLAPGNDRNSDTHGTLGSGRSSDKGPSWSSRSLGARCRNSIASCPEEQPHVGNYRLLRTIGKGNFAKVKLARHILTGREVAIKIIDKTQLNPSSLQKLFREVRIMKGLNHPNIVKLFEVIETEKTLYLVMEYASAGEVFDYLVSHGRMKEKEARAKFRQIVSAVHYCHQKNIVHRDLKAENLLLDAEANIKIADFGFSNEFTLGSKLDTFCGSPPYAAPELFQGKKYDGPEVDIWSLGVILYTLVSGSLPFDGHNLKELRERVLRGKYRVPFYMSTDCESILRRFLVLNPAKRCTLEQIMKDKWINIGYEGEELKPYTEPEEDFGDTKRIEVMVGMGYTREEIKESLTSQKYNEVTATYLLLGRKTEEGGDRGAPGLALARVRAPSDTTNGTSSSKGTSHSKGQRSSSSTYHRQRRHSDFCGPSPAPLHPKRSPTSTGEAELKEERLPGRKASCSTAGSGSRGLPPSSPMVSSAHNPNKAEIPERRKDSTSTPNNLPPSMMTRRNTYVCTERPGAERPSLLPNGKENSSGTPRVPPASPSSHSLAPPSGERSRLARGSTIRSTFHGGQVRDRRAGGGGGGGVQNGPPASPTLAHEAAPLPAGRPRPTTNLFTKLTSKLTRRVADEPERIGGPEVTSCHLPWDQTETAPRLLRFPWSVKLTSSRPPEALMAALRQATAAARCRCRQPQPFLLACLHGGAGGPEPLSHFEVEVCQLPRPGLRGVLFRRVAGTALAFRTLVTRISNDLEL

SEQ ID NO: 1704 - protein, 706 aa, Homo sapiens
MTTLKEAVTFKDVAVVFTEEELRLLDLAQRKLYREVMLENFRNLLSVGHQSLHRDTFHFLKEEKFWMMETATQREGNLGGKIQMEMETVSESGTHEGLFSHQTWEQISSDLTRFQDSMVNSFQFSKQDDMPCQVDAGLSIIHVRQKPSEGRTCKKSFSDVSVLDLHQQLQSREKSHTCDECGKSFCYSSALRIHQRVHMGEKLYNCDVCGKEFNQSSHLQIHQRIHTGEKPFKCEQCGKGFSRRSGLYVHRKLHTGVKPHICEKCGKAFIHDSQLQEHQRIHTGEKPFKCDICCKSFRSRANLNRHSMVHMREKPFRCDTCGKSFGLKSALNSHRMVHTGEKRYKCEECGKRFIYRQDLYKHQIDHTGEKPYNCKECGKSFRWASGLSRHVRVHSGETTFKCEECGKGFYTNSQRYSHQRAHSGEKPYRCEECGKGYKRRLDLDFHQRVHRGEKPYNCKECGKSFGWASCLLNHQRIHSGEKPFKCEECGKRFTQNSQLYTHRRVHSGEKPFKCEECGKRFTQNSQLYSHRRVHTGVKPYKCEECGKGFNSKFNLDMHQRVHTGERPYNCKECGKSFSRASSILNHKRLHGDEKPFKCEECGKRFTENSQLHSHQRVHTGEKPYKCEKCGKSFRWASTHLTHQRLHSREKLLQCEDCGKSIVHSSCLKDQQRDQSGEKTSKCEDCGKRYKRRLNLDTLLSLFLNDT

SEQ ID NO: 1705 - protein, 980 aa, Homo sapiens
MPAELLLLLIVAFASPSCQVLSSLRMAAILDDQTVCGRGERLALALAREQINGIIEVPAKARVEVDIFELQRDSQYETTDTMCQILPKGVVSVLGPSSSPASASTVSHICGEKEIPHIKVGPEETPRLQYLRFASVSLYPSNEDVSLAVSRILKSFNYPSASLICAKAECLLRLEELVRGFLISKETLSVRMLDDSRDPTPLLKEIRDDKVSTIIIDANASISHLILRKASELGMTSAFYKYILTTMDFPILHLDGIVEDSSNILGFSMFNTSHPFYPEFVRSLNMSWRENCEASTYLGPALSAALMFDAVHVVVSAVRELNRSQEIGVKPLACTSANIWPHGTSLMNYLRMVEYDGLTGRVEFNSKGQRTNYTLRILEKSRQGHREIGVWYSNRTLAMNATTLDINLSQTLANKTLVVTTILENPYVMRRPNFQALSGNERFEGFCVDMLRELAELLRFRYRLRLVEDGLYGAPEPNGSWTGMVGELINRKADLAVAAFTITAEREKVIDFSKPFMTLGISILYRVHMGRKPGYFSFLDPFSPAVWLFMLLAYLAVSCVLFLAARLSPYEWYNPHPCLRARPHILENQYTLGNSLWFPVGGFMQQGSEIMPRALSTRCVSGVWWAFTLIIISSYTANLAAFLTVQRMEVPVESADDLADQTNIEYGTIHAGSTMTFFQNSRYQTYQRMWNYMQSKQPSVFVKSTEEGIARVLNSRYAFLLESTMNEYHRRLNCNLTQIGGLLDTKGYGIGMPLGSPFRDEITLAILQLQENNRLEILKRKWWEGGRCPKEEDHRAKGLGMENIGGIFIVLICGLIIAVFVAVMEFIWSTRRSAESEEVSVCQEMLQELRHAVSCRKTSRSRRRRRPGGPSRALLSLRAVREMRLSNGKLYSAGAGGDAGSAHGGPQRLLDDPGPPSGARPAAPTPCTHVRVCQECRRIQALRASGAGAPPRGLGVPAEATSPPRPRPGPAGPRELAEHE

SEQ ID NO: 1706 - protein, 766 aa, Homo sapiens
MKEKSKNAARTRREKENSEFYELAKLLPLPSAITSQLDKASIIRLTTSYLKMRVVFPEGLGEAWGHSSRTSPLDNVGRELGSHLLQTLDGFIFVVAPDGKIMYISETASVHLGLSQVELTGNSIYEYIHPADHDEMTAVLTAHQPYHSHFVQEYEIERSFFLRMKCVLAKRNAGLTCGGYKVIHCSGYLKIRQYSLDMSPFDGCYQNVGLVAVGHSLPPSAVTEIKLHSNMFMFRASLDMKLIFLDSRVAELTGYEPQDLIEKTLYHHVHGCDTFHLRCAHHLLLVKGQVTTKYYRFLAKHGGWVWVQSYATIVHNSRSSRPHCIVSVNYVLTDTEYKGLQLSLDQISASKPAFSYTSSSTPTMTDNRKGAKSRLSSSKSKSRTSPYPQYSGFHTERSESDHDSQWGGSPLTDTASPQLLDPADRPGSQHDASCAYRQFSDRSSLCYGFALDHSRLVEERHFHTQACEGGRCEAGRYFLGTPQAGREPWWGSRAALPLTKASPESREAYENSMPHIASVHRIHGRGHWDEDSVVSSPDPGSASESGDRYRTEQYQSSPHEPSKIETLIRATQQMIKEEENRLQLRKAPSDQLASINGAGKKHSLCFANYQQPPPTGEVCHGSALANTSPCDHIQQREGKMLSPHENDYDNSPTALSRISSPNSDRISKSSLILAKDYLHSDISPHQTAGDHPTVSPNCFGSHRQYFDKHAYTLTGYALEHLYDSETIRNYSLGCNGSHFDVTSHLRMQPDPAQGHKGTSVIITNGS

SEQ ID NO: 1707 - protein, 909 aa, Homo sapiens
MERAMEQLNRLTRSLRRARTVELPEDNETAVYTLMPMVMADQHRSVSELLSNSKFDVNYAFGRVKRSLLHIAANCGSVECLVLLLKKGANPNYQDISGCTPLHLAARNGQKKCMSKLLEYSADVNICNNEGLTAIHWLAVNGRTELLHDLVQHVSDVDVEDAMGQTALHVACQNGHKTTVQCLLDSGADINRPNVSGATPLYFACSHGQRDTAQILLLRGAKYLPDKNGVTPLDLCVQGGYGETCEVLIQYHPRLFQTIIQMTQNEDLRENMLRQVLEHLSQQSESQYLKILTSLAEVATTNGHKLLSLSSNYDAQMKSLLRIVRMFCHVFRIGPSSPSNGIDMGYNGNKTPRSQVFKPLELLWHSLDEWLVLIATELMKNKRDSTEITSILLKQKGQDQDAASIPPFEPPGPGSYENLSTGTRESKPDALAGRQEASADCQDVISMTANRLSAVIQAFYMCCSCQMPPGMTSPRFIEFVCKHDEVLKCFVNRNPKIIFDHFHFLLECPELMSRFMHIIKAQPFKDRCEWFYEHLHSGQPDSDMVHRPVNENDILLVHRDSIFRSSCEVVSKANCAKLKQGIAVRFHGEEGMGQGVVREWFDILSNEIVNPDYALFTQSADGTTFQPNSNSYVNPDHLNYFRFAGQILGLALNHRQLVNIYFTRSFYKHILGIPVNYQDVASIDPEYAKNLQWILDNDISDLGLELTFSVETDVFGAMEEVPLKPGGGSILVTQNNKAEYVQLVTELRMTRAIQPQINAFLQGFHMFIPPSLIQLFDEYELELLLSGMPEIDVSDWIKNTEYTSGYEREDPVIQWFWEVVEDITQEERVLLLQFVTGSSRVPHGGFANIMGGSGLQNFTIAAVPYTPNLLPTSSTCINMLKLPEYPSKEILKDRLLVALHCGSYGYTMA

SEQ ID NO: 1708 - protein, 444 aa, Homo sapiens
MGLLVFVRNLLLALCLFLVLGFLYYSAWKLHLLQWEEDSSKYSHSSSPQEKPVADSVVLSFDSAGQTLGSEYDRLGFLLNLDSKLSPRTLCTVVFGLDCILESPGEPKKLLMPASHPLEILKSLSEDTAFALGFLKLPRPAELATKYANFSEGACKPGYASALMTAIFPRFSKPAPMFLDDSFRKWARIREFVPPFGIKGQDNLIKAILSVTKEYRLTPALDSLRCRRCIIVGNGGVLANKSLGSRIDDYDIVVRLNSAPVKGFEKDVGSKTTLRITYPEGAMQRPEQYERDSLFVLAGFKWQDFKWLKYIVYKERVSASDGFWKSVATRVPKEPPEIRILNPYFIQEAAFTLIGLPFNNGLMGRGNIPTLGSVAVTMALHGCDEVAVAGFGYDMSTPNAPLHYYETVRMAAIKESWTHNIQREKEFLRKLVKARVITDLSSGI

SEQ ID NO: 1709 - protein, 695 aa, Homo sapiens [sequence omitted]

SEQ ID NO: 1710 - protein, 1429 aa, Homo sapiens
MVAAAAATEARLRRRTAATAALAGRSGGPHWDWDVTRAGRPGLGAGLRLPRLLSPPLRPRLLLLLLLLSPPLLLLLLPCEAEAAAAAAAVSGSAAAEAKECDRPCVNGGRCNPGTGQCVCPAGWVGEQCQHCGGRFRLTGSSGFVTDGPGNYKYKTKCTWLIEGQPNRIMRLRFNHFATECSWDHLYVYDGDSIYAPLVAAFSGLIVPERDGNETVPEVVATSGYALLHFFSDAAYNLTGFNITYSFDMCPNNCSGRGECKISNSSDTVECECSENWKGEACDIPHCTDNCGFPHRGICNSSDVRGCSCFSDWQGPGCSVPVPANQSFWTREEYSNLKLPRASHKAVVNGNIMWVVGGYMFNHSDYNMVLAYDLASREWLPLNRSVNNVVVRYGHSLALYKDKIYMYGGKIDSTGNVTNELRVFHIHNESWVLLTPKAKEQYAVVGHSAHIVTLKNGRVVMLVIFGHCPLYGYISNVQEYDLDKNTWSILHTQGALVQGGYGHSSVYDHRTRALYVHGGYKAFSANKYRLADDLYRYDVDTQMWTILKDSRFFRYLHTAVIVSGTMLVFGGNTHNDTSMSHGAKCFSSDFMAYDIACDRWSVLPRPDLHHDVNRFGHSAVLHNSTMYVFGGFNSLLLSDILVFTSEQCDAHRSEAACLAAGPGIRCVWNTGSSQCISWALATDEQEEKLKSECFSKRTLDHDRCDQHTDCYSCTANTNDCHWCNDHCVPRNHSCSEGQISIFRYENCPKDNPMYYCNKKTSCRSCALDQNCQWEPRNQECIALPENICGIGWHLVGNSCLKITTAKENYDNAKLFCRNHNALLASLTTQKKVEFVLKQLRIMQSSQSMSKLTLTPWVGLRKINVSYWCWEDMSPFTNSLLQWMPSEPSDAGFCGILSEPSTRGLKAATCINPLNGSVCERPANHSAKQCRTPCALRTACGDCTSGSSECMWCSNMKQCVDSNAYVASFPFGQCMEWYTMSTCPPENCSGYCTCSHCLEQPGCGWCTDPSNTGKGKCIEGSYKGPVKMPSQAPTGNFYPQPLLNSSMCLEDSRYNWSFIHCPACQCNGHSKCINQSICEKCENLTTGKHCETCISGFYGDPTNGGKCQPCKCNGHASLCNTNTGKCFCTTKGVKGDECQLCEVENRYQGNPLRGTCYYTLLIDYQFTFSLSQEDDRYYTAINFVATPDEQNRDLDMFINASKNFNLNITWAASFSAGTQAGEEMPVVSKTNIKEYKDSFSNEKFDFRNHPNITFFVYVSNFTWPIKIQIAFSQHSNFMDLVQFFVTFFSCFLSLLLVAAVVWKIKQSCWASRRREQLLREMQQMASRPFASVNVALETDEEPPDLIGGSIKTVPKPIALEPCFGNKAAVLSVFVRLPRGLGGIPPPGQSGLAVASALVDISQQMPIVYKEKSGAVRNRKQQPPAQPGTCI

SEQ ID NO: 1711 - protein, 370 aa, Homo sapiens
MSLHQFLLEPITCHAWNRDRTQIALSPNNHEVHIYKKNGSQWVKAHELKEHNGHITGIDWAPKSDRIVTCGADRNAYVWSQKDGVWKPTLVILRINRAATFVKWSPLENKFAVGSGARLISVCYFESENDWWVSKHIKKPIRSTVLSLDWHPNNVLLAAGSCDFKCRVFSAYIKEVDEKPASTPWGSKMPFGQLMSEFGGSGTGGWVHGVSFSASGSRLAWVSHDSTVSVADASKSVQVSTLKTEFLPLLSVSFVSENSVVAAGHDCCPMLFNYDDRGCLTFVSKLDIPKQSIQRNMSAMERFRNMDKRATTEDRNTALETLHQNSITQVSIYEVDKQDCRKFCTTGIDGAMTIWDFKTLESSIQGLRIM

SEQ ID NO: 1712 - protein, 743 aa, Homo sapiens
MYPQGRHPTPLQSGQPFKFSILEICDRIKEEFQFLQAQYHSLKLECEKLASEKTEMQRHYVMYYEMSYGLNIEMHKQAEIVKRLSGICAQIIPFLTQEHQQQVLQAVERAKQVTVGELNSLIGQQLQPLSHHAPPVPLTPRPAGLVGGSATGLLALSGALAAQAQLAAAVKEDRAGVEAEGSRVERAPSRSASPSPPESLVEEERPSGPGGGGKQRADEKEPSGPYESDEDKSDYNLVVDEDQPSEPPSPATTPCGKVPICIPARRDLVDSPASLASSLGSPLPRAKELILNDLPASTPASKSCDSSPPQDASTPGPSSASHLCQLAAKPAPSTDSVALRSPLTLSSPFTTSFSLGSHSTLNGDLSVPSSYVSLHLSPQVSSSVVYGRSPVMAFESHPHLRGSSVSSSLPSIPGGKPAYSFHVSADGQMQPVPFPSDALVGAGIPRHARQLHTLAHGEVVCAVTISGSTQHVYTGGKGCVKVWDVGQPGAKTPVAQLDCLNRDNYIRSCKLLPDGRSLIVGGEASTLSIWDLAAPTPRIKAELTSSAPACYALAVSPDAKVCFSCCSDGNIVVWDLQNQTMVRQFQGHTDGASCIDISDYGTRLWTGGLDNTVRCWDLREGRQLQQHDFSSQIFSLGHCPNQDWLAVGMESSNVEILHVRKPEKYQLHLHESCVLSLKFASCGRWFVSTGKDNLLNAWRTPYGASIFQSKESSSVLSCDISRNNKYIVTGSGDKKATVYEVVY

SEQ ID NO: 1713 - protein, 892 aa, Homo sapiens
MRKVKKLRLDKENTGSWRSFSLNSEGAERMATTGTPTADRGDAAATDDPAARFQVQKHSWDGLRSIIHGSRKYSGLIVNKAPHDFQFVQKTDESGPHSHRLYYLGMPYGSRENSLLYSEIPKKVRKEALLLLSWKQMLDHFQATPHHGVYSREEELLRERKRLGVFGITSYDFHSESGLFLFQASNSLFHCRDGGKNGFMVSPMKPLEIKTQCSGPRMDPKICPADPAFFSFINNSDLWVANIETGEERRLTFCHQGLSNVLDDPKSAGVATFVIQEEFDRFTGYWWCPTASWEGSEGLKTLRILYEEVDESEVEVIHVPSPALEERKTDSYRYPRTGSKNPKIALKLAEFQTDSQGKIVSTQEKELVQPFSSLFPKVEYIARAGWTRDGKYAWAMFLDRPQQWLQLVLLPPALFIPSTENEEQRLASARAVPRNVQPYVVYEEVTNVWINVHDIFYPFPQSEGEDELCFLRANECKTGFCHLYKVTAVLKSQGYDWSEPFSPGEDEFKCPIKEEIALTSGEWEVLARHGSKIWVNEETKLVYFQGTKDTPLEHHLYVVSYEAAGEIVRLTTPGFSHSCSMSQNFDMFVSHYSSVSTPPCVHVYKLSGPDDDPLHKQPRFWASMMEAASCPPDYVPPEIFHFHTRSDVRLYGMIYKPHALQPGKKHPTVLFVYGGPQVQLVNNSFKGIKYLRLNTLASLGYAVVVIDGRGSCQRGLRFEGALKNQMGQVEIEDQVEGLQFVAEKYGFIDLSRVAIHGWSYGGFLSLMGLIHKPQVFKVAIAGAPVTVWMAYDTGYTERYMDVPENNQHGYEAGSVALHVEKLPNEPNRLLILHGFLDENVHFFHTNFLVSQLIRAGKPYQLQIYPNERHSIRCPESGEHYEVTLLHFLQEYL

SEQ ID NO: 1714 - protein, 939 aa, Homo sapiens
MATSQYFDFAQGGGPQYSAQPPTLPLPTVGASYTAQPTPGMDPAVNPAFPPAAPAGYGGYQPHSGQDFAYGSRPQEPVPTATTMATYQDSYSYGQSAAARSYEDRPYFQSAALQSGRMTAADSGQPGTQEACGQPSPHGSHSHAQPPQQAPIVESGQPASTLSSGYTYPTATGVQPESSASIVTSYPPPSYNPTCTAYTAPSYPNYDASVYSAASPFYPPAQPPPPPGPPQQLPPPPAPAGSGSSPRADSKPPLPSKLPRPKAGPRQLQLHYCDICKISCAGPQTYREHLGGQKHRKKEAAQKTGVQPNGSPRGVQAQLHCDLCAVSCTGADAYAAHIRGSKHQKVFKLHAKLGKPIPTLEPALATESPPGAEAKPTSPTGPSVCASSRPALAKRPVASKALCEGPPEPQAAGCRPQWGKPAQPKLEGPGAPTQGGSKEAPAGCSDAQPVGPEYVEEVFSDEGRVLRFHCKLCECSFNDLNAKDLHVRGRRHRLQYRKKVNPDLPIATEPSSRARKVLEERMRKQRHLAEERLEQLRRWHAERRRLEEEPPQDVPPHAPPDWAQPLLMGRPESPASAPLQPGRRPASSDDRHVMCKHATIYPTEQELLAVQRAVSHAERALKLVSDTLAEEDRGRREEEGDKRSSVAPQTRVLKGVMRVGILAKGLLLRGDRNVRLALLCSEKPTHSLLRRIAQQLPRQLQMVTEDEYEVSSDPEANIVISSCEEPRMQVTISVTSPLMREDPSTDPGVEEPQADAGDVLSPKKCLESLAALRHARWFQARASGLQPCVIVIRVLRDLCRRVPTWGALPAWAMELLVEKAVSSAAGPLGPGDAVRRVLECVATGTLLTDGPGLQDPCERDQTDALEPMTLQEREDVTASAQHALRMLAFRQTHKVLGMDLLPPRHRLGARFRKRQRGPGEGEEGAGEKKRGRRGGEGLV

SEQ ID NO: 1715 - protein, 1501 aa, Homo sapiens
MAPTWGPGMVSVVGPMGLLVVLLVGGCAAEEPPRFIKEPKDQIGVSGGVASFVCQATGDPKPRVTWNKKGKKVNSQRFETIEFDESAGAVLRIQPLRTPRDENVYECVAQNSVGEITVHAKLTVLREDQLPSGFPNIDMGPQLKVVERTRTATMLCAASGNPDPEITWFKDFLPVDPSASNGRIKQLRSGALQIESSEETDQGKYECVATNSAGVRYSSPANLYVRVRRVAPRFSILPMSHEIMPGGNVNITCVAVGSPMPYVKWMQGAEDLTPEDDMPVGRNVLELTDVKDSANYTCVAMSSLGVIEAVAQITVKSLPKAPGTPMVTENTATSITITWDSGNPDPVSYYVIEYKSKSQDGPYQIKEDITTTRYSIGGLSPNSEYEIWVSAVNSIGQGPPSESVVTRTGEQAPASAPRNVQARMLSATTMIVQWEEPVEPNGLIRGYRVYYTMEPEHPVGNWQKHNVDDSLLTTVGSLLEDETYTVRVLAFTSVGDGPLSDPIQVKTQQGVPGQPMNLRAEARSETSITLSWSPPRQESIIKYELLFREGDHGREVGRTFDPTTSYVVEDLKPNTEYAFRLAARSPQGLGAFTPVVRQRTLQSISPKNFKVKMIMKTSVLLSWEFPDNYNSPTPYKIQYNGLTLDVDGRTTKKLITHLKPHTFYNFVLTNRGSSLGGLQQTVTAWTAFNLLNGKPSVAPKPDADGFIMVYLPDGQSPVPVQSYFIVMVPLRKSRGGQFLTPLGSPEDMDLEELIQDISRLQRRSLRHSRQLEVPRPYIAARFSVLPPTFHPGDQKQYGGFDNRGLEPGHRYVLFVLAVLQKSEPTFAASPFSDPFQLDNPDPQPIVDGEEGLIWVIGPVLAVVFIICIVIAILLYKKKPHSKRKDSEPRTKCLLNNADLAPHHPKDPVEMRRINFQTPGMLSHPPIPIADMAEHTERLKANDSLKLSQEYESIDPGQQFTWEHSNLEVNKPKNRYANVIAYDHSRVILQPIEGIMGSDYINANYVDGYRCQNAYIATQGPLPETFGDFWRMVWEQRSATIVMMTRLEEKSRIKCDQYWPNRGTETYGFIQVTLLDTIELATFCVRTFSLHKNGSSEKREVRQFQFTAWPDHGVPEYPTPFLAFLRRVKTCNPPDAGPIVVHCSAGVGRTGCFIVIDAMLERIKPEKTVDVYGHVTLMRSQRNYMVQTEDQYSFIHEALLEAVGCGNTEVPARSLYAYIQKLAQVEPGEHVTGMELEFKRLANSKAHTSRFISANLPCNKFKNRLVNIMPYESTRVCLQPIRGVEGSDYINASFIDGYRQQKAYIATQGPLAETTEDFWRMLWENNSTIVVMLTKLREMGREKCHQYWPAERSARYQYFVVDPMAEYNMPQYILREFKVTDARDGQSRTVRQFQFTDWPEQGVPKSGEGFIDFIGQVHKTKEQFGQDGPISVHCSAGVGRTGVFITLSIVLERMRYEGVVDIFQTVKMLRTQRPAMVQTEDEYQFCYQAALEYLGSFDHYAT

SEQ ID NO: 1716 - protein, 1236 aa, Homo sapiens
MQPAACAGEGAGPPAPRPPHPPGDKVRRGRGGAPSLSPQPPAPYLGLPIPSRGGGGWRGGQGGGGGTREGGTGRAGGAGSSGSAQPRPPAAPRGPSRPSGRRLLLEPRAPPAPRAPDAMKQLCLCAAASFASQDWGKSDERLLQAVENNDAPRVAALIARKGLVPTKLDPEGKSAFHLAAMRGAASCLEVMIAHGSNVMSADGAGYNALHLAAKYGHPQCLKQLLQASCVVDVVDSSGWTALHHAAAGGCLSCSEVLCSFKAHLNPQDRSGATPLIIAAQMCHTDLCRLLLQQGAAANDQDLQGRTALMLACEGASPETVEVLLQGGAQPGITDALGQDAAHYGALAGDKLILHLLQEAAQRPSPPSALTEDDSGEASSQNSMSSHGKQGAPKKRKAPPPPASIPMPDDRDAYEEIVRLRQERGRLLQKIRGLEQHKERRQQESPEASSLHILERQVQELQQLLVERQEEKESLGREVESLQSRLSLLENERENTSYDVTTLQDEEGELPDLPGAEVLLSRQLSPSAQEHLASLQEQVAVLTRQNQELMEKVQILENFEKDETQMEVEALAEVIPLALYDSLRAEFDQLRRQHAEALQALRQQETREVPREEGAACGESEVAGATATKNGPTHMELNGSVAPETKVNGAETIDEEAAGDETMEARTMEAEATGAEATGAEATGAKVTETKPTGAEVREMETTEEEANMETKPTGAQATDTETTGVEAMGVEATKTKAEEAEMQAYGVGAGQAEPPVTGTTNMEATGSRATGMESTGVSATGVENPGVEATVPGISAGPILHPGAAEASEKLQVELETRIRGLEEALRQREREAAAELEAALGKCEAAEAEAGRLRERVREAEGSGASGGGGGDTTQLRAALEQAREDLRDRDSRLRELEAASACLDEARASRLLAEEEARGLRAELAQREEARLEQSRELEVLREQLATARATGEQQRTAAAELGRARDAAEARVAELPAACEEARQGLAELREASEALRQSVVPASEHRRLQEEALELRGRAASLEQEVVATGKEAARLRAELERERVCSVALSEHERIVGTLQANVAQLEGQLEELGRRHEKTSAEVFQVQREALFMKSERHAAEAQLATAEQQLRGLRTEAERARQAQSRAQEALDKAKEKDKKITELSKEVFNLKEALKEQPAALATPEVEALRDQVKDLQQQLQEAARDHSSVVALYRSHLLYAIQGQMDEDVQRILSQILQMQRLQAQGR

SEQ ID NO: 1717 - protein, 1168 aa, Homo sapiens
MDISTRSKDPGSAERTAQKRKFPSPPHSSNGHSPQDTSTSPIKKKKKPGLLNSNNKEQSELRHGPFYYMKQPLTTDPVDVVPQDGRNDFYCWVCHREGQVLCCELCPRVYHAKCLRLTSEPEGDWFCPECEKITVAECIETQSKAMTMLTIEQLSYLLKFAIQKMKQPGTDAFQKPVPLEQHPDYAEYIFHPMDLCTLEKNAKKKMYGCTEAFLADAKWILHNCIIYNGGNHKLTQIAKVVIKICEHEMNEIEVCPECYLAACQKRDNWFCEPCSNPHPLVWAKLKGFPFWPAKALRDKDGQVDARFFGQHDRAWVPINNCYLMSKEIPFSVKKTKSIFNSAMQEMEVYVENIRRKFGVFNYSPFRTPYTPNSQYQMLLDPTNPSAGTAKIDKQEKVKLNFDMTASPKILMSKPVLSGGTGRRISLSDMPRSPMSTNSSVHTGSDVEQDAEKKATSSHFSASEESMDFLDKSTASPASTKTGQAGSLSGSPKPFSPQLSAPITTKTDKTSTTGSILNLNLDRSKAEMDLKELSESVQQQSTPVPLISPKRQIRSRFQLNLDKTIESCKAQLGINEISEDVYTAVEHSDSEDSEKSDSSDSEYISDDEQKSKNEPEDTEDKEGCQMDKEPSAVKKKPKPTNPVEIKEELKSTSPASEKADPGAVKDKASPEPEKDFSEKAKPSPHPIKDKLKGKDETDSPTVHLGLDSDSESELVIDLGEDHSGREGRKNKKEPKEPSPKQDVVGKTPPSTTVGSHSPPETPVLTRSSAQTSAAGATATTSTSSTVTVTAPAPAATGSPVKKQRPLLPKETAPAVQRVVWNSSTVQQKEITQSPSTSTITLVTSTQSSPLVTSSGSMSTLVSSVNADLPIATASADVAADIAKYTSKMMDAIKGTMTEIYNDLSKNTTGSTIAEIRRLRIEIEKLQWLHQQELSEMKHNLELTMAEMRQSLEQERDRLIAEVKKQLELEKQQAVDETKKKQWCANCKKEAIFYCCWNTSYCDYPCQQAHWPEHMKSCTQSATAPQQEADAEVNTETLNKSSQGSSSSTQSAPSETASASKEKETSAEKSKESGSTLDLSGSRETPSSILLGSNQGSVSKRCDKQPAYAPTTTDHQPHPNYPAQKYHSRSNKSSWSSSDEKRGSTRSDHNTSTSTKSLLPKESRLDTFWD

SEQ ID NO: 1718 - protein, 971 aa, Homo sapiens
MELSDANLQTLTEYLKKTLDPDPAIRRPAEKFLESVEGNQNYPLLLLTLLEKSQDNVIKVCASVTFKNYIKRNWRIVEDEPNKICEADRVAIKANIVHLMLSSPEQIQKQLSDAISIIGREDFPQKWPDLLTEMVNRFQSGDFHVINGVLRTAHSLFKRYRHEFKSNELWTEIKLVLDAFALPLTNLFKATIELCSTHANDASALRILFSSLILISKLFYSLNFQDLPEFFEDNMETWMNNFHTLLTLDNKLLQTDDEEEAGLLELLKSQICDNAALYAQKYDEEFQRYLPRFVTAIWNLLVTTGQEVKYDLLVSNAIQFLASVCERPHYKNLFEDQNTLTSICEKVIVPNMEFRAADEEAFEDNSEEYIRRDLEGSDIDTRRRAACDLVRGLCKFFEGPVTGIFSGYVNSMLQEYAKNPSVNWKHKDAAIYLVTSLASKAQTQKHGITQANELVNLTEFFVNHILPDLKSANVNEFPVLKADGIKYIMIFRNQVPKEHLLVSIPLLINHLQAESIVVHTYAAHALERLFTMRGPNNATLFTAAEIAPFVEILLTNLFKALTLPGSSENEYIMKAIMRSFSLLQEAIIPYIPTLITQLTQKLLAVSKNPSKPHFNHYMFEAICLSIRITCKANPAAVVNFEEALFLVFTEILQNDVQEFIPYVFQVMSLLLETHKNDIPSSYMALFPHLLQPVLWERTGNIPALVRLLQAFLERGSNTIASAAADKIPGLLGVFQKLIASKANDHQGFYLLNSIIEHMPPESVDQYRKQIFILLFQRLQNSKTTKFIKSFLVFINLYCIKYGALALQEIFDGIQPKMFGMVLEKIIIPEIQKVSGNVEKKICAVGITKLLTECPPMMDTEYTKLWTPLLQSLIGLFELPEDDTIPDEEHFIDIEDTPGYQTAFSQLAFAGKKEHDPVGQMVNNPKIHLAQSLHKLSTACPGRVPSMVSTSLNAEALQYLQGYLQAASVTLL

SEQ ID NO: 1719 - protein, 924 aa, Homo sapiens
MEIKEEGASEEGQHFLPTAQANDPGDCQFTSIQKTPNEPQLEFILACKDLVAPVRDRKLNTLVQISVIHPVEQSLTRYSSTEIVEGTRDPLFLTGVTFPSEYPIYEETKIKLTVYDVKDKSHDTVRTSVLPEHKDPPPEVGRSFLGYASFKVGELLKSKEQLLVLSLRTSDGGKVVGTIEVSVVKMGEIEDGEADHITTDVQGQKCALVCECTAPESVSGKDNLPFLNSVLKNPVCKLYRFPTSDNKWMRIREQMSESILSFHIPKELISLHIKEDLCRNQEIKELGELSPHWDNLRKNVLTHCDQMVNMYQDILTELSKETGSSFKSSSSKGEKTLEFVPINLHLQRMQVHSPHLKDALYDVITVGAPAAHFQGFKNGGLRKLLHRFETERRNTGYQFIYYSPENTAKAKEVLSNINQLQPLIATHADLLLNSASQHSPDSLKNSLKMLSEKTELFVHAFKDQLVRSALLALYTARPGGILKKPPSPKSSTEESSPQDQPPVMRGQDSIPHHSDYDEEEWDRVWANVGKSLNCIIAMVDKLIERDGGSEGSGGNNDGEKEPSLTDAIPSHPREDWYEQLYPLILTLKDCMGEVVNRAKQSLTFVLLQELAYSLPQCLMLTLRRDIVFSQALAGLVCGFIIKLQTSLYDPGFLQQLHTVGLIVQYEGLLSTYSDEIGMLEDMAVGISDLKKVAFKIIEAKSNDVLPVITGRREHYVVEVKLPARMFESLPLQIKEGQLLHVYPVLFNVGINEQQTLAERFGDVSLQESINQENFELLQEYYKIFMEKMPPDYISHFQEQNDLKALLENLLQNIQSKKRKNVEIMWLAATICRKLNGIRFTCCKSAKDRTSMSVTLEQCSILRDEHQLHKDFFIRALDCMRREGCRIENVLKNIKCRKYAFNMLQLMAFPKYYRPPEGTYGKADT

SEQ ID NO: 1720 - protein, 694 aa, Homo sapiens
MSGGEVVCSGWLRKSPPEKKLKRYAWKRRWFVLRSGRLTGDPDVLEYYKNDHAKKPIRIIDLNLCQQVDAGLTFNKKEFENSYIFDINTIDRIFYLVADSEEEMNKWVRCICDICGFNPTEEDPVKPPGSSLQAPADLPLAINTAPPSTQADSSSATLPPPYQLINVPPHLETLGIQEDPQDYLLLINCQSKKPEPTRTHADSAKSTSSETDCNDNVPSHKNPASSQSKHGMNGFFQQQMIYDSPPSRAPSASVDSSLYNLPRSYSHDVLPKVSPSSTEADGELYVFNTPSGTSSVETQMRHVSISYDIPPTPGNTYQIPRTFPEGTLGQTSKLDTIPDIPPPRPPKPHPAHDRSPVETCSIPRTASDTDSSYCIPTAGMSPSRSNTISTVDLNKLRKDASSQDCYDIPRAFPSDRSSSLEGFHNHFKVKNVLTVGSVSSEELDENYVPMNPNSPPRQHSSSFTEPIQEANYVPMTPGTFDFSSFGMQVPPPAHMGFRSSPKTPPRRPVPVADCEPPPVDRNLKPDRKVKPAPLEIKPLPEWEELQAPVRSPITRSFARDSSRFPMSPRPDSVHSTTSSSDSHDSEENYVPMNPNLSSEDPNLFGSNSLDGGSSPMIKPKGDKQVEYLDLDLDSGKSTPPRKQKSSGSGSSVADERVDYVVVDQQKTLALKSTREAWTDGRQSTESETPAKSVK

SEQ ID NO: 1721 - protein, 724 aa, Homo sapiens
MSGGEVVCSGWLRKSPPEKKLKRYAWKRRWFVLRSGRLTGDPDVLEYYKNDHAKKPIRIIDLNLCQQVDAGLTFNKKEFENSYIFDINTIDRIFYLVADSEEEMNKWVRCICDICGFNPTEEDPVKPPGSSLQAPADLPLAINTAPPSTQADSSSATLPPPYQLINVPPHLETLGIQEDPQDYLLLINCQSKKPEPTRTHADSAKSTSSETDCNDNVPSHKNPASSQSKHGMNGFFQQQMIYDSPPSRAPSASVDSSLYNLPRSYSHDVLPKVSPSSTEADGELYVFNTPSGTSSVETQMRHVSISYDIPPTPGNTYQIPRTFPEGTLGQTSKLDTIPDIPPPRPPKPHPAHDRSPVETCSIPRTASDTDSSYCIPTAGMSPSRSNTISTVDLNKLRKDASSQDCYDIPRAFPSDRSSSLEGFHNHFKVKNVLTVGSVSSEELDENYVPMNPNSPPRQHSSSFTEPIQEANYVPMTPGTFDFSSFGMQVPPPAHMGFRSSPKTPPRRPVPVADCEPPPVDRNLKPDRKGQSPKILRLKPHGLERTDSQTIGDFATRRKVKPAPLEIKPLPEWEELQAPVRSPITRSFARDSSRFPMSPRPDSVHSTTSSSDSHDSEENYVPMNPNLSSEDPNLFGSNSLDGGSSPMIKPKGDKQVEYLDLDLDSGKSTPPRKQKSSGSGSSVADERVDYVVVDQQKTLALKSTREAWTDGRQSTESETPAKSVK

SEQ ID NO: 1722 - protein, 725 aa, Homo sapiens
MADEDLIFRLEGVDGGQSPRAGHDGDSDGDSDDEEGYFICPITDDPSSNQNVNSKVNKYYSNLTKSERYSSSGSPANSFHFKEAWKHAIQKAKHMPDPWAEFHLEDIATERATRHRYNAVTGEWLDDEVLIKMASQPFGRGAMRECFRTKKLSNFLHAQQWKGASNYVAKRYIEPVDRDVYFEDVRLQMEAKLWGEEYNRHKPPKQVDIMQMCIIELKDRPGKPLFHLEHYIEGKYIKYNSNSGFVRDDNIRLTPQAFSHFTFERSGHQLIVVDIQGVGDLYTDPQIHTETGTDFGDGNLGVRGMALFFYSHACNRICESMGLAPFDLSPRERDAVNQNTKLLQSAKTILRGTEEKCGSPQVRTLSGSRPPLLRPLSENSGDENMSDVTFDSLPSSPSSATPHSQKLDHLHWPVFSDLDNMASRDHDHLDNHRESENSGDSGYPSEKRGELDDPEPREHGHSYSNRKYESDEDSLGSSGRVCVEKWNLLNSSRLHLPRASAVALEVQRLNALDLEKKIGKSILGKVHLAMVRYHEGGRFCEKGEEWDQESAVFHLEHAANLGELEAIVGLGLMYSQLPHHILADVSLKETEENKTKGFDYLLKAAEAGDRQSMILVARAFDSGQNLSPDRCQDWLEALHWYNTALEMTDCDEGGEYDGMQDEPRYMMLAREAEMLFTGGYGLEKDPQRSGDLYTQAAEAAMEAMKGRLANQYYQKAEEAWAQMEE

SEQ ID NO: 1723 - protein, 919 aa, Homo sapiens
MASATAAAARRGLGRALPLFWRGYQTERGVYGYRPRKPESREPQGALERPPVDHGLARLVTVYCEHGHKAAKINPLFTGQALLENVPEIQALVQTLQGPFHTAGLLNMGKEEASLEEVLVYLNQIYCGQISIETSQLQSQDEKDWFAKRFEELQKETFTTEERKHLSKLMLESQEFDHFLATKFSTVKRYGGEGAESMMGFFHELLKMSAYSGITDVIIGMPHRGRLNLLTGLLQFPPELMFRKMRGLSEFPENFSATGDVLSHLTSSVDLYFGAHHPLHVTMLPNPSHLEAVNPVAVGKTRGRQQSRQDGDYSPDNSAQPGDRVICLQVHGDASFCGQGIVPETFTLSNLPHFRIGGSVHLIVNNQLGYTTPAERGRSSLYCSDIGKLVGCAIIHVNGDSPEEVVRATRLAFEYQRQFRKDVIIDLLCYRQWGHNELDEPFYTNPIMYKIIRARKSIPDTYAEHLIAGGLMTQEEVSEIKSSYYAKLNDHLNNMAHYRPPALNLQAHWQGLAQPEAQITTWSTGVPLDLLRFVGMKSVEVPRELQMHSHLLKTHVQSRMEKMMDGIKLDWATAEALALGSLLAQGFNVRLSGQDVGRGTFSQRHAIVVCQETDDTYIPLNHMDPNQKGFLEVSNSPLSEEAVLGFEYGMSIESPKLLPLWEAQFGDFFNGAQIIFDTFISGGEAKWLLQSGIVILLPHGYDGAGPDHSSCRIERFLQMCDSAEEGVDGDTVNMFVVHPTTPAQYFHLLRRQMVRNFRKPLIVASPKMLLRLPAAVSTLQEMAPGTTFNPVIGDSSVDPKKVKTLVFCSGKHFYSLVKQRESLGAKKHDFAIIRVEELCPFPLDSLQQEMSKYKHVKDHIWSQEEPQNMGPWSFVSPRFEKQLACKLRLVGRPPLPVPAVGIGTVHLHQHEDILAKTFA

SEQ ID NO: 1724 - protein, 577 aa, Homo sapiens
MSHQPLSCLTEKEDSPSESTGNGPPHLAHPNLDTFTPEELLQQMKELLTENHQLKEAMKLNNQAMKGRFEELSAWTEKQKEERQFFEIQSKEAKERLMALSHENEKLKEELGKLKGKSERSSEDPTDDSRLPRAEAEQEKDQLRTQVVRLQAEKADLLGIVSELQLKLNSSGSSEDSFVEIRMAEGEAEGSVKEIKHSPGPTRTVSTGTALSKYRSRSADGAKNYFEHEELTVSQLLLCLREGNQKVERLEVALKEAKERVSDFEKKTSNRSEIETQTEGSTEKENDEEKGPETVGSEVEALNLQVTSLFKELQEAHTKLSEAELMKKRLQEKCQALERKNSAIPSELNEKQELVYTNKKLELQVESMLSEIKMEQAKTEDEKSKLTVLQMTHNKLLQEHNNALKTIEELTRKESEKVDRAVLKELSEKLELAEKALASKQLQMDEMKQTIAKQEEDLETMTILRAQMEVYCSDFHAERAAREKIHEEKEQLALQLAVLLKENDAFEDGGRQSLMEMQSRHGARTSDSDQQAYLVQRGAEDRDWRQQRNIPIHSCPKCGEVLPDIDTLQIHVMDCII

SEQ ID NO: 1725 - protein, 338 aa, Homo sapiens
MEQLRAAARLQIVLGHLGRPSAGAVVAHPTSGTISSASFHPQQFQYTLDNNVLTLEQRKFYEENGFLVIKNLVPDADIQRFRNEFEKICRKEVKPLGLTVMRDVTISKSEYAPSEKMITKVQDFQEDKELFRYCTLPEILKYVECFTGPNIMAMHTMLINKPPDSGKKTSRHPLHQDLHYFPFRPSDLIVCAWTAMEHISRNNGCLVVLPGTHKGSLKPHDYPKWEGGVNKMFHGIQDYEENKARVHLVMEKGDTVFFHPLLIHGSGQNKTQGFRKAISCHFASADCHYIDVKGTSQENIEKEVVGIAHKFFGAENSVNLKDIWMFRARLVKGERTNL

SEQ ID NO: 1726 - protein, 1168 aa, Homo sapiens
MGKVGAGGGSQARLSALLAGAGLLILCAPGVCGGGSCCPSPHPSSAPRSASTPRGFSHQGRPGRAPATPLPLVVRPLFSVAPGDRALSLERARGTGASMAVAARSGRRRRSGADQEKAERGEGASRSPRGVLRDGGQQEPGTRERDPDKATRFRMEELRLTSTTFALTGDSAHNQAMVHWSGHNSSVILILTKLYDYNLGSITESSLWRSTDYGTTYEKLNDKVGLKTILSYLYVCPTNKRKIMLLTDPEIESSLLISSDEGATYQKYRLNFYIQSLLFHPKQEDWILAYSQDQKLYSSAEFGRRWQLIQEGVVPNRFYWSVMGSNKEPDLVHLEARTVDGHSHYLTCRMQNCTEANRNQPFPGYIDPDSLIVQDHYVFVQLTSGGRPHYYVSYRRNAFAQMKLPKYALPKDMHVISTDENQVFAAVQEWNQNDTYNLYISDTRGVYFTLALENVQSSRGPEGNIMIDLYEVAGIKGMFLANKKIDNQVKTFITYNKGRDWRLLQAPDTDLRGDPVHCLLPYCSLHLHLKVSENPYTSGIIASKDTAPSIIVASGNIGSELSDTDISMFVSSDAGNTWRQIFEEEHSVLYLDQGGVLVAMKHTSLPIRHLWLSFDEGRSWSKYSFTSIPLFVDGVLGEPGEETLIMTVFGHFSHRSEWQLVKVDYKSIFDRRCAEEDYRPWQLHSQGEACIMGAKRIYKKRKSERKCMQGKYAGAMESEPCVCTEADFDCDYGYERHSNGQCLPAFWFNPSSLSKDCSLGQSYLNSTGYRKVVSNNCTDGVREQYTAKPQKCPGKAPRGLRIVTADGKLTAEQGHNVTLMVQLEEGDVQRTLIQVDFGDGIAVSYVNLSSMEDGIKHVYQNVGIFRVTVQVDNSLGSDSAVLYLHVTCPLEHVHLSLPFVTTKNKEVNATAVLWPSQVGTLTYVWWYGNNTEPLITLEGSISFRFTSEGMNTITVQVSAGNAILQDTKTIAVYEEFRSLRLSFSPNLDDYNPDIPEWRRDIGRVIKKSLVEATGVPGQHILVAVLPGLPTTAELFVLPYQDPAGENKRSTDDLEQISELLIHTLNQNSVHFELKPGVRVLVHAAHLTAAPLVDLTPTHSGSAMLMLLSVVFVGLAVFVIYKFKRRVALPSPPSPSTQPGDSSLRLQRARHATPPSTPKRGSAGAQYAI

SEQ ID NO: 1727 - protein, 836 aa, Homo sapiens
MSKLSFRARALDASKPLPVFRCEDLPDLHEYASINRAVPQMPTGMEKEEESEHHLQRAISAQQVYGEKRDNMVIPVPEAESNIAYYESIYPGEFKMPKQLIHIQPFSLDAEQPDYDLDSEDEVFVNKLKKKMDICPLQFEEMIDRLEKGSGQQPVSLQEAKLLLKEDDELIREVYEYWIKKRKNCRGPSLIPSVKQEKRDGSSTNDPYVAFRRRTEKMQTRKNRKNDEASYEKMLKLRRDLSRAVTILEMIKRREKSKRELLHLTLEIMEKRYNLGDYNGEIMSEVMAQRQPMKPTYAIPIIPITNSSQFKHQEAMDVKEFKVNKQDKADLIRPKRKYEKKPKVLPSSAAATPQQTSPAALPVFNAKDLNQYDFPSSDEEPLSQVLSGSSEAEEDNDPDGPFAFRRKAGCQYYAPHLDQTGNWPWTSPKDGGLGDVRYRYCLTTLTVPQRCIGFARRRVGRGGRVLLDRAHSDYDSVFHHLDLEMLSSPQHSPVNQFANTSETNTSDKSFSKDLSQILVNIKSCRWRHFRPRTPSLHDSDNDELSCRKLYRSINRTGTAQPGTQTCSTSTQSKSSSGSAHFAFTAEQYQQHQQQLALMQKQQLAQIQQQQANSNSSTNTSQNLASNQQKSGFRLNIQGLERTLQGFVSKTLDSASAQFAASALVTSEQLMGFKMKDDVVLGIGVNGVLPASGVYKGLHLSSTTPTALVHTSPSTAGSALLQPSNITQTSSSHSALSHQVTAANSATTQVLIGNNIRLTVPSSVATVNSIAPINARHIPRTLSAVPSSALKLAAAANCQVSKVPSSSSVDSVPRENHESEKPALNNIADNTVAMEVT

SEQ ID NO: 1728 - protein, 582 aa, Homo sapiens
MAVPGVGLLTRLNLCARRRTRVQRPIVRLLSCPGTVAKDLRRDEQPSGSVETGFEDKIPKRRFSEMQNERREQAQRTVLIHCPEKISENKFLKYLSQFGPINNHFFYESFGLYAVVEFCQKESIGSLQNGTHTPSTAMETAIPFRSRFFNLKLKNQTSERSRVRSSNQLPRSNKQLFELLCYAESIDDQLNTLLKEFQLTEENTKLRYLTCSLIEDMAAAYFPDCIVRPFGSSVNTFGKLGCDLDMFLDLDETRNLSAHKISGNFLMEFQVKNVPSERIATQKILSVLGECLDHFGPGCVGVQKILNARCPLVRFSHQASGFQCDLTTNNRIALTSSELLYIYGALDSRVRALVFSVRCWARAHSLTSSIPGAWITNFSLTMMVIFFLQRRSPPILPTLDSLKTLADAEDKCVIEGNNCTFVRDLSRIKPSQNTETLELLLKEFFEYFGNFAFDKNSINIRQGREQNKPDSSPLYIQNPFETSLNISKNVSQSQLQKFVDLARESAWILQQEDTDRPSISSNRPWGLVSLLLPSAPNRKSFTKKKSNKFAIETVKNLLESLKGNRTENFTKTSGKRTISTQT

SEQ ID NO: 1729 - protein, 402 aa, Homo sapiens
MDLDRASLDLMIRLLELEQDASSAKLLNEKDMNKIKEKIRRLCETVHNKHLDLENITTGHLAMETLLSLTSKRAGDWFKEELRLLGGLDHIVDKVKECVDHLSRDEDEEKLVASLWGAERCLRVLESVTVHNPENQSYLIAYKDSQLIVSSAKALQHCEELIQQYNRAEDSICLADSKPLPHQNVTNHVGKAVEDCMRAIIGVLLNLTNDNEWGSTKTGEQDGLIGTALNCVLQVPKYLPQEQRFDIRVLLFLERERAAQLAESKTDELIKDAPTTQHDKSGEWQETSGEIQWVSTEKTDGTEEKHKKEEEDEELDLNKALQHAGKHMEDCIVASYTALLLGCLCQESPINVTTVREYLPEGDFSIMTEMLKKFLSFMNLTCAVGTTGQKSISRVIEYLEHC

SEQ ID NO: 1730 - protein, 830 aa, Homo sapiens
MGLGLLLPLLLLWTRGTQGSELDPKGQHVCVASSPSAELQCCAGWRQKDQECTIPICEGPDACQKDEVCVKPGLCRCKPGFFGAHCSSRCPGQYWGPDCRESCPCHPHGQCEPATGACQCQADRWGARCEFPCACGPHGRCDPATGVCHCEPGWWSSTCRRPCQCNTAAARCEQATGACVCKPGWWGRRCSFRCNCHGSPCEQDSGRCACRPGWWGPECQQQCECVRGRCSAASGECTCPPGFRGARCELPCPAGSHGVQCAHSCGRCKHNEPCSPDTGSCESCEPGWNGTQCQQPCLPGTFGESCEQQCPHCRHGEACEPDTGHCQRCDPGWLGPRCEDPCPTGTFGEDCGSTCPTCVQGSCDTVTGDCVCSAGYWGPSCNASCPAGFHGNNCSVPCECPEGLCHPVSGSCQPGSGSRDTALIAGSLVPLLLLFLGLACCACCCWAPRSDLKDRPARDGATVSRMKLQVWGTLTSLGSTLPCRSLSSHKLPWVTVSHHDPEVPFNHSFIEPPSAGWATDDSFSSDPESGEADEVPAYCVPPQEGMVPVAQAGSSEASLAAGAFPPPEDASTPFAIPRTSSLARAKRPSVSFAEGTKFAPQSRRSSGELSSPLRKPKRLSRGAQSGPEGREAEESTGPEEAEAPESFPAAASPGDSATGHRRPPLGGRTVAEHVEAIEGSVQESSGPVTTIYMLAGKPRGSEGPVRSVFRHFGSFQKGQAEAKVKRAIPKPPRQALNRKKGSPGLASGSVGQSPNSAPKAGLPGATGPMAVRPEEAVRGLGAGTESSRRAQEPVSGCGSPEQDPQKQAEEERQEEPEYENVVPISRPPEP

SEQ ID NO: 1731 - protein, 1419 aa, Homo sapiens
MAEGLERVRISASELRGILATLAPQAGSRENMKELKEARPRKDNRRPDLEIYKPGLSRLRNKPKIKEPPGSEEFKDEIVNDRDCSAVENGTQPVKDVCKELNNQEQNGPIDPENNRGQESFPRTAGQEDRSLKIIKRTKKPDLQIYQPGRRLQTVSKESASRVEEEEVLNQVEQLRVEEDECRGNVAKEEVANKPDRAEIEKSPGGGRVGAAKGEKGKRMGKGEGVRETHDDPARGRPGSAKRYSRSDKRRNRYRTRSTSSAGSNNSAEGAGLTDNGCRRRRQDRTKERPRLKKQVSVSSTDSLDEDRIDEPDGLGPRRSSERKRHLERNWSGRGEGEQKNSAKEYRGTLRVTFDAEAMNKESPMVRSARDDMDRGKPDKGLSSGGKGSEKQESKNPKQELRGRGRGILILPAHTTLSVNSAGSPESAPLGPRLLFGSGSKGSRSWGRGGTTRRLWDPNNPDQKPALKTQTPQLHFLDTDDEVSPTSWGDSRQAQASYYKFQNSDNPYYYPRTPGPASQYPYTGYNPLQYPVGPTNGVYPGPYYPGYPTPSGQYVCSPLPTSTMSPEEVEQHMRNLQQQELHRLLRVADNQELQLSNLLSRDRISPEGLEKMAQLRAELLQLYERCILLDIEFSDNQNVDQILWKNAFYQVIEKFRQLVKDPNVENPEQIRNRLLELLDEGSDFFDSLLQKLQVTYKFKLEDYMDGLAIRSKPLRKTVKYALISAQRCMICQGDIARYREQASDTANYGKARSWYLKAQHIAPKNGRPYNQLALLAVYTRRKLDAVYYYMRSLAASNPILTAKESLMSLFEETKRKAEQMEKKQHEEFDLSPDQWRKGKKSTFRHVGDDTTRLEIWIHPSHPRSSQGTESGKDSEQENGLGSLSPSDLNKRFILSFLHAHGKLFTRIGMETFPAVAEKVLKEFQVLLQHSPSPIGSTRMLQLMTINMFAVHNSQLKDCFSEECRSVIQEQAAALGLAMFSLLVRRCTCLLKESAKAQLSSPEDQDDQDDIKVSSFVPDLKELLPSVKVWSDWMLGYPDTWNPPPTSLDLPSHVAVDVWSTLADFCNILTAVNQSEVPLYKDPDDDLTLLILEEDRLLSGFVPLLAAPQDPCYVEKTSDKVIAADCKRVTVLKYFLEALCGQEEPLLAFKGGKYVSVAPVPDTMGKEMGSQEGTRLEDEEEDVVIEDFEEDSEAEGSGGEDDIRELRAKKLALARKIAEQQRRQEKIQAVLEDHSQMRQMELEIRPLFLVPDTNGFIDHLASLARLLESRKYILVVPLIVINELDGLAKGQETDHRAGGYARVVQEKARKSIEFLEQRFESRDSCLRALTSRGNELESIAFRSEDITGQLGNNDDLILSCCLHYCKDKAKDFMPASKEEPIRLLREVVLLTDDRNLRVKALTRNVPVRDIPAFLTWAQVG

SEQ ID NO: 1732 - protein, 438 aa, Homo sapiens
MAALVVSGAAEQGGRDGPGRGRAPRGRVANQIPPEILKNPQLQAAIRVLPSNYNFEIPKTIWRIQQAQAKKVALQMPEGLLLFACTIVDILERFTEAEVMVMGDVTYGACCVDDFTARALGADFLVHYGHSCLIPMDTSAQDFRVLYVFVDIRIDTTHLLDSLRLTFPPATALALVSTIQFVSTLQAAAQELKAEYRVSVPQCKPLSPGEILGCTSPRLSKEVEAVVYLGDGRFHLESVMIANPNVPAYRYDPYSKVLSREHYDHQRMQAARQEAIATARSAKSWGLILGTLGRQGSPKILEHLESRLRALGLSFVRLLLSEIFPSKLSLLPEVDVWVQVACPRLSIDWGTAFPKPLLTPYEAAVALRDISWQQPYPMDFYAGSSLGPWTVNHGQDRRPHAPGRPARGKVQEGSARPPSAVACEDCSCRDEKVAPLAP

SEQ ID NO: 1733 - protein, 1179 aa, Homo sapiens
MWLFHTLLCIASLALLAAFNVDVARPWLTPKGGAPFVLSSLLHQDPSTNQTWLLVTSPRTKRTPGPLHRCSLVQDEILCHPVEHVPIPKGRHRGVTVVRSHHGVLICIQVLVRRPHSLSSELTGTCSLLGPDLRPQAQANFFDLENLLDPDARVDTGDCYSNKEGGGEDDVNTARQRRALEKEEEEDKEEEEDEEEEEAGTEIAIILDGSGSIDPPDFQRAKDFISNMMRNFYEKCFECNFALVQYGGVIQTEFDLRDSQDVMASLARVQNITQVGSVTKTASAMQHVLDSIFTSSHGSRRKASKVMVVLTDGGIFEDPLNLTTVINSPKMQGVERFAIGVGEEFKSARTARELNLIASDPDETHAFKVTNYMALDGLLSKLRYNIISMEGTVGDALHYQLAQIGFSAQILDERQVLLGAVGAFDWSGGALLYDTRSRRGRFLNQTAAAAADAEAAQYSYLGYAVAVLHKTCSLSYIAGAPRYKHHGAVFELQKEGREASFLPVLEGEQMGSYFGSELCPVDIDMDGSTDFLLVAAPFYHVHGEEGRVYVYRLSEQDGSFSLARILSGHPGFTNARFGFAMAAMGDLSQDKLTDVAIGAPLEGFGADDGASFGSVYIYNGHWDGLSASPSQRIRASTVAPGLQYFGMSMAGGFDISGDGLADITVGTLGQAVVFRSRPVVRLKVSMAFTPSALPIGFNGVVNVRLCFEISSVTTASESGLREALLNFTLDVDVGKQRRRLQCSDVRSCLGCLREWSSGSQLCEDLLLMPTEGELCEEDCFSNASVKVSYQLQTPEGQTDHPQPILDRYTEPFAIFQLPYEKACKNKLFCVAELQLATTVSQQELVVGLTKELTLNINLTNSGEDSYMTSMALNYPRNLQLKRMQKPPSPNIQCDDPQPVASVLIMNCRIGHPVLKRSSAHVSVVWQLEENAFPNRTADITVTVTNSNERRSLANETHTLQFRHGFVAVLSKPSIMYVNTGQGLSHHKEFLFHVHGENLFGAEYQLQICVPTKLRGLQVVAVKKLTRTQASTVCTWSQERACAYSSVQHVEEWHSVSCVIASDKENVTVAAEISWDHSEELLKDVTELQILGEISFNKSLYEGLNAENHRTKITVVFLKDEKYHSLPIIIKGSVGGLLVLIVILVILFKCGFFKRKYQQLNLESIRKAQLKSENLLEEEN

SEQ ID NO: 1734 - protein, 933 aa, Homo sapiens
MTATPESLFPTGDELDSSQLQMESDEVDTLKEGEDPADRMHPFLAIYELQSLKVHPLVFAPGVPVTAQVVGTERYTSGSKVGTCTLYSVRLTHGDFSWTTKKKYRHFQELHRDLLRHKVLMSLLPLARFAVAYSPARDAGNREMPSLPRAGPEGSTRHAASKQKYLENYLNRLLTMSFYRNYHAMTEFLEVSQLSFIPDLGRKGLEGMIRKRSGGHRVPGLTCCGRDQVCYRWSKRWLVVKDSFLLYMCLETGAISFVQLFDPGFEVQVGKRSTEARHGVRIDTSHRSLILKCSSYRQARWWAQEITELAQGPGRDFLQLHRHDSYAPPRPGTLARWFVNGAGYFAAVADAILRAQEEIFITDWWLSPEVYLKRPAHSDDWRLDIMLKRKAEEGVRVSILLFKEVELALGINSGYSKRALMLLHPNIKVMRHPDQVTLWAHHEKLLVVDQVVAFLGGLDLAYGRWDDLHYRLTDLGDSSESAASQPPTPRPDSPATPDLSHNQFFWLGKDYSNLITKDWVQLDRPFEDFIDRETTPRMPWRDVGVVVHGLPARDLARHFIQRWNFTKTTKAKYKTPTYPYLLPKSTSTANQLPFTLPGGQCTTVQVLRSVDRWSAGTLENSILNAYLHTIRESQHFLYIENQFFISCSDGRTVLNKVGDEIVDRILKAHKQGWCYRVYVLLPLLPGFEGDISTGGGNSIQAILHFTYRTLCRGEYSILHRLKAAMGTAWRDYISICGLRTHGELGGHPVSELIYIHSKVLIADDRTVIIGSANINDRSLLGKRDSELAVLIEDTETEPSLMNGAEYQAGRFALSLRKHCFGVILGANTRPDLDLRDPICDDFFQLWQDMAESNANIYEQIFRCLPSNATRSLRTLREYVAVEPLATVSPPLARSELTQVQGHLVHFPLKFLEDESLLPPLGSKEGMIPLEVWT

SEQ ID NO: 1735 - protein, 2146 aa, Homo sapiens
MAFWTQLMLLLWKNFMYRRRQPVQLLVELLWPLFLFFILVAVRHSHPPLEHHECHFPNKPLPSAGTVPWLQGLICNVNNTCFPQLTPGEEPGRLSNFNDSLVSRLLADARTVLGGASAHRTLAGLGKLIATLRAARSTAQPQPTKQSPLEPPMLDVAELLTSLLRTESLGLALGQAQEPLHSLLEAAEDLAQELLALRSLVELRALLQRPRGTSGPLELLSEALCSVRGPSSTVGPSLNWYEASDLMELVGQEPESALPDSSLSPACSELIGALDSHPLSRLLWRRLKPLILGKLLFAPDTPFTRKLMAQVNRTFEELTLLRDVREVWEMLGPRIFTFMNDSSNVAMLQRLLQMQDEGRRQPRPGGRDHMEALRSFLDPGSGGYSWQDAHADVGHLVGTLGRVTECLSLDKLEAAPSEAALVSRALQLLAEHRFWAGVVFLGPEDSSDPTEHPTPDLGPGHVRIKIRMDIDVVTRTNKIRDRFWDPGPAADPLTDLRYVWGGFVYLQDLVERAAVRVLSGANPRAGLYLQQMPYPCYVDDVFLRVLSRSLPLFLTLAWIYSVTLTVKAVVREKETRLRDTMRAMGLSRAVLWLGWFLSCLGPFLLSAALLVLVLKLGDILPYSHPGVVFLFLAAFAVATVTQSFLLSAFFSRANLAAACGGLAYFSLYLPYVLCVAWRDRLPAGGRVAASLLSPVAFGFGCESLALLEEQGEGAQWHNVGTRPTADVFSLAQVSGLLLLDAALYGLATWYLEAVCPGQYGIPEPWNFPFRRSYWCGPRPPKSPAPCPTPLDPKVLVEEAPPGLSPGVSVRSLEKRFPGSPQPALRGLSLDFYQGHITAFLGHNGAGKTTTLSILSGLFPPSGGSAFILGHDVRSSMAAIRPHLGVCPQYNVLFDMLTVDEHVWFYGRLKGLSAAVVGPEQDRLLQDVGLVSKQSVQTRHLSGGMQRKLSVAIAFVGGSQVVILDEPTAGVDPASRRGIWELLLKYREGRTLILSTHHLDEAELLGDRVAVVAGGRLCCCGSPLFLRRHLGSGYYLTLVKARLPLTTNEKADTDMEGSVDTRQEKKNGSQGSRVGTPQLLALVQHWVPGARLVEELPHELVLVLPYTGAHDGSFATLFRELDTRLAELRLTGYGISDTSLEEIFLKVVEECAADTDMEDGSCGQHLCTGIAGLDVTLRLKMPPQETALENGEPAGSAPETDQGSGPDAVGRVQGWALTRQQLQALLLKRFLLARRSRRGLFAQIVLPALFVGLALVFSLIVPPFGHYPALRLSPTMYGAQVSFFSEDAPGDPGRARLLEALLQEAGLEEPPVQHSSHRFSAPEVPAEVAKVLASGNWTPESPSPACQCSRPGARRLLPDCPAAAGGPPPPQAVTGSGEVVQNLTGRNLSDFLVKTYPRLVRQGLKTKKWVNEVRYGGFSLGGRDPGLPSGQELGRSVEELWALLSPLPGGALDRVLKNLTAWAHSLDAQDSLKIWFNNKGWHSMVAFVNRASNAILRAHLPPGPARHAHSITTLNHPLNLTKEQLSEGALMASSVDVLVSICVVFAMSFVPASFTLVLIEERVTRAKHLQLMGGLSPTLYWLGNFLWDMCNYLVPACIVVLIFLAFQQRAYVAPANLPALLLLLLLYGWSITPLMYPASFFFSVPSTAYVVLTCINLFIGINGSMATFVLELFSDQKLQEVSRILKQVFLIFPHFCLGRGLIDMVRNQAMADAFERLGDRQFQSPLRWEVVGKNLLAMVIQGPLFLLFTLLLQHRSQLLPQPRVRSLPLLGEEDEDVARERERVVQGATQGDVLVLRNLTKVYRGQRMPAVDRLCLGIPPGECFGLLGVNGAGKTSTFRMVTGDTLASRGEAVLAGHSVAREPSAAHLSMGYCPQSDAIFELLTGREHLELLARLRGVPEAQVAQTAGSGLARLGLSWYADRPAGTYSGGNKRKLATALALVGDPAVVFLDEPTTGMDPSARRFLWNSLLAVVREGRSVMLTSHSMEECEALCSRLAIMVNGRFRCLGSPQHLKGRFAAGHTLTLRVPAARSQPAAAFVAAEFPGAELREAHGGRLRFQLPPGGRCALARVFGELAVHGAEHGVEDFSVSQTMLEEVFLYFSKDQGKDEDTEEQKEAGVGVDPAPGLQHPKRVSQFLDDPSTAETVL

SEQ ID NO: 1736 - protein, 627 aa, Homo sapiens
MAAAVLTDRAQVSVTFDDVAVTFTKEEWGQLDLAQRTLYQEVMLENCGLLVSLGCPVPKAELICHLEHGQEPWTRKEDLSQDTCPGDKGKPKTTEPTTCEPALSEGISLQGQVTQGNSVDSQLGQAEDQDGLSEMQEGHFRPGIDPQEKSPGKMSPECDGLGTADGVCSRIGQEQVSPGDRVRSHNSCESGKDPMIQEEENNFKCSECGKVFNKKHLLAGHEKIHSGVKPYECTECGKTFIKSTHLLQHHMIHTGERPYECMECGKAFNRKSYLTQHQRIHSGEKPYKCNECGKAFTHRSNFVLHNRRHTGEKSFVCTECGQVFRHRPGFLRHYVVHSGENPYECLECGKVFKHRSYLMWHQQTHTGEKPYECSECGKVFLESAALIHHYVIHTGEKPFECLECGKAFNHRSYLKRHQRIHTGEKPFVCSECGKAFTHCSTFILHKRAHTGEKPFECKECGKAFSNRKDLIRHFSIHTGEKPYECVECGKAFTRMSGLTRHKRIHSGEKPYECVECGKSFCWSTNLIRHAIIHTGEKPYKCSECGKAFSRSSSLTQHQRMHTGKNPISVTDVGRPFTSGQTSVTLRELLLGKDFLNVTTEANILPEETSSSASDQPYQRETPQVSSL

SEQ ID NO: 1737 - protein, 506 aa, Homo sapiens
MEQLDVFISIKPKPKQPSKSVIVKSVERNALNMYEARKCLLGLESSGVTIATSPSPASCPAGLACPSLDILASAGLGLTGLGLLGPTTLSLNTSTTPNSLLNALNSSVSPLQSPSSGTPSPTLWAPPLANTSSATGFSAIPHLMIPSTAQATLTNILLSGVPTYGHTAPSPPPGLTPVDVHINSMQTEGKKISAALNGHAQSPDIKYGAISTSSLGEKVLSANHGDPSIQTSGSEQTSPKSSPTEGCNDAFVEVGMPRSPSHSGNAGDLKQMMCPSKVSCAKRQTVELLQGTKNSHLHSTDRLLSDPELSATESPLADKKAPGSERAAERAAAAQQNSERAHLAPRSSYVNMQAFDYEQKKLLATKAMLKKPVVTEVRTPTNTWSGLGFSKSMPAETIKELRRANHVSYKPTMTTTYEGSSMSLSRSNSREHLGGGSESDNWRDRNGIGPGSHSEFAASIGSPKRKQNKSSERCVLCTLLGIPRLECVYLGWSITDCGLSDFKCLV

SEQ ID NO: 1738 - protein, 554 aa, Homo sapiens
MARGYGATVSLVLLGLGLALAVIVLAVVLSRHQAPCGPQAFAHAAVAADSKVCSDIGRAILQQQGSPVDATIAALVCTSVVNPQSMGLGGGVIFTIYNVTTGAQWIGVPGELRGYAEAHRRHGRLPWAQLFQPTIALLRGGHVVAPVLSRFLHNSILRPSLQASTLRQLFFNGTEPLRPQDPLPWPALATTLETVATEGVEVFYTGRLGQMLVEDIAKEGSQLTLQDLAKFQPEVVDALEVPLGDYTLYSPPPPAGGAILSFILNVLRGFNFSTESMARPEGRVNVYHHLVETLKFAKGQRWRLGDPRSHPKLQNASRDLLGETLAQLIRQQIDGRGDHQLSHYSLAEAWGHGTGTSHVSVLGEDGSAVAATSTINTPFGAMVYSPRTGIILNNELLDLCERCPRGSGTTPSPVSGDRVGGAPGRCWPPVPGERSPSSMVPSILINKAQGSKLVIGGAGGELIISAVAQAIMSKLWLGFDLRAAIAAPILHVNSKGCVEYEPNFSQEVQRGLQDRGQNQTQRPFFLNVVQAVSQEGACVYAVSDLRKSGEAAGY

SEQ ID NO: 1739 - protein, 2220 aa, Homo sapiens
MIRIAALNASSTIEDDHEGSFKSHKTQTKEAQEAEAFALYHKALDLQKHDRFEESAKAYHELLEASLLREAVSSGDEKEGLKHPGLILKYSTYKNLAQLAAQREDLETAMEFYLEAVMLDSTDVNLWYKIGHVALRLIRIPLARHAFEEGLRCNPDHWPCLDNLITVLYTLSDYTTCLYFICKALEKDCRYSKGLVLKEKIFEEQPCLRKDSLRMFLKCDMSIHDVSVSAAETQAIVDEALGLRKKRQALIVREKEPDLKLVQPIPFFTWKCLGESLLAMYNHLTTCEPPRPSLGKRIDLSDYQDPSQPLESSMVVTPVNVIQPSTVSTNPAVAVAEPVVSYTSVATTSFPLHSPGLLETGAPVGDISGGDKSKKGVKRKKISEESGETAKRRSARVRNTKCKKEEKVDFQELLMKFLPSRLRKLDPEEEDDSFNNYEVQSEAKLESFPSIGPQRLSFDSATFMESEKQDVHEFLLENLTNGGILELMMRYLKAMGHKFLVRWPPGLAEVVLSVYHSWRRHSTSLPNPLLRDCSNKHIKDMMLMSLSCMELQLDQWLLTKGRSSAVSPRNCPAGMVNGRFGPDFPGTHCLGDLLQLSFASSQRDLFEDGWLEFVVRVYWLKARFLALQGDMEQALENYDICTEMLQSSTAIQVEAGAERRDIVIRLPNLHNDSVVSLEEIDKNLKSLERCQSLEEIQRLYEAGDYKAVVHLLRPTLCTSGFDRAKHLEFMTSIPERPAQLLLLQDSLLRLKDYRQCFECSDVALNEAVQQMVNSGEAAAKEEWVATVTQLLMGIEQALSADSSGSILKVSSSTTGLVRLTNNLIQVIDCSMAVQEEAKEPHVSSVLPWIILHRIIWQEEDTFHSLCHQQQLQNPAEEGMSETPMLPSSLMLLNTAHEYLGRRSWCCNSDGALLRFYVRVLQKELAASTSEDTHPYKEELETALEQCFYCLYSFPSKKSKARYLEEHSAQQVDLIWEDALFMFEYFKPKTLPEFDSYKTSTVSADLANLLKRIATIVPRTERPALSLDKVSAYIEGTSTEVPCLPEGADPSPPVVNELYYLLADYHFKNKEQSKAIKFYMHDICICPNRFDSWAGMALARASRIQDKLNSNELKSDGPIWKHATPVLNCFRRALEIDSSNLSLWIEYGTMSYALHSFASRQLKQWRGELPPELVQQMEGRRDSMLETAKHCFTSAARCEGDGDEEEWLIHYMLGKVAEKQQQPPTVYLLHYRQAGHYLHEEAARYPKKIHYHNPPELAMEALEVYFRLHASILKLLGKPDSGVGAEVLVNFMKEAAEGPFARGEEKNTPKASEKEKACLVDEDSHSSAGTLPGPGASLPSSSGPGLTSPPYTATPIDHDYVKCKKPHQQATPDDRSQDSTAVALSDSSSTQDFFNEPTSLLEGSRKSYTEKRLPILSSQAGATGKDLQGATEERGKNEESLESTEGFRAAEQGVQKPAAETPASACIPGKPSASTPTLWDGKKRGDLPGEPVAFPQGLPAGAEEQRQFLTEQCIASFRLCLSRFPQHYKSLYRLAFLYTYSKTHRNLQWARDVLLGSSIPWQQLQHMPAQGLFCERNKTNFFNGIWRIPVDEIDRPGSFAWHMNRSIVLLLKVLAQLRDHSTLLKVSSMLQRTPDQGKKYLRDADRQVLAQRAFILTVKVLEDTLSELAEGSERPGPKVCGLPGARMTTDVSHKASPEDGQEGLPQPKKPPLADGSGPGPEPGGKVGLLNHRPVAMDAGDSADQSGERKDKESPRAGPTEPMDTSEATVCHSDLERTPPLLPGRPARDRGPESRPTELSLEELSISARQQPTPLTPAQPAPAPAPATTTGTRAGGHPEEPLSRLSRKRKLLEDTESGKTLLLDAYRVWQQGQKGVAYDLGRVERIMSETYMLIKQVDEEAALEQAVKFCQVHLGAAAQRQASGDTPTTPKHPKDSRENFFPVTVVPTAPDPVPADSVQRPSDAHTKPRPALAAATTIITCPPSASASTLDQSKDPGPPRPHRPEATPSMASLGPEGEELARVAEGTSFPPQEPRHSPQVKMAPTSSPAEPHCWPAEAALGTGAEPTCSQEGKLRPEPRRDGEAQEAASETQPLSSPPTAASSKAPSSGSAQPPEGHPGKPEPSRAKSRPLPNMPKLVIPSAATKFPPEITVTPPTPTLLSPKGSISEETKQKLKSAILSAQSAANVRKESLCQPALEVLETSSQESSLESETDEDDDYMDI

SEQ ID NO: 1740 - protein, 706 aa, Homo sapiens
MSPFLRIGLSNFDCGSCQSCQGEAVNPYCAVLVKEYVESENGQMYIQKKPTMYPPWDSTFDAHINKGRVMQIIVKGKNVDLISETTVELYSLAERCRKNNGKTEIWLELKPQGRMLMNARYFLEMSDTKDMNEFETEGFFALHQRRGAIKQAKVHHVKCHEFTATFFPQPTFCSVCHEFVWGLNKQGYQCRQCNAAIHKKCIDKVIAKCTGSAINSRETMFHKERFKIDMPHRFKVYNYKSPTFCEHCGTLLWGLARQGLKCDACGMNVHHRCQTKVANLCGINQKLMAEALAMIESTQQARCLRDTEQIFREGPVEIGLPCSIKNEARPPCLPTPGKREPQGISWESPLDEVDKMCHLPEPELNKERPSLQIKLKIEDFILHKMLGKGSFGKVFLAEFKKTNQFFAIKALKKDVVLMDDDVECTMVEKRVLSLAWEHPFLTHMFCTFQTKENLFFVMEYLNGGDLMYHIQSCHKFDLSRATFYAAEIILGLQFLHSKGIVYRDLKLDNILLDKDGHIKIADFGMCKENMLGDAKTNTFCGTPDYIAPEILLGQKYNHSVDWWSFGVLLYEMLIGQSPFHGQDEEELFHSIRMDNPFYPRWLEKEAKDLLVKLFVREPEKRLGVRGDIRQHPLFREINWEELERKEIDPPFRPKVKSPFDCSNFDKEFLNEKPRLSFADRALINSMDQNMFRNFSFMNPGMERLIS

SEQ ID NO: 1741 - protein, 582 aa, Homo sapiens
MESVKQRILAPGKEGLKNFAGKSLGQIYRVLEKKQDTGETIELTEDGKPLEVPERKAPLCDCTCFGLPRRYIIAIMSGLGFCISFGIRCNLGVAIVDMVNNSTIHRGGKVIKEKAKFNWDPETVGMIHGSFFWGYIITQIPGGYIASRLAANRVFGAAILLTSTLNMLIPSAARVHYGCVIFVRILQGLVEGVTYPACHGIWSKWAPPLERSRLATTSFCGSYAGAVIAMPLAGILVQYTGWSSVFYVYGSFGMVWYMFWLLVSYESPAKHPTITDEERRYIEESIGESANLLGAMEKFKTPWRKFFTSMPVYAIIVANFCRSWTFYLLLISQPAYFEEVFGFEISKVGMLSAVPHLVMTIIVPIGGQIADFLRSKQILSTTTVRKIMNCGGFGMEATLLLVVGYSHTRGVAISFLVLAVGFSGFAISGFNVNHLDIAPRYASILMGISNGVGTLSGMVCPIIVGAMTKNKSREEWQYVFLIAALVHYGGVIFYAIFASGEKQPWADPEETSEEKCGFIHEDELDEETGDITQNYINYGTTKSYGATTQANGGWPSGWEKKEEFVQGEVQDSHSYKDRVDYS

SEQ ID NO: 1742 - protein, 551 aa, Homo sapiens
MEEAELVKGRLQAITDKRKIQEEISQKRLKIEEDKLKHQHLKKKALREKWLLDGISSGKEQEEMKKQNQQDQHQIQVLEQSILRLEKEIQDLEKAELQISTKEEAILKKLKSIERTTEDIIRSVKVEREERAEESIEDIYANIPDLPKSYIPSRLRKEINEEKEDDEQNRKALYAMEIKVEKDLKTGESTVLSSIPLPSDDFKGTGIKVYDDGQKSVYAVSSNHSAAYNGTDGLAPVEVEELLRQASERNSKSPTEYHEPVYANPFYRPTTPQRETVTPGPNFQERIKIKTNGLGIGVNESIHNMGNGLSEERGNNFNHISPIPPVPHPRSVIQQAEEKLHTPQKRLMTPWEESNVMQDKDAPSPKPRLSPRETIFGKSEHQNSSPTCQEDEEDVRYNIVHSLPPDINDTEPVTMIFMGYQQAEDSEEDKKFLTGYDGIIHAELVVIDDEEEEDEGEAEKPSYHPIAPHSQVYQPAKPTPLPRKRSEASPHENTNHKSPHKNSISLKEQEESLGSPVHHSPFDAQTTGDGTEDPSLTALRMRMAKLGKKVI

SEQ ID NO: 1743 - protein, 321 aa, Homo sapiens
MPLLPAALTSSMLYFQMVIMAGTVMLAYYFEYTDTFTVNVQGFFCHDSAYRKPYPGPEDSSAVPPVLLYSLAAGVPVLVIIVGETAVFCLQLATRDFENQEKTILTGDCCYINPLVRRTVRFLGIYTFGLFATDIFVNAGQVVTGNLAPHFLALCKPNYTALGCQQYTQFISGEEACTGNPDLIMRARKTFPSKEAALSVYAAMYLTMYITNTIKAKGTRLAKPVLCLGLMCLAFLTGLNRVAEYRNHWSDVIAGFLVGISIAVFLVVCVVNNFKGRQAENEHIHMDNLAQMPMISIPRVESPLEKVTSVQNHITAFAEVT

SEQ ID NO: 1744 - protein, 898 aa, Homo sapiens
MSVTEEDLCHHMKVVVRVRPENTKEKAAGFHKVVHVVDKHILVFDPKQEEVSFFHGKKTTNQNVIKKQNKDLKFVFDAVFDETSTQSEVFEHTTKPILRSFLNGYNCTVLAYGATGAGKTHTMLGSADEPGVMYLTMLHLYKCMDEIKEEKICSTAVSYLEVYNEQIRDLLVNSGPLAVREDTQKGVVVHGLTLHQPKSSEEILHLLDNGNKNRTQHPTDMNATSSRSHAVFQIYLRQQDKTASINQNVRIAKMSLIDLAGSERASTSGAKGTRFVEGTNINRSLLALGNVINALADSKRKNQHIPYRNSKLTRLLKDSLGGNCQTIMIAAVSPSSVFYDDTYNTLKYANRAKDIKSSLKSNVLNVNNHITQYVKICNEQKAEILLLKEKLKAYEEQKAFTNENDQAKLMISNPQEKEIERFQEILNCLFQNREEIRQEYLKLEMLLKENELKSFYQQQCHKQIEMMCSEDKVEKATGKRDHRLAMLKTRRSYLEKRREEELKQFDENTNWLHRVEKEMGLLSQNGHIPKELKKDLHCHHLHLQNKDLKAQIRHMMDLACLQEQQHRQTEAVLNALLPTLRKQYCTLKEAGLSNAAFESDFKEIEHLVERKKVVVWADQTAEQPKQNDLPGISVLMTFPQLGPVQPIPCCSSSGGTNLVKIPTEKRTRRKLMPSPLKGQHTLKSPPSQSVQLNDSLSKELQPIVYTPEDCRKAFQNPSTVTLMKPSSFTTSFQAISSNINSDNCLKMLCEVAIPHNRRKECGQEDLDSTFTICEDIKSSKCKLPEQESLPNDNKDILQRLDPSSFSTKHSMPVPSMVPSYMAMTTAAKRKRKLTSSTSNSSLTADVNSGFAKRVRQDNSSEKHLQENKPTMEHKRNICKINPSMVRKFGRNISKGNLR

SEQ ID NO: 1745 - protein, 936 aa, Homo sapiens
MLRPEISSTSPSAPAVSPSSGETRSPQGPRYNFGLQETPQSRPSVQVVSASTCPGTSGAAGDRSSSSSSLPCPAPNSRPAQGSYFGNKRAYAENTVASNFTFGASSSSARDTNYPQTLKTPLSTGNPQRSGYKSWTPQVGYSASSSSAISAHSPSVIVAVVEGRGLARGEIGMASIDLKNPQIILSQFADNTTYAKVITKLKILSPLEIIMSNTACAVGNSTKLFTLITENFKNVNFTTIQRKYFNETKGLEYIEQLCIAEFSTVLMEVQSKYYCLAAVAALLKYVEFIQNSVYAPKSLKICFQGSEQTAMIDSSSAQNLELLINNQDYRNNHTLFGVLNYTKTPGGSRRLRSNILEPLVDIETINMRLDCVQELLQDEELFFGLQSVISRFLDTEQLLSVLVQIPKQDTVNAAESKITNLIYLKHTLELVDPLKIAMKNCNTPLLRAYYGSLEDKRFGIILEKIKTVINDDARYMKGCLNMRTQKCYAVRSNINEFLDIARRTYTEIVDDIAGMISQLGEKYSLPLRTSFSSARGFFIQMTTDCIALPSDQLPSEFIKISKVKNSYSFTSADLIKMNERCQESLREIYHMTYMIVCKLLSEIYEHIHCLYKLSDTVSMLDMLLSFAHACTLSDYVRPEFTDTLAIKQGWHPILEKISAEKPIANNTYVTEGSNFLIITGPNMSGKSTYLKQIALCQIMAQIGSYVPAEYSSFRIAKQIFTRISTDDDIETNSSTFMKEMKEIAYILHNANDKSLILIDELGRGTNTEEGIGICYAVCEYLLSLKAFTLFATHFLELCHIDALYPNVENMHFEVQHVKNTSRNKEAILYTYKLSKGLTEEKNYGLKAAEVSSLPPSIVLDAKEITTQITRQILQNQRSTPEMERQRAVYHLATRLVQTARNSQLDPDSLRIYLSNLKKKYKEDFPRTEQVPEKTEE

SEQ ID NO: 1746 - protein, 962 aa, Homo sapiens
MEDCNVHSAASILASVKEQEARFERLTRALEQERRHVALQLERAQQPGMVSGGMGSGQPLPMAWQQLVLQEQSPGSQASLATMPEAPDVLEETVTVEEDPGTPTSHVSIVTSEDGTTRRTETKVTKTVKTVTTRTVRQVPVGPDGLPLLDGGPPLGPFADGALDRHFLLRGGGPVATLSRAYLSSGGGFPEGPEPRDSPSYGSLSRGLGMRPPRAGPLGPGPGDGCFTLPGHREAFPVGPEPGPPGGRSLPERFQAEPYGLEDDTRSLAADDEGGPELEPDYGTATRRRPECGRGLHTRAYEDTADDGGELADERPAFPMVTAPLAQPERGSMGSLDRLVRRSPSVDSARKEPRWRDPELPEVLAMLRHPVDPVKANAAAYLQHLCFENEGVKRRVRQLRGLPLLVALLDHPRAEVRRRACGALRNLSYGRDTDNKAAIRDCGGVPALVRLLRAARDNEVRELVTGTLWNLSSYEPLKMVIIDHGLQTLTHEVIVPHSGWEREPNEDSKPRDAEWTTVFKNTSGCLRNVSSDGAEARRRLRECEGLVDALLHALQSAVGRKDTDNKSVENCVCIMRNLSYHVHKEVPGADRYQEAEPGPLGSAVGSQRRRRDDASCFGGKKAKEEWFHQGKKDGEMDRNFDTLDLPKRTEAAKGFELLYQPEVVRLYLSLLTESRNFNTLEAAAGALQNLSAGNWMWATYIRATVRKERGLPVLVELLQSETDKVVRAVAIALRNLSLDRRNKDLIGSYAMAELVRNVRNAQAPPRPGACLEEDTVVAVLNTIHEIVSDSLDNARSLLQARGVPALVALVASSQSVREAKAASHVLQTVWSYKELRGTLQKDGWTKARFQSAAATAKGPKGALSPGGFDDSTLPLVDKSLEGEKTGSRDVIPMDALGPDGYSTVDRRERRPRGASSAGEASEKEPLKLDPSRKAPPPGPSRPAVRLVDAVGDAKPQPVDSWV

SEQ ID NO: 1747 - protein, 1017 aa, Homo sapiens
MKLLKPTWVNHNGKPIFSVDIHPDGTKFATGGQGQDSGKVVIWNMSPVLQEDDEKDENIPKMLCQMDNHLACVNCVRWSNSGMYLASGGDDKLIMVWKRATYIGPSTVFGSSGKLANVEQWRCVSILRNHSGDVMDVAWSPHDAWLASCSVDNTVVIWNAVKFPEILATLRGHSGLVKGLTWDPVGKYIASQADDRSLKVWRTLDWQLETSITKPFDECGGTTHVLRLSWSPDGHYLVSAHAMNNSGPTAQIIEREGWKTNMDFVGHRKAVTVVKFNPKIFKKKQKNGSSAKPSCPYCCCAVGSKDRSLSVWLTCLKRPLVVIHELFDKSIMDISWTLNGLGILVCSMDGSVAFLDFSQDELGDPLSEEEKSRIHQSTYGKSLAIMTEAQLSTAVIENPEMLKYQRRQQQQQLDQKSAATREMGSATSVAGVVNGESLEDIRKNLLKKQVETRTADGRRRITPLCIAQLDTGDFSTAFFNSIPLSGSLAGTMLSSHSSPQLLPLDSSTPNSFGASKPCTEPVVAASARPAGDSVNKDSMNATSTPAALSPSVLTTPSKIEPMKAFDSRFTERSKATPGAPALTSMTPTAVERLKEQNLVKELRPRDLLESSSDSDEKVPLAKASSLSKRKLELEVETVEKKKKGRPRKDSRLMPVSLSVQSPAALTAEKEAMCLSAPALALKLPIPSPQRAFTLQVSSDPSMYIEVENEVTVVGGVKLSRLKCNREGKEWETVLTSRILTAAGSCDVVCVACEKRMLSVFSTCGRRLLSPILLPSPISTLHCTGSYVMALTAAATLSVWDVHRQVVVVKEESLHSILAGSDMTVSQILLTQHGIPVMNLSDGKAYCFNPSLSTWNLVSDKQDSLAQCADFRSSLPSQDAMLCSGPLAIIQGRTSNSGRQAARLFSVPHVVQQETTLAYLENQVAAALTLQSSHEYRHWLLVYARYLVNEGFEYRLREICKDLLGPVHYSTGSQWESTVVGLRKRELLKELLPVIGQNLRFQRLFTECQEQLDILRDK

SEQ ID NO: 1748 - protein, 773 aa, Homo sapiens
METDESPSPLPCGPAGEAVMESRARPFQALPREQSPPPPLQTSSGAEVMDVGSGGDGQSELPAEDPFNFYGASLLSKGSFSKGRLLIDPNCSGHSPRTARHAPAVRKFSPDLKLLKDVKISVSFTESCRSKDRKVLYTGAERDVRAECGLLLSPVSGDVHACPFGGSVGDGVGIGGESADKKDEENELDQEKRVEYAVLDELEDFTDNLELDEEGAGGFTAKAIVQRDRVDEEALNFPYEDDFDNDVDALLEEGLCAPKKRRTEEKYGGDSDHPSDGETSVQPMMTKIKTVLKSRGRPPTEPLPDGWIMTFHNSGVPVYLHRESRVVTWSRPYFLGTGSIRKHDPPLSSIPCLHYKKMKDNEEREQSSDLTPSGDVSPVKPLSRSAELEFPLDEPDSMGADPGPPDEKDPLGAEAAPGALGQVKAKVEVCKDESVDLEEFRSYLEKRFDFEQVTVKKFRTWAERRQFNREMKRKQAESERPILPANQKLITLSVQDAPTKKEFVINPNGKSEVCILHEYMQRVLKVRPVYNFFECENPSEPFGASVTIDGVTYGSGTASSKKLAKNKAARATLEILIPDFVKQTSEEKPKDSEELEYFNHISIEDSRVYELTSKAGLLSPYQILHECLKRNHGMGDTSIKFEVVPGKNQKSEYVMACGKHTVRGWCKNKRVGKQLASQKILQLLHPHVKNWGSLLRMYGRESSKMVKQETSDKSVIELQQYAKKNKPNLHILSKLQEEMKRLAEEREETRKKPKMSIVASAQPGGEPLCTVDV

SEQ ID NO: 1749 - protein, 454 aa, Homo sapiens
MSSGAPQKSSPMASGAEETPGFLDTLLQDFPALLNPEDPLPWKAPGTVLSQEEVEGELAELAMGFLGSRKAPPPLAAALAHEAVSQLLQTDLSEFRKLPREEEEEEEDDDEEEKAPVTLLDAQSLAQSFFNRLWEVAGQWQKQVPLAARASQRQWLVSIHAIRNTRRKMEDRHVSLPSFNQLFGLSDPVNRAYFAVFDGHGGVDAARYAAVHVHTNAARQPELPTDPEGALREAFRRTDQMFLRKAKRERLQSGTTGVCALIAGATLHVAWLGDSQVILVQQGQVVKLMEPHRPERQDEKARIEALGGFVSHMDCWRVNGTLAVSRAIGDVFQKPYVSGEADAASRALTGSEDYLLLACDGFFDVVPHQEVVGLVQSHLTRQQGSGLRVAEELVAAARERGSHDNITVMVVFLRDPQELLEGGNQGEGDPQAEGRRQDLPSSLPEPETQAPPRS

SEQ ID NO: 1750 - protein, 516 aa, Homo sapiens
MGDPSKQDILTIFKRLRSVPTNKVCFDCGAKNPSWASITYGVFLCIDCSGSHRSLGVHLSFIRSTELDSNWSWFQLRCMQVGGNASASSFFHQHGCSTNDTNAKYNSRAAQLYREKIKSLASQATRKHGTDLWLDSCVVPPLSPPPKEEDFFASHVSPEVSDTAWASAIAEPSSLTSRPVETTLENNEGGQEQGPSVEGLNVPTKATLEVSSIIKKKPNQAKKGLGAKKGSLGAQKLANTCFNEIEKQAQAADKMKEQEDLAKVVSKEESIVSSLRLAYKDLEIQMKKDEKMNISGKKNVDSDRLGMGFGNCRSVISHSVTSDMQTIEQESPIMAKPRKKYNDDSDDSYFTSSSSYFDEPVELRSSSFSSWDDSSDSYWKKETSKDTETVLKTTGYSDRPTARRKPDYEPVENTDEAQKKFGNVKAISSDMYFGRQSQADYETRARLERLSASSSISSADLFEEPRKQPAGNYSLSSVLPNAPDMAQFKQGVRSVAGKLSVFANGVVTSIQDRYGS

SEQ ID NO: 1751 - protein, 2414 aa, Homo sapiens
MAENVVEPGPPSAKRPKLSSPALSASASDGTDFGSLFDLEHDLPDELINSTELGLTNGGDINQLQTSLGMVQDAASKHKQLSELLRSGSSPNLNMGVGGPGQVMASQAQQSSPGLGLINSMVKSPMTQAGLTSPNMGMGTSGPNQGPTQSTGMMNSPVNQPAMGMNTGMNAGMNPGMLAAGNGQGIMPNQVMNGSIGAGRGRQNMQYPNPGMGSAGNLLTEPLQQGSPQMGGQTGLRGPQPLKMGMMNNPNPYGSPYTQNPGQQIGASGLGLQIQTKTVLSNNLSPFAMDKKAVPGGGMPNMGQQPAPQVQQPGLVTPVAQGMGSGAHTADPEKRKLIQQQLVLLLHAHKCQRREQANGEVRQCNLPHCRTMKNVLNHMTHCQSGKSCQVAHCASSRQIISHWKNCTRHDCPVCLPLKNAGDKRNQQPILTGAPVGLGNPSSLGVGQQSAPNLSTVSQIDPSSIERAYAALGLPYQVNQMPTQPQVQAKNQQNQQPGQSPQGMRPMSNMSASPMGVNGGVGVQTPSLLSDSMLHSAINSQNPMMSENASVPSLGPMPTAAQPSTTGIRKQWHEDITQDLRNHLVHKLVQAIFPTPDPAALKDRRMENLVAYARKVEGDMYESANNRAEYYHLLAEKIYKIQKELEEKRRTRLQKQNMLPNAAGMVPVSMNPGPNMGQPQPGMTSNGPLPDPSMIRGSVPNQMMPRITPQSGLNQFGQMSMAQPPIVPRQTPPLQHHGQLAQPGALNPPMGYGPRMQQPSNQGQFLPQTQFPSQGMNVTNIPLAPSSGQAPVSQAQMSSSSCPVNSPIMPPGSQGSHIHCPQLPQPALHQNSPSPVPSRTPTPHHTPPSIGAQQPPATTIPAPVPTPPAMPPGPQSQALHPPPRQTPTPPTTQLPQQVQPSLPAAPSADQPQQQPRSQQSTAASVPTPTAPLLPPQPATPLSQPAVSIEGQVSNPPSTSSTEVNSQAIAEKQPSQEVKMEAKMEVDQPEPADTQPEDISESKVEDCKMESTETEERSTELKTEIKEEEDQPSTSATQSSPAPGQSKKKIFKPEELRQALMPTLEALYRQDPESLPFRQPVDPQLLGIPDYFDIVKSPMDLSTIKRKLDTGQYQEPWQYVDDIWLMFNNAWLYNRKTSRVYKYCSKLSEVFEQEIDPVMQSLGYCCGRKLEFSPQTLCCYGKQLCTIPRDATYYSYQNRYHFCEKCFNEIQGESVSLGDDPSQPQTTINKEQFSKRKNDTLDPELFVECTECGRKMHQICVLHHEIIWPAGFVCDGCLKKSARTRKENKFSAKRLPSTRLGTFLENRVNDFLRRQNHPESGEVTVRVVHASDKTVEVKPGMKARFVDSGEMAESFPYRTKALFAFEEIDGVDLCFFGMHVQEYGSDCPPPNQRRVYISYLDSVHFFRPKCLRTAVYHEILIGYLEYVKKLGYTTGHIWACPPSEGDDYIFHCHPPDQKIPKPKRLQEWYKKMLDKAVSERIVHDYKDIFKQATEDRLTSAKELPYFEGDFWPNVLEESIKELEQEEEERKREENTSNESTDVTKGDSKNAKKKNNKKTSKNKSSLSRGNKKKPGMPNVSNDLSQKLYATMEKHKEVFFVIRLIAGPAANSLPPIVDPDPLIPCDLMDGRDAFLTLARDKHLEFSSLRRAQWSTMCMLVELHTQSQDRFVYTCNECKHHVETRWHCTVCEDYDLCITCYNTKNHDHKMEKLGLGLDDESNNQQAAATQSPGDSRRLSIQRCIQSLVHACQCRNANCSLPSCQKMKRVVQHTKGCKRKTNGGCPICKQLIALCCYHAKHCQENKCPVPFCLNIKQKLRQQQLQHRLQQAQMLRRRMASMQRTGVVGQQQGLPSPTPATPTTPTGQQPTTPQTPQPTSQPQPTPPNSMPPYLPRTQAAGPVSQGKAAGQVTPPTPPQTAQPPLPGPPPAAVEMAMQIQRAAETQRQMAHVQIFQRPIQHQMPPMTPMAPMGMNPPPMTRGPSGHLEPGMGPTGMQQQPPWSQGGLPQPQQLQSGMPRPAMMSVAQHGQPLNMAPQPGLGQVGISPLKPGTVSQQALQNLLRTLRSPSSPLQQQQVLSILHANPQLLAAFIKQRAAKYANSNPQPIPGQPGMPQGQPGLQPPTMPGQQGVHSNPAMQNMNPMQAGVQRAGLPQQQPQQQLQPPMGGMSPQAQQMNMNHNTMPSQFRDILRRQQMMQQQQQQGAGPGIGPGMANHNQFQQPQGVGYPPQQQQRMQHHMQQMQQGNMGQIGQLPQALGAEAGASLQAYQQRLLQQQMGSPVQPNPMSPQQHMLPNQAQSPHLQGQQIPNSLSNQVRSPQPVPSPRPQSQPPHSSPSPRMQPQPSPHHVSPQTSSPHPGLVAAQANPMEQGHFASPDQNSMLSQLASNPGMANLHGASATDLGLSTDNSDLNSNLSQSTLDIH

SEQ ID NO: 1752 - protein, 492 aa, Homo sapiens
MEPEAPDSRKRPLETPPEVVCTKRSNTGEEGEYFLKVLIPSYAAGSIIGKGGQTIVQLQKETGATIKLSKSKDFYPGTTERVCLVQGTAEALNAVHSFIAEKVREIPQAMTKPEVVNILQPQTTMNPDRAKQAKLIVPNSTAGLIIGKGGATVKAVMEQSGAWVQLSQKPEGINLQERVVTVSGEPEQVHKAVSAIVQKVQEDPQSSSCLNISYANVAGPVANSNPTGSPYASPADVLPAAAAASAAAASGLLGPAGLAGVGAFPAALPAFSGTDLLAISTALNTLASYGYNTNSLGLGLNSAAASGVLAAVAAGANPAAAAAANLLASYAGEAGAGPAGGAAPPPPPPPGALGSFALAAAANGYLGAGAGGGAGGGGGPLVAAAAAAGAAGGFLTAEKLAAESAKELVEIAVPENLVGAILGKGGKTLVEYQELTGARIQISKKGEFLPGTRNRRVTITGSPAATQAAQYLISQRVTYEQGVRASNPQKVG

SEQ ID NO: 1753 - protein, 192 aa, Homo sapiens
MDGSGEQPRGGGPTSSEQIMKTGALLLQGFIQDRAGRMGGEAPELALDPVPQDASTKKLSECLKRIGDELDSNMELQRMIAAVDTDSPREVFFRVAADMFSDGNFNWGRVVALFYFASKLVLKALCTKVPELIRTIMGWTLDFLRERLLGWIQDQGGWDGLLSYFGTPTWQTVTIFVAGVLTASLTIWKKMG

SEQ ID NO: 1754 - protein, 478 aa, Homo sapiens
MAASQLAALEGVDSGPRVPGASPGFLYSEGQRLALEALLSKGAEAFQTCVQREELWPFLSADEVQGLAAAAEDWTVAKQEPSGMAEGATTTDVDAGSLSYWPGQSEQPAPVLRLGWPVDSAWKGITRAQLYTQPPGEGQPPLKELVRLEIQAAHKLVAVVMDVFTDPDLLLDLVDAATRRWVPVYLLLDRQQLPAFLELAQQLGVNPWNTENVDVRVVRGCSFQSRWRRQVSGTVREKFVLLDGERVISGSYSFTWSDARLHRGLVTLLTGEIVDAFSLEFRTLYAASCPLPPAPPQKPSVIGGLQRGRSPHRVSRRRSVAPASPPPPDGPLAHRLAACRVSPATPGPALSDILRSVQRARTPSGPPARPSRSMWDLSRLSQLSGSSDGDNELKKSWGSKDTPAKALMRQRGTGGGPWGEVDSRPPWGGALPLPPAHRLRYLSPARRRFGGDATFKLQEPRGVRPSDWAPRAGLGGQP

SEQ ID NO: 1755 - protein, 919 aa, Homo sapiens
MQRSIMSFFHPKKEGKAKKPEKEASNSSRETEPPPKAALKEWNGVVSESDSPVKRPGRKAARVLGSEGEEEDEALSPAKGQKPALDCSQVSPPRPATSPENNASLSDTSPMDSSPSGIPKRRTARKQLPKRTIQEVLEEQSEDEDREAKRKKEEEEEETPKESLTEAEVATEKEGEDGDQPTTPPKPLKTSKAETPTESVSEPEVATKQELQEEEEQTKPPRRAPKTLSSFFTPRKPAVKKEVKEEEPGAPGKEGAAEGPLDPSGYNPAKNNYHPVEDACWKPGQKVPYLAVARTFEKIEEVSARLRMVETLSNLLRSVVALSPPDLLPVLYLSLNHLGPPQQGLELGVGDGVLLKAVAQATGRQLESVRAEAAEKGDVGLVAENSRSTQRLMLPPPPLTASGVFSKFRDIARLTGSASTAKKIDIIKGLFVACRHSEARFIARSLSGRLRLGLAEQSVLAALSQAVSLTPPGQEFPPAMVDAGKGKTAEARKTWLEEQGMILKQTFCEVPDLDRIIPVLLEHGLERLPEHCKLSPGIPLKPMLAHPTRGISEVLKRFEEAAFTCEYKYDGQRAQIHALEGGEVKIFSRNQEDNTGKYPDIISRIPKIKLPSVTSFILDTEAVAWDREKKQIQPFQVLTTRKRKEVDASEIQVQVCLYAFDLIYLNGESLVREPLSRRRQLLRENFVETEGEFVFATSLDTKDIEQIAEFLEQSVKDSCEGLMVKTLDVDATYEIAKRSHNWLKLKKDYLDGVGDTLDLVVIGAYLGRGKRAGRYGGFLLASYDEDSEELQAICKLGTGFSDEELEEHHQSLKALVLPSPRPYVRIDGAVIPDHWLDPSAVWEVKCADLSLSPIYPAARGLVDSDKGISLRFPRFIRVREDKQPEQATTSAQVACLYRKQSQIQNQQGEDSGSDPEDTY

SEQ ID NO: 1756 - protein, 543 aa, Homo sapiens
MFSWLKRGGARGQQPEAIRTVTSALKELYRTKLLPLEEHYRFGAFHSPALEDADFDGKPMVLVAGQYSTGKTSFIQYLLEQEVPGSRVGPEPTTDCFVAVMHGDTEGTVPGNALVVDPDKPFRKLNPFGNTFLNRFMCAQLPNQVLESISIIDTPGILSGAKQRVSRGYDFPAVLRWFAERVDLIILLFDAHKLEISDEFSEAIGALRGHEDKIRVVLNKADMVETQQLMRVYGALMWALGKVVGTPEVLRVYIGSFWSQPLLVPDNRRLFELEEQDLFRDIQGLPRHAALRKLNDLVKRARLVRVHAYIISYLKKEMPSVFGKENKKKQLILKLPVIFAKIQLEHHISPGDFPDCQKMQELLMAHDFTKFHSLKPKLLEALDEMLTHDIAKLMPLLRQEELESTEVGVQGGAFEGTHMGPFVERGPDEAMEDGEEGSDDEAEWVVTKDKSKYDEIFYNLAPADGKLSGSKAKTWMVGTKLPNSVLGRIWKLSDVDRDGMLDDEEFALASHLIEAKLEGHGLPANLPRRLVPPSKRRHKGSAE

SEQ ID NO: 1757 - protein, 753 aa, Homo sapiens
MMEERAAAAVAAAASSCRPLGSGAGPGPTGAAPVSAPAPGPGPAGKGGGGGGSPGPTAGPEPLSLPGILHFIQHEWARFEAEKARWEAERAELQAQVAFLQGERKGQENLKTDLVRRIKMLEYALKQERAKYHKLKFGTDLNQGEKKADVSEQVSNGPVESVTLENSPLVWKEGRQLLRQYLEEVGYTDTILDMRSKRVRSLLGRSLELNGAVEPSEGAPRAPPGPAGLSGGESLLVKQIEEQIKRNAAGKDGKERLGGSVLGQIPFLQNCEDEDSDEDDELDSVQHKKQRVKLPSKALVPEMEDEDEEDDSEDAINEFDFLGSGEDGEGAPDPRRCTVDGSPHELESRRVKLQGILADLRDVDGLPPKVTGPPPGTPQPRPHEDVFIMDTIGGGEVSLGDLADLTVTNDNDLSCDLSDSKDAFKKTWNPKFTLRSHYDGIRSLAFHHSQSALLTASEDGTLKLWNLQKAVTAKKNAALDVEPIHAFRAHRGPVLAVAMGSNSEYCYSGGADACIHSWKIPDLSMDPYDGYDPSVLSHVLEGHGDAVWGLAFSPTSQRLASCSADGTVRIWDPSSSSPACLCTFPTASEHGVPTSVAFTSTEPAHIVASFRSGDTVLYDMEVGSALLTLESRGSSGPTQINQVVSHPNQPLTITAHDDRGIRFLDNRTGKPVHSMVAHLDAVTCLAVDPNGAFLMSGSHDCSLRLWSLDNKTCVQEITAHRKKHEEAIHAVACHPSKALIASAGADALAKVFV

SEQ ID NO: 1758 - protein, 419 aa, Homo sapiens
MTTSPILQLLLRLSLCGLLLQRAETGSKGQTAGELYQRWERYRRECQETLAAAEPPSGLACNGSFDMYVCWDYAAPNATARASCPWYLPWHHHVAAGFVLRQCGSDGQWGLWRDHTQCENPEKNEAFLDQRLILERLQVMYTVGYSLSLATLLLALLILSLFRRLHCTRNYIHINLFTSFMLRAAAILSRDRLLPRPGPYLGDQALALWNQALAACRTAQIVTQYCVGANYTWLLVEGVYLHSLLVLVGGSEEGHFRYYLLLGWGAPALFVIPWVIVRYLYENTQCWERNEVKAIWWIIRTPILMTILINFLIFIRILGILLSKLRTRQMRCRDYRLRLARSTLTLVPLLGVHEVVFAPVTEEQARGALRFAKLGFEIFLSSFQGFLVSVLYCFINKEVGRDPAAAPALWRQRGVRRRL

SEQ ID NO: 1759 - protein, 655 aa, Homo sapiens
MVAPKSHTDDWAPGPFSSKPQRSQLQIFSSVLQTSLLFLLMGLRASGKDSAPTVVSGILGGSVTLPLNISVDTEIENVIWIGPKNALAFARPKENVTIMVKSYLGRLDITKWSYSLCISNLTLNDAGSYKAQINQRNFEVTTEEEFTLFVYEQLQEPQVTMKSVKVSENFSCNITLMCSVKGAEKSVLYSWTPREPHASESNGGSILTVSRTPCDPDLPYICTAQNPVSQRSSLPVHVGQFCTDPGASRGGTTGETVVGVLGEPVTLPLALPACRDTEKVVWLFNTSIISKEREEAATADPLIKSRDPYKNRVWVSSQDCSLKISQLKIEDAGPYHAYVCSEASSVTSMTHVTLLIYRRLRKPKITWSLRHSEDGICRISLTCSVEDGGNTVMYTWTPLQKEAVVSQGESHLNVSWRSSENHPNLTCTASNPVSRSSHQFLSENICSGPERNTKLWIGLFLMVCLLCVGIFSWCIWKRKGRCSVPAFCSSQAEAPADTPEPTAGHTLYSVLSQGYEKLDTPLRPARQQPTPTSDSSSDSNLTTEEDEDRPEVHKPISGRYEVFDQVTQEGAGHDPAPEGQADYDPVTPYVTEVESVVGENTMYAQVFNLQGKTPVSQKEESSATIYCSIRKPQVVPPPQQNDLEIPESPTYENFT

SEQ ID NO: 1760 - protein, 578 aa, Homo sapiens
MAVSWRSWLANEGVKHLCLFIWLSMNVLLFWKTFLLYNQGPEYHYLHQMLGLGLCLSRASASVLNLNCSLILLPMCRTLLAYLRGSQKVPSRRTRRLLDKSRTFHITCGVTICIFSGVHVAAHLVNALNFSVNYSEDFVELNAARYRDEDPRKLLFTTVPGLTGVCMVVVLFLMITASTYAIRVSNYDIFWYTHNLFFVFYMLLTLHVSGGLLKYQTNLDTHPPGCISLNRTSSQNISLPEYFSEHFHEPFPEGFSKPAEFTQHKFVKICMEEPRFQANFPQTWLWISGPLCLYCAERLYRYIRSNKPVTIISVMSHPSDVMEIRMVKENFKARPGQYITLHCPSVSALENHPFTLTMCPTETKATFGVHLKIVGDWTERFRDLLLPPSSQDSEILPFIQSRNYPKLYIDGPFGSPFEESLNYEVSLCVAGGIGVTPFASILNTLLDDWKPYKLRRLYFIWVCRDIQSFRWFADLLCMLHNKFWQENRPDYVNIQLYLSQTDGIQKIIGEKYHALNSRLFIGRPRWKLLFDEIAKYNRGKTVGVFCCGPNSLSKTLHKLSNQNNSYGTRFEYNKESFS

SEQ ID NO: 1761 - protein, 529 aa, Homo sapiens [sequence omitted]

SEQ ID NO: 1762 - protein, 218 aa, Homo sapiens
MSFVGENSGVKMGSEDWEKDEPQCCLEDPAGSPLEPGPSLPTMNFVHTSPKVKNLNPKKFSIHDQDHKVLVLDSGNLIAVPDKNYIRPEIFFALASSLSSASAEKGSPILLGVSKGEFCLYCDKDKGQSHPSLQLKKEKLMKLAAQKESARRPFIFYRAQVGSWNMLESAAHPGWFICTSCNCNEPVGVTDKFENRKHIEFSFQPVCKAEMSPSEVSD

SEQ ID NO: 1763 - protein, 197 aa, Homo sapiens
MSFVGENSGVKMGSEDWEKDEPQCCLEGPKVKNLNPKKFSIHDQDHKVLVLDSGNLIAVPDKNYIRPEIFFALASSLSSASAEKGSPILLGVSKGEFCLYCDKDKGQSHPSLQLKKEKLMKLAAQKESARRPFIFYRAQVGSWNMLESAAHPGWFICTSCNCNEPVGVTDKFENRKHIEFSFQPVCKAEMSPSEVSD

SEQ ID NO: 1764 - protein, 157 aa, Homo sapiens
MSFVGENSGVKMGSEDWEKDEPQCCLEEIFFALASSLSSASAEKGSPILLGVSKGEFCLYCDKDKGQSHPSLQLKKEKLMKLAAQKESARRPFIFYRAQVGSWNMLESAAHPGWFICTSCNCNEPVGVTDKFENRKHIEFSFQPVCKAEMSPSEVSD

SEQ ID NO: 1765 - protein, 271 aa, Homo sapiens
MAKVPDMFEDLKNCYSENEEDSSSIDHLSLNQKSFYHVSYGPLHEGCMDQSVSLSISETSKTSKLTFKESMVVVATNGKVLKKRRLSLSQSITDDDLEAIANDSEEEIIKPRSAPFSFLSNVKYNFMRIIKYEFILNDALNQSIIRANDQYLTAAALHNLDEAVKFDMGAYKSSKDDAKITVILRISKTQLYVTAQDEDQPVLLKEMPEIPKTITGSETNLLFFWETHGTKNYFTSVAHPNLFIATKQDYWVCLAGGPPSITDFQILENQA

SEQ ID NO: 1766 - protein, 678 aa, Homo sapiens
HSFQWLRNLPGCPKSKGNNVFVVHKPSAVPSREGSESGPGPSSGSPSEESPPGPGGGLEDALPFPAALLRVPAEAPSDPRSASGEDDPCAPKKVKVDCDSFLCQNPGEPGLQEAQKAGGLPADASPLFRQLFLKSQEPLVSHEQMQVFQMITKSQRIFSHAQVAAVSSQLPAPEGKPAALRPLQGPWPQQPPPLAPAVDSLHAGPGNPEAEGSPARRRKTTPGVPREASPGSTRRDAKGGLKVAAVPTPLAAPSLDPSRNPDISSLAKQLRSSKGTLDLEDIFPSTGQRQTQLGGEEPPGASLPGKQAPAENGAASRITKGEKGPACSRGGGYRLLGNPRAPRFSGFRKEKAKMDMCCAASPSQVAMASFSSAGPPADPSKSKLTIFSRIQGGNIYRLPHPVKEENVAGRGNQQNGSPTDWTKPRSTFVCKNCSQMFYTEKGLSSHMCFHSDQWPSPRGKQEPQVFGTEFCKPLRQVLRPEGDRHSPPGTKKPLDPTAAAPLVVPQSIPVVPVTRHIGSMAMIQTKTVAQCVEYYYIWKKMIKFDCGRAPGLEKRVKREPEEVERTEEKVPCSPRERPSHHPTPKLKTKSYRRESILSSSPNAGSKRTPELLGSAESQGIFPCRECERVFDKIKSRNAHMKRHRLQDHVEPIIRVKWPVKPFQLKEEELGADIGPLQW

SEQ ID NO: 1767 - protein, 767 aa, Homo sapiens
MRSWAFSYLDAMDNITRQNQFYDTQVIKQENESGYERRPLEMEQQQAYRPEMKTEMKQGAPTSFLPPEASQLKPDRQQFQSRKRPYEENRGRGYFEHREDRRGRSPQPPAEEDEDDFDDTLVAIDTYNCDLHFKVARDRSSGYPLTIEGFAYLWSGARASYGVRRGRVCFEMKINEEISVKHLPSTEPDPHVVRIGWSLDSCSTQLGEEPFSYGYGGTGKKSTNSRFENYGDKFAENDVIGCFADFECGNDVELSFTKNGKWMGIAFRIQKEALGGQALYPHVLVKNCAVEFNFGQRAEPYCSVLPGFTFIQHLPLSERIRGTVGPKSKAECEILMMVGLPAAGKTTWAIKHAASNPSKKYNILGTNAIMDKMRVMGLRRQRNYAGRWDVLIQQATQCLNRLIQIAARKKRNYILDQTNVYGSAQRRKMRPFEGFQRKAIVICPTDEDLKDRTIKRTDEEGKDVPDHAVLEMKANFTLPDVGDFLDEVLFIELQREEADKLVRQYNEEGRKAGPPPEKRFDNRGGGGFRGRGGGGGFQRYENRGPPGGNRGGFQNRGGGSGGGGNYRGGFNRSGGGGYSQNRWGNNNRDNNNSNNRGSYNRAPQQQPPPQQPPPPQPPPQQPPPPPSYSPARNPPGASTYNKNSNIPGSSANTSTPTVSSYSPPQPSYSQPPYNQGGYSQGYTAPPPPPPPPPAYNYGSYGGYNPAPYTPPPPPTAQTYPQPSYNQYQQYAQQWNQYYQNQGQWPPYYGNYDYGSYSGNTQGGTSTQ

SEQ ID NO: 1768 - protein, 206 aa, Homo sapiens
MAVKKIAIFGATGQTGLTTLAQAVQAGYEVTVLVRDSSRLPSEGPRPAHVVVGDVLQAADVDKTVAGQDAVIVLLGTRNDLSPTTVMSEGARNIVAAMKAHGVDKVVACTSAFLLWDPTKVPPRLQAVTDDHIRMHKVLRESGLKYVAVMPPHIGDQPLTGAYTVTLDGRGPSRVISKHDLGHFMLRCLTTDEYDGHSTYPSHQYQ

SEQ ID NO: 1769 - protein, 683 aa, Homo sapiens
MRRCPCRGSLNEAEAGALPAAARMGLEAPRGGRRRQPGQQRPGPGAGAPAGRPEGGGPWARTEGSSLHSEPERAGLGPAPGTESPQAEFWTDGQTEPAAAGLGVETERPKQKTEPDRSSLRTHLEWSWSELETTCLWTETGTDGLWTDPHRSDLQFQPEEASPWTQPGVHGPWTELETHGSQTQPERVKSWADNLWTHQNSSSLQTHPEGACPSKEPSADGSWKELYTDGSRTQQDIEGPWTEPYTDGSQKKQDTEAARKQPGTGGFQIQQDTDGSWTQPSTDGSQTAPGTDCLLGEPEDGPLEEPEPGELLTHLYSHLKCSPLCPVPRLIITPETPEPEAQPVGPPSRVEGGSGGFSSASSFDESEDDVVAGGGGASDPEDRSGSKPWKKLKTVLKYSPFVVSFRKHYPWVQLSGHAGNFQAGEDGRILKRFCQCEQRSLEQLMKDPLRPFVPAYYGMVLQDGQTFNQMEDLLADFEGPSIMDCKMGSRTYLEEELVKARERPRPRKDMYEKMVAVDPGAPTPEEHAQGAVTKPRYMQWRETMSSTSTLGFRIEGIKKADGTCNTNFKKTQALEQVTKVLEDFVDGDHVILQKYVACLEELREALEISPFFKTHEVVGSSLLFVHDHTGLAKVWMIDFGKTVALPDHQTLSHRLPWAEGNREDGYLWGLDNMICLLQGLAQS

SEQ ID NO: 1770 - protein, 2564 aa, Homo sapiens
MAQVPGEVDNMEGLPAPNNNPAARWESPDRGWEREQPAASTAAASLFECSRIKALADEREAVQKKTFTKWVNSHLARVGCHIGDLYVDLRDGFVLTRLLEVLSGEQLPRPTRGRMRIHSLENVDKALQFLKEQRVHLENVGSHDIVDGNHRLTLGLVWTIILRFQIQVIKIETEDNRETRSAKDALLLWCQMKTAGYPEVNIQNFTTSWRDGLAFNALIHRHRPDLVDFSKLTKSNANYNLQRAFRTAEQHLGLARLLDPEDVNMEAPDEKSIITYVVSFYHYFSKMKALAVEGKRIGKVLDQVLEVGKIIERYEELAAELLAWIHRTVGLISNQKFANSLSGVQQQLQAFTAYCTLEKPVKFQEKGNLEVLLFSIQSKLRACNRRLFVPREGCGIWDIDKAWGELEKAEHEREAALRAELIRQEKLELLAQRFDHKVAMRESWLNENQRLVSQDNFGYELPAVEAAMKKHEAIEADIAAYEERVQGVAELAQALAAEGYYDIRRVAAQRDSVLRQWALLTGLVGARRTRLEQNLALQKVFQEMVYMVDWMEEMQAQLLSRECGQHLVEADDLLQKHGLLEGDIAAQSERVEALNAAALRFSQLQGYQPCDPQVICNRVNHVHGCLAELQEQAARRRAELEASRSLWALLQELEEAESWARDKERLLEAAGGGGAAGAAGAAGTAGGAHDLSSTARLLAQHKILQGELGGRRALLQQALRCGEELVAAGGAVGPGADTVHLVGLAERAASARRRWQRLEEAAARRERRLQEARALHQFGADLDGLLDWLRDAYRLAAAGDFGHDEASSRRLARQHRALTGEVEAHRGPVSGLRRQLATLGGASGAGPLVVALQVRVVEAEQLFAEVTEVAALRRQWLRDALAVYRMFGEVHACELWIGEKEQWLLSMRVPDSLDDVEVVQHRFESLDQEMNSLMGRVLDVNHTVQELVEGGHPSSDEVRSCQDHLNSRWNRIVELVEQRKEEMSAVLLVENHVLEVAEVRAQVREKRRAVESAPRAGGALQWRLSGLEAALQALEPRQAALLEEAALLAERFPAQAARLHQGAEELGAEWGALASAAQACGEAVAAAGRLQRFLHDLDAFLDWLVRAQEAAGGSEGPLPNSLEEADALLARHAALKEEVDQREEDYARIVAASEALLAADGAELGPGLALDEWLPHLELGWHKLLGLWEARREALVQAHIYQLFLRDLRQALVVLRNQEMALSGAELPGTVESVEEALKQHRDFLTTMELSQQKMQVAVQAAEGLLRQGNIYGEQAQEAVTRLLEKNQENQLRAQQWMQKLHDQLELQHFLRDCHELDGWIHEKMLMARDGTREDNHKLHKRWLRHQAFMAELAQNKEWLEKIEREGQQLMQEKPELAASVRKKLGEIRQCWAELESTTQAKARQLFEASKADQLVQSFAELDKKLLHMESQLQDVDPGGDLATVNSQLKKLQSMESQVEEWYREVGELQAQTAALPLEPASKELVGERQNAVGERLVRLLEPLQERRRLLLASKELHQVAHDLDDELAWVQERLPLAMQTERGNGLQAVQQHIKKNQGLRREIQAHGPRLEEVLERAGALASLRSPEAEAVRRGLEQLQSAWAGLREAAERRQQVLDAAFQVEQYYFDVAEVEAWLGEQELLMMSEDKGKDEQSTLQLLKKHLQLEQGVENYEESIAQLSRQCRALLEMGHPDSEQISRRQSQVDRLYVALKELGEERRVALEQQYWLYQLSRQVSELEHWIAEKEVVAGSPELGQDFEHVSVLQEKFSEFASETGMAGRERLAAVNQMVDELIECGHTAAATMAEWKDGLNEAWAELLELMGTRAQLLAASRELHKFFSDARELQGQIEEKRRRLPRLTTPPEPRPSASSMQRTLRAFEHDLQLLVSQVRQLQEGAAQLRTVYAGEHAEAIASREQEVLQGWKELLSACEDARLHVSSTADALRFHSQVRDLLSWMDGIASQIGAADKPRDVSSVEVLMNYHQGLKTELEARVPELTTCQELGRSLLLNKSAMADEIQAQLDKLGTRKEEVSEKWDRHWEWLQQMLEVHQFAQEAVVADAWLTAQEPLLQSRELGSSVDEVEQLIRRHEAFRKAAAAWEERFSSLRRLTTIEKIKAEQSKQPPTPLLGRKFFGDPTELAAKAAPLLRPGGYERGLEPLARRASDTLSAEVRTRVGYVRQELKPERLQPRIDRLPEIPGRVEPAALPAAPEDAAETPATPAAAEQVRPRPERQESADRAEELPRRRRPERQESVDQSEEAARRRRPERQESAEHEAAHSLTLGRYEQMERRRERRERRLERQESSEQEMPIRGDLVKGKATLADIVEQLQEKEAGPGLPAGPSLPQPRELPPGRLPNGLELPERTPRPDRPRARDRPKPRRRPRPREGGEGGGSRRSRSAPAQGGSAPAPPPPPTHTVQHEGFLLRKRELDANRKSSNRSWVSLYCVLSKGELGFYKDSKGPASGSTHGGEPLLSLHKATSEVASDYKKKKHVFKLQTQDGSEFLLQAKDEEEMNGWLEAVASSVAEHAEIARWGQTLPTTSSTDEGNPKREGGDRRASGRRK

SEQ ID NO: 1771 - protein, 1362 aa, Homo sapiens
MSAESGPGTRLRNLPVMGDGLETSQMSTTQAQAQPQPANAASTNPPPPETSNPNKPKRQTNQLQYLLRVVLKTLWKHQFAWPFQQPVDAVKLNLPDYYKIIKTPMDMGTIKKRLENNYYWNAQECIQDFNTMFTNCYIYNKPGDDIVLMAEALEKLFLQKINELPTEETEIMIVQAKGRGRGRKETGTAKPGVSTVPNTTQASTPPQTQTPQPNPPPVQATPHPFPAVTPDLIVQTPVMTVVPPQPLQTPPPVPPQPQPPPAPAPQPVQSHPPIIAATPQPVKTKKGVKRKADTTTPTTIDPIHEPPSLPPEPKTTKLGQRRESSRPVKPPKKDVPDSQQHPAPEKSSKVSEQLKCCSGILKEMFAKKHAAYAWPFYKPVDVEALGLHDYCDIIKHPMDMSTIKSKLEAREYRDAQEFGADVRLMFSNCYKYNPPDHEVVAMARKLQDVFEMRFAKMPDEPEEPVVAVSSPAVPPPTKVVAPPSSSDSSSDSSSDSDSSTDDSEEERAQRLAELQEQLKAVHEQLAALSQPQQNKPKKKEKDKKEKKKEKHKRKEEVEENKKSKAKEPPPKKTKKNNSSNSNVSKKEPAPMKSKPPPTYESEEEDKCKPMSYEEKRQLSLDINKLPGEKLGRVVHIIQSREPSLKNSNPDEIEIDFETLKPSTLRELERYVTSCLRKKRKPQAEKVDVIAGSSKMKGFSSSESESSSESSSSDSEDSETEMAPKSKKKGHPGREQKKHHHHHHQQMQQAPAPVPQQPPPPPQQPPPPPPPQQQQQPPPPPPPPSMPQQAAPAMKSSPPPFIATQVPVLEPQLPGSVFDPIGHFTQPILHLPQPELPPHLPQPPEHSTPPHLNQHAVVSPPALHNALPQQPSRPSNRAAALPPKPARPPAVSPALTQTPLLPQPPMAQPPQVLLEDEEPPAPPLTSMQMQLYLQQLQKVQPPTPLLPSVKVQSQPPPPLPPPPHPSVQQQLQQQPPPPPPPQPQPPPQQQHQPPPRPVHLQPMQFSTHIQQPPPPQGQQPPHPPPGQQPPPPQPAKPQQVIQHHHSPRHHKSDPYSTGHLREAPSPLMIHSPQMSQFQSLTHQSPPQQNVQPKKQELRAASVVQPQPLVVVKEEKIHSPIIRSEPFSPSLRPEPPKHPESIKAPVHLPQRPEMKPVDVGRPVIRPPEQNAPPPGAPDKDKQKQEPKTPVAPKKDLKIKNMGSWASLVQKHPTTPSSTAKSSSDSFEQFRRAAREKEEREKALKAQAEHAEKEKERLRQERMRSREDEDALEQARRAHEEARRRQEQQQQQRQEQQQQQQQQAAAVAAAATPQAQSSQPQSMLDQQRELARKREQERRRREAMAATIDMNFQSDLLSIFEENLF

SEQ ID NO: 1772 - protein, 636 aa, Homo sapiens
MRGGRGAPFWLWPLPKLALLPLLWVLFQRTRPQGSAGPLQCYGVGPLGDLNCSWEPLGDLGAPSELHLQSQKYRSNKTQTVAVAAGRSWVAIPREQLTMSDKLLVWGTKAGQPLWPPVFVNLETQMKPNAPRLGPDVDFSEDDPLEATVHWAPPTWPSHKVLICQFHYRRCQEAAWTLLEPELKTIPLTPVEIQDLELATGYKVYGRCRMEKEEDLWGEWSPILSFQTPPSAPKDVWVSGNLCGTPGGEEPLLLWKAPGPCVQVSYKVWFWVGGRELSPEGITCCCSLIPSGAEWARVSAVNATSWEPLTNLSLVCLDSASAPRSVAVSSIAGSTELLVTWQPGPGEPLEHVVDWARDGDPLEKLNWVRLPPGNLSALLPGNFTVGVPYRITVTAVSASGLASASSVWGFREELAPLVGPTLWRLQDAPPGTPAIAWGEVPRHQLRGHLTHYTLCAQSGTSPSVCMNVSGNTQSVTLPDLPWGPCELWVTASTIAGQGPPGPILRLHLPDNTLRWKVLPGILFLWGLFLLGCGLSLATSGRCYHLRHKVLPRWVWEKVPDPANSSSGQPHMEQVPEAQPLGDLPILEVEEMEPPPVMESSQPAQATAPLDSGYEKHFLPTPEELGLLGPPRPQVLA

SEQ ID NO: 1773 - protein, 794 aa, Homo sapiens
MEGSLAGSLAAPDRPQGPERLPGPAPRENIEGGAEAAEGEGGIFRSTRYLPVTKEGPRDILDGRGGISVANFDPGTFSLMRCDFCGAGFDTRAGLSSHARAHLRDFGITNWELTVSPINILQELLATSAAEQPPSPLGREPGGPPGSFLTSRRPRLPLTVPFPPTWAEDPGPAYGDASGPEPARDIRCEFCGEFFENRKGLSSHARSHLRQMGVTEWYVNGSPIDTLREILKRRTQSRPGGPPNPPGPSPKALAKMMGGAGPGSSLEARSPSDLHISPLAKKLPPPPGSPLGHSPTASPPPTARKMFPGLAAPSLPKKLKPEQIRVEIKREMLPGALHGELHPSEGPWGAPREDMTPLNLSSRAEPVRDIRCEFCGEFFENRKGLSSHARSHLRQMGVTEWSVNGSPIDTLREILKKKSKPCLIKKEPPAGDLAPALAEDGPPTVAPGPVQSPLPLSPLAGRPGKPGAGPAQVPRELSLTPITGAKPSATGYLGSVAAKRPLQEDRLLPAEVKAKTYIQTELPFKAKTLHEKTSHSSTEACCELCGLYFENRKALASHARAHLRQFGVTEWCVNGSPIETLSEWIKHRPQKVGAYRSYIQGGRPFTKKFRSAGHGRDSDKRPSLGLAPGGLAVVGRSAGGEPGPEAGRAADGGERPLAASPPGTVKAEEHQRQNINKFERRQARPPDASAARGGEDTNDLQQKLEEVRQPPPRVRPVPSLVPRPPQTSLVKFVGNIYTLKCRFCEVEFQGPLSIQEEWVRHLQRHILEMNFSKADPPPEESQAPQAQTAAAEAP

SEQ ID NO: 1774 - protein, 2321 aa, Homo sapiens
MGPGARGRRRRRRPMSPPPPPPPVRALPLLLLLAGPGAAAPPCLDGSPCANGGRCTQLPSREAACLCPPGWVGERCQLEDPCHSGPCAGRGVCQSSVVAGTARFSCRCPRGFRGPDCSLPDPCLSSPCAHGARCSVGPDGRFLCSCPPGYQGRSCRSDVDECRVGEPCRHGGTCLNTPGSFRCQCPAGYTGPLCENPAVPCAPSPCRNGGTCRQSGDLTYDCACLPGFEGQNCEVNVDDCPGHRCLNGGTCVDGVNTYNCQCPPEWTGQFCTEDVDECQLQPNACHNGGTCFNTLGGHSCVCVNGWTGESCSQNIDDCATAVCFHGATCHDRVASFYCACPMGKTGLLCHLDDACVSNPCHEDAICDTNPVNGRAICTCPPGFTGGACDQDVDECSIGANPCEHLGRCVNTQGSFLCQCGRGYTGPRCETDVNECLSGPCRNQATCLDRIGQFTCICMAGFTGTYCEVDIDECQSSPCVNGGVCKDRVNGFSCTCPSGFSGSTCQLDVDECASTPCRNGAKCVDQPDGYECRCAEGFEGTLCDRNVDDCSPDPCHHGRCVDGIASFSCACAPGYTGTRCESQVDECRSQPCRHGGKCLDLVDKYLCRCPSGTTGVNCEVNIDDCASNPCTFGVCRDGINRYDCVCQPGFTGPLCNVEINECASSPCGEGGSCVDGENGFRCLCPPGSLPPLCLPPSHPCAHEPCSHGICYDAPGGFRCVCEPGWSGPRCSQSLARDACESQPCRAGGTCSSDGMGFHCTCPPGVQGRQCELLSPCTPNPCEHGGRCESAPGQLPVCSCPQGWQGPRCQQDVDECAGPAPCGPHGICTNLAGSFSCTCHGGYTGPSCDQDINDCDPNPCLNGGSCQDGVGSFSCSCLPGFAGPRCARDVDECLSNPCGPGTCTDHVASFTCTCPPGYGGFHCEQDLPDCSPSSCFNGGTCVDGVNSFSCLCRPGYTGAHCQHEADPCLSRPCLHGGVCSAAHPGFRCTCLESFTGPQCQTLVDWCSRQPCQNGGRCVQTGAYCLCPPGWSGRLCDIRSLPCREAAAQIGVRLEQLCQAGGQCVDEDSSHYCVCPEGRTGSHCEQEVDPCLAQPCQHGGTCRGYMGGYMCECLPGYNGDNCEDDVDECASQPCQHGGSCIDLVARYLCSCPPGTLGVLCEINEDDCGPGPPLDSGPRCLHNGTCVDLVGGFRCTCPPGYTGLRCEADINECRSGACHAAHTRDCLQDPGGGFRCLCHAGFSGPRCQTVLSPCESQPCQHGGQCRPSPGPGGGLTFTCHCAQPFWGPRCERVARSCRELQCPVGVPCQQTPRGPRCACPPGLSGPSCRSFPGSPPGASNASCAAAPCLHGGSCRPAPLAPFFRCACAQGWTGPRCEAPAAAPEVSEEPRCPRAACQAKRGDQRCDRECNSPGCGWDGGDCSLSVGDPWRQCEALQCWRLFNNSRCDPACSSPACLYDNFDCHAGGRERTCNPVYEKYCADHFADGRCDQGCNTEECGWDGLDCASEVPALLARGVLVLTVLLPPEELLRSSADFLQRLSAILRTSLRFRLDAHGQAMVFPYHRPSPGSEPRARRELAPEVIGSVVMLEIDNRLCLQSPENDHCFPDAQSAADYLGALSAVERLDFPYPLRDVRGEPLEPPEPSVPLLPLLVAGAVLLLVILVLGVMVARRKREHSTLWFPEGFSLHKDVASGHKGRREPVGQDALGMKNMAKGESLMGEVATDWMDTECPEAKRLKVEEPGMGAEEAVDCRQWTQHHLVAADIRVAPAMALTPPQGDADADGMDVNVRGPDGFTPLMLASFCGGALEPMPTEEDEADDTSASIISDLICQGAQLGARTDRTGETALHLAARYARADAAKRLLDAGADTNAQDHSGRTPLHTAVTADAQGVFQILIRNRSTDLDARMADGSTALILAARLAVEGMVEELIASHADVNAVDELGKSALHWAAAVNNVEATLALLKNGANKDMQDSKEETPLFLAAREGSYEAAKLLLDHFANREITDHLDRLPRDVAQERLHQDIVRLLDQPSGPRSPPGPHGLGPLLCPPGAFLPGLKAAQSGSKKSRRPPGKAGLGPQGPRGRGKKLTLACPGPLADSSVTLSPVDSLDSPRPFGGPPASPGGFPLEGPYAAATATAVSLAQLGGPGRAGLGRQPPGGCVLSLGLLNPVAVPLDWARLPPPAPPGPSFLLPLAPGPQLLNPGTPVSPQERPPPYLAVPGHGEEYPAAGAHSSPPKARFLRVPSEHPYLTPSPESPEHWASPSPPSLSDWSESTPSPATATGAMATTTGALPAQPLPLSVPSSLAQAQTQLGPQPEVTPKRQVLA

SEQ ID NO: 1775 - protein, 600 aa, Homo sapiens
MTAAPASPQQIRDRLLQAIDPQSNIRNMVAVLEVISSLEKYPITKEALEETRLGKLINDVRKKTKNEELAKRAKKLLRSWQKLIEPAHQHEAALRGLAGATGSANGGAHNCRPEVGAAGPPRSIHDLKSRNDLQRLPGQRLDRLGSRKRRGDQRDLGHPGPPPKVSKASHDPLVPNSSPLPTNGISGSPESFASSLDGSGHAGPEGSRLERDENDKHSGKIPVNAVRPHTSSPGLGKPPGPCLQPKASVLQQLDRVDETPGPPHPKGPPRCSFSPRNSRHEGSFARQQSLYAPKGSVPSPSPRPQALDATQVPSPLPLAQPSTPPVRRLELLPSAESPVCWLEQPESHQRLAGPGCKAGLSPAEPLLSRAGFSPDSSKADSDAASSGGSDSKKKKRYRPRDYTVNLDGQVAEAGVKPVRLKERKLTFDPMTRQIKPLTQKEPVRADSPVHMEQQSRTELDKQEAKASLQSPFEQTNWKELSRNEIIQSYLSRQSSLLSSSGAQTPGAHHFMSEYLKQEESTRQGARQLHVLVPQSPPTDLPGLTREVTQDDLDRIQASQWPGVNGCQDTQGNWYDWTQCISLDPHGDDGRLNILPYVCLD

SEQ ID NO: 1776 - protein, 559 aa, Homo sapiens
MSACRSFAVAICILEISILTAQYTTSYDPELTESSGSASHIDCRMSPWSEWSQCDPCLRQMFRSRSIEVFGQFNGKRCTDAVGDRRQCVPTEPCEDAEDDCGNDFQCSTGRCIKMRLRCNGDNDCGDFSDEDDCESEPRPPCRDRVVEESELARTAGYGINILGMDPLSTPFDNEFYNGLCNRDRDGNTLTYYRRPWNVASLIYETKGEKNFRTEHYEEQIEAFKSIIQEKTSNFNAAISLKFTPTETNKAEQCCEETASSISLHGKGSFRFSYSKNETYQLFLSYSSKKEKMFLHVKGEIHLGRFVMRNRDVVLTTTFVDDIKALPTTYEKGEYFAFLETYGTHYSSSGSLGGLYELIYVLDKASMKRKGVELKDIKRCLGYHLDVSLAFSEISVGAEFNKDDCVKRGEGRAVNITSENLIDDVVSLIRGGTRKYAFELKEKLLRGTVIDVTDFVNWASSINDAPVLISQKLSPIYNLVPVKMKNAHLKKQNLERAIEDYINEFSVRKCHTCQNGGTVILMDGKCLCACPFKFEGIACEISKQKISEGLPALEFPNEK

SEQ ID NO: 1777 - protein, 1097 aa, Homo sapiens
MMDIYVCLKRPSWMVDNKRMRTASNFQWLLSTFILLYLMNQVNSQKKGAPHDLKCVTNNLQVWNCSWKAPSGTGRGTDYEVCIENRSRSCYQLEKTSIKIPALSHGDYEITINSLHDFGSSTSKFTLNEQNVSLIPDTPEILNLSADFSTSTLYLKWNDRGSVFPHRSNVIWEIKVLRKESMELVKLVTHNTTLNGKDTLHHWSWASDMPLECAIHFVEIRCYIDNLHFSGLEEWSDWSPVKNISWIPDSQTKVFPQDKVILVGSDITFCCVSQEKVLSALIGHTNCPLIHLDGENVAIKIRNISVSASSGTNVVFTTEDNIFGTVIFAGYPPDTPQQLNCETHDLKEIICSWNPGRVTALVGPRATSYTLVESFSGKYVRLKRAEAPTNESYQLLFQMLPNQEIYNFTLNAHNPLGRSQSTILVNITEKVYPHTPTSFKVKDINSTAVKLSWHLPGNFAKINFLCEIEIKKSNSVQEQRNVTIKGVENSSYLVALDKLNPYTLYTFRIRCSTETFWKWSKWSNKKQHLTTEASPSKGPDTWREWSSDGKNLIIYWKPLPINEANGKILSYNVSCSSDEETQSLSEIPDPQHKAEIRLDKNDYIISVVAKNSVGSSPPSKIASMEIPNDDLKIEQVVGMGKGILLTWHYDPNMTCDYVIKWCNSSRSEPCLMDWRKVPSNSTETVIESDEFRPGIRYNFFLYGCRNQGYQLLRSMIGYIEELAPIVAPNFTVEDTSADSILVKWEDIPVEELRGFLRGYLFYFGKGERDTSKMRVLESGRSDIKVKNITDISQKTLRIADLQGKTSYHLVLRAYTDGGVGPEKSMYVVTKENSVGLIIAILIPVAVAVIVGVVTSILCYRKREWIKETFYPDIPNPENCKALQFQKSVCEGSSALKTLEMNPCTPNNVEVLETRSAFPKIEDTEIISPVAERPEDRSDAEPENHVVVSYCPPIIEEEIPNPAADEAGGTAQVIYIDVQSMYQPQAKPEEEQENDPVGGAGYKPQMHLPINSTVEDIAAEEDLDKTAGYRPQANVNTWNLVSPDSPRSIDSNSEIVSFGSPCSINSRQFLIPPKDEDSPKSNGGGWSFTNFFQNKPND

SEQ ID NO: 1778 - protein, 934 aa, Homo sapiens
MARRSVLYFILLNALINKGQACFCDHYAWTQWTSCSKTCNSGTQSRHRQIVVDKYYQENFCEQICSKQETRECNWQRCPINCLLGDFGPWSDCDPCIEKQSKVRSVLRPSQFGGQPCTAPLVAFQPCIPSKLCKIEEADCKNKFRCDSGRCIARKLECNGENDCGDNSDERDCGRTKAVCTRKYNPIPSVQLMGNGFHFLAGEPRGEVLDNSFTGGICKTVKSSRTSNPYRVPANLENVGFEVQTAEDDLKTDFYKDLTSLGHNENQQGSFSSQGGSSFSVPIFYSSKRSENINHNSAFKQAIQASHKKDSSFIRIHKVMKVLNFTTKAKDLHLSDVFLKALNHLPLEYNSALYSRIFDDFGTHYFTSGSLGGVYDLLYQFSSEELKNSGLTEEEAKHCVRIETKKRVLFAKKTKVEHRCTTNKLSEKHEGSFIQGAEKSISLIRGGRSEYGAALAWEKGSSGLEEKTFSEWLESVKENPAVIDFELAPIVDLVRNIPCAVTKRNNLRKALQEYAAKFDPCQCAPCPNNGRPTLSGTECLCVCQSGTYGENCEKQSPDYKSNAVDGQWGCWSSWSTCDATYKRSRTRECNNPAPQRGGKRCEGEKRQEEDCTFSIMENNGQPCINDDEEMKEVDLPEIEADSGCPQPVPPENGFIRNEKQLYLVGEDVEISCLTGFETVGYQYFRCLPDGTWRQGDVECQRTECIKPVVQEVLTITPFQRLYRIGESIELTCPKGFVVAGPSRYTCQGNSWTPPISNSLTCEKDTLTKLKGHCQLGQKQSGSECICMSPEEDCSHHSEDLCVFDTDSNDYFTSPACKFLAEKCLNNQQLHFLHIGSCQDGRQLEWGLERTRLSSNSTKKESCGYDTCYDWEKCSASTSKCVCLLPPQCFKGGNQLYCVKMGSSTSEKTLNICEVGTIRCANRKMEILHPGKCLA

SEQ ID NO: 1779 - protein, 491 aa, Homo sapiens
MTLTLSVLICLGLSVGPRTCVQAGTLPKPTLWAEPASVIARGKPVTLWCQGPLETEEYRLDKEGLPWARKRQNPLEPGAKAKFHIPSTVYDSAGRYRCYYETPAGWSEPSDPLELVATGVSRKPSLLIPQGSVVARGGSLTLQCRSDVGYDIFVLYKEGEHDLVQGSGQQPQAGLSQANFTLGPVSRSHGGQYRCYGAHNLSPRWSAPSDPLDILIAGLIPDIPALSVQPGPKVASGENVTLLCQSWHQIDTFFLTKEGAAHPPLCLKSKYQSYRHQAEFSMSPVTSAQGGTYRCYSAIRSYPYLLSSPSYPQELVVSGPSGDPSLSPTGSTPTPAGPEDQPLTPTGLDPQSGLGRHLGVVTGVSVAFVLLLFLLLFLLLRHRHQSKHRTSAHFYRPAGAAGPEPKDQGLQKRASPVADIQEEILNAAVKDTQPKDGVEMDAPAAASEAPQDVTYAQLHSLTLRREATEPPPSQEREPPAEPSIYAPLAIH

SEQ ID NO: 1780 - protein, 697 aa, Homo sapiens
MAGLGPGVGDSEGGPRPLFCRKGALRQKVVHEVKSHKFTARFFKQPTFCSHCTDFIWGIGKQGLQCQVCSFVVHRRCHEFVTFECPGAGKGPQTDDPRNKHKFRLHSYSSPTFCDHCGSLLYGLVHQGMKCSCCEMNVHRRCVRSVPSLCGVDHTERRGRLQLEIRAPTADEIHVTVGEARNLIPMDPNGLSDPYVKLKLIPDPRNLTKQKTRTVKATLNPVWNETFVFNLKPGDVERRLSVEVWDWDRTSRNDFMGAMSFGVSELLKAPVDGWYKLLNQEEGEYYNVPVADADNCSLLQKFEACNYPLELYERVRMGPSSSPIPSPSPSPTDPKRCFFGASPGRLHISDFSFLMVLGKGSFGKVMLAERRGSDELYAIKILKKDVIVQDDDVDCTLVEKRVLALGGRGPGGRPHFLTQLHSTFQTPDRLYFVMEYVTGGDLMYHIQQLGKFKEPHAAFYAAEIAIGLFFLHNQGIIYRDLKLDNVMLDAEGHIKITDFGMCKENVFPGTTTRTFCGTPDYIAPEIIAYQPYGKSVDWWSFGVLLYEMLAGQPPFDGEDEEELFQAIMEQTVTYPKSLSREAVAICKGFLTKHPGKRLGSGPDGEPTIRAHGFFRWIDWERLERLEIPPPFRPRPCGRSGENFDKFFTRAAPALTPPDRLVLASIDQADFQGFTYVNPDFVHPDARSPTSPVPVPVM

SEQ ID NO: 1781 - protein, 782 aa, Homo sapiens
MSGEDGPAAGPGAAAAAARERRREQLRQWGARAGAEPGPGERRARTVRFERAAEFLAACAGGDLDEARLMLRAADPGPGAELDPAAPPPARAVLDSTNADGISALHQACIDENLEVVRFLVEQGATVNQADNEGWTPLHVAASCGYLDIARYLLSHGANIAAVNSDGDLPLDLAESDAMEGLLKAEIARRGVDVEAAKRAEEELLLHDTRCWLNGGAMPEARHPRTGASALHVAAAKGYIEVMRLLLQAGYDPELRDGDGWTPLHAAAHWGVEDACRLLAEHGGGMDSLTHAGQRPCDLADEEVLSLLEELARKQEDLRNQKEASQSRGQEPQAPSSSKHRRSSVCRLSSREKISLQDLSKERRPGGAGGPPIQDEDEGEEGPTEPPPAEPRTLNGVSSPPHPSPKSPVQLEEAPFSRRFGLLKTGSSGALGPPERRTAEGAPGAGLQRSASSSWLEGTSTQAKELRLARITPTPSPKLPEPSVLSEVTKPPPCLENSSPPSRIPEPESPAKPNVPTASTAPPADSRDRRRSYQMPVRDEESESQRKARSRLMRQSRRSTQGVTLTDLKEAEKAAGKAPESEKPAQSLDPSRRPRVPGVENSDSPAQRAEAPDGQGPGPQAAREHRKVGKEWRGPAEGEEAEPADRSQESSTLEGGPSARRQRWQRDLNPEPEPESEEPDGGFRTLYAELRRENERLREALTETTLRLAQLKVELERATQRQERFAERPALLELERFERRALERKAAELEEELKALSDLRADNQRLKDENAALIRVISKLSK

SEQ ID NO: 1782 - protein, 937 aa, Homo sapiens
MAGAGGGLGVWGNLVLLGLCSWTGARAPAPNPGRNLTVETQTTSSISLSWEVPDGLDSQNSNYWVQCTGDGGTTETRNTTATNVTVDGLGPGSLYTCSVWVEKDGVNSSVGTVTTATAPNPVRNLTVEAQTNSSIALTWEVPDGPDPQNSTYGVEYTGDGGRAGTRSTAHTNITVDRLEPGCLYVFSVWVGKNGINSSRETRNATTAPNPVRNLHMETQTNSSIALCWEVPDGPYPQDYTYWVEYTGDGGGTETRNTTNTSVTAERLEPGTLYTFSVWAEKNGARGSRQNVSISTVPNAVTSLSKQDWTNSTIALRWTAPQGPGQSSYSYWVSWVREGMTDPRTQSTSGTDITLKELEAGSLYHLTVWAERNEVRGYNSTLTAATAPNEVTDLQNETQTKNSVMLWWKAPGDPHSQLYVYWVQWASKGHPRRGQDPQANWVNQTSRTNETWYKVEALEPGTLYNFTVWAERNDVASSTQSLCASTYPDTVTITSCVSTSAGYGVNLIWSCPQGGYEAFELEVGGQRGSQDRSSCGEAVSVLGLGPARSYPATITTIWDGMKVVSHSVVCHTESAGVIAGAFVGILLFLILVGLLIFFLKRRNKKKQQKPELRDLVFSSPGDIPAEDFADHVRKNERDSNCGFADEYQQLSLVGHSQSQMVASASENNAKNRYRNVLPYDWSRVPLKPIHEEPGSDYINASFMPGLWSPQEFIATQGPLPQTVGDFWRLVWEQQSHTLVMLTNCMEAGRVKCEHYWPLDSQPCTHGHLRVTLVGEEVMENWTVRELLLLQVEEQKTLSVRQFHYQAWPDHGVPSSPDTLLAFWRMLRQWLDQTMEGGPPIVHCSAGVGRTGTLIALDVLLRQLQSEGLLGPFSFVRKMRESRPLMVQTEAQYVFLHQCILRFLQQSAQAPAEKEVPYEDVENLIYENVAAIQAHKLEV

SEQ ID NO: 1783 - protein, 1059 aa, Homo sapiens
MVSSAQMGFNLQALLEQLSQDELSKFKYLITTFSLAHELQKIPHKEVDKADGKQLVEILTTHCDSYWVEMASLQVFEKMHRMDLSERAKDEVREAALKSFNKRKPLSLGITRKERPPLDVDEMLERFKTEAQETKGNVICLGKEVFKGKKPDKDNRCRYILKTKFREMWKSWPGDSKEVQVMAERYKMLIPFSNPRVLPGPFSYTVVLYGPAGLGKTTLAQKLMLDWAEDNLIHKFKYAFYLSCRELSRLGPCSFAELVFRDWPELQDDIPHILAQARKILFVIDGFDELGAAPGALIEDICGDWEKKKPVPVLLGSLLNRVMLPKAALLVTTRPRALRDLRILAEEPIYIRVEGFLEEDRRAYFLRHFGDEDQAMRAFELMRSNAALFQLGSAPAVCWIVCTTLKLQMEKGEDPVPTCLTRTGLFLRFLCSRFPQGAQLRGALRTLSLLAAQGLWAQTSVLHREDLERLGVQESDLRLFLDGDILRQDRVSKGCYSFIHLSFQQFLTALFYTLEKEEEEDRDGHTWDIGDVQKLLSGVERLRNPDLIQAGYYSFGLANEKRAKELEATFGCRMSPDIKQELLRCDISCKGGHSTVTDLQELLGCLYESQEEELVKEVMAQFKEISLHLNAVDVVPSSFCVKHCRNLQKMSLQVIKENLPENVTASESDAEVERSQDDQHMLPFWTDLCSIFGSNKDLMGLAINDSFLSASLVRILCEQIASDTCHLQRVVFKNISPADAHRNLCLALRGHKTVTYLTLQGNDQDDMFPALCEVLRHPECNLRYLGLVSCSATTQQWADLSLALEVNQSLTCVNLSDNELLDEGAKLLYTTLRHPKCFLQRLSLENCHLTEANCKDLAAVLVVSRELTHLCLAKNPIGNTGVKFLCEGLRYPECKLQTLVLWNCDITSDGCCDLTKLLQEKSSLLCLDLGLNHIGVKGMKFLCEALRKPLCNLRCLWLWGCSIPPFSCEDLCSALSCNQSLVTLDLGQNPLGSSGVKMLFETLTCSSGTLRTLRLKIDDFNDELNKLLEEIEEKNPQLIIDTEKHHPWAERPSSHDFMI

SEQ ID NO: 1784 - protein, 507 aa, Homo sapiens
MEKWYLMTVVVLIGLTVRWTVSLNSYSGAGKPPMFGDYEAQRHWQEITFNLPVKQWYFNSSDNNLQYWGLDYPPLTAYHSLLCAYVAKFINPDWIALHTSRGYESQAHKLFMRTTVLIADLLIYIPAVVLYCCCLKEISTKKKIANALCILLYPGLILIDYGHFQYNSVSLGFALWGVLGISCDCDLLGSLAFCLAINYKQMELYHALPFFCFLLGKCFKKGLKGKGFVLLVKLACIVVASFVLCWLPFFTEREQTLQVLRRLFPVDRGLFEDKVANIWCSFNVFLKIKDILPRHIQLIMSFCSTFLSLLPACIKLILQPSSKGFKFTLVSCALSFFLFSFQVHEKSILLVSLPVCLVLSEIPFMSTWFLLVSTFSMLPLLLKDELLMPSVVTTMAFFIACVTSFSIFEKTSEEELQLKSFSISVRKYLPCFTFLSRIIQYLFLISVITMVLLTLMTVTLDPPQKLPDLFSVLVCFVSCLNFLFFLVYFNIIIMWDSKSGRNQKKIS

SEQ ID NO: 1785 - protein, 900 aa, Homo sapiens
MEPSYGGGLFDMVKGGAGRLFSNLKDNLKDTLKDTSSRVIQSVTSYTKGDLDFTYVTSRIIVMSFPLDNVDIGFRNQVDDIRSFLDSRHLDHYTVYNLSPKSYRTAKFHSRVSECSWPIRQAPSLHNLFAVCRNMYNWLLQNPKNVCVVHCLDGRAASSILVGAMFIFCNLYSTPGPAIRLLYAKRPGIGLSPSHRRYLGYMCDLLADKPYRPHFKPLTIKSITVSPIPFFNKQRNGCRPYCDVLIGETKIYSTCTDFERMKEYRVQDGKIFIPLNITVQGDVVVSMYHLRSTIGSRLQAKVTNTQIFQLQFHTGFIPLDTTVLKFTKPELDACDVPEKYPQLFQVTLDVELQPHDKVIDLTPPWEHYCTKDVNPSILFSSHQEHQDTLALGGQAPIDIPPDNPRHYGQSGFFASLCWQDQKSEKSFCEEDHAALVNQESEQSDDELLTLSSPHGNANGDKPHGVKKPSKKQQEPAAPPPPEDVDLLGLEGSAMSNSFSPPAAPPTNSELLSDLFGGGGAAGPTQAGQSGVEDVFHPSGPASTQSTPRRSATSTSASPTLRVGEGATFDPFGAPSKPSGQDLLGSFLNTSSASSDPFLQPTRSPSPTVHASSTPAVNIQPDVSGGWDWHAKPGGFGMGSKSAATSPTGSSHGTPTHQSKPQTLDPFADLGTLGSSSFASKPTTPTGLGGGFPPLSSPQKASPQPMGGGWQQGGAYNWQQPQPKPQPSMPHSSPQNRPNYNVSFSAMPGGQNERGKGSSNLEGKQKAADFEDLLSGQGFNAHKDKKGPRTIAEMRKEEMAKEMDPEKLKILEWIEGKERNIRALLSTMHTVLWAGETKWKPVGMADLVTPEQVKKVYRKAVLVVHPDKATGQPYEQYAKMIFMELNDAWSEFENQGQKPLY

SEQ ID NO: 1786 - protein, 819 aa, Homo sapiens
MVSWGRFICLVVVTMATLSLARPSFSLVEDTTLEPEEPPTKYQISQPEVYVAAPGESLEVRCLLKDAAVISWTKDGVHLGPNNRTVLIGEYLQIKGATPRDSGLYACTASRTVDSETWYFMVNVTDAISSGDDEDDTDGAEDFVSENSNNKRAPYWTNTEKMEKRLHAVPAANTVKFRCPAGGNPMPTMRWLKNGKEFKQEHRIGGYKVRNQHWSLIMESVVPSDKGNYTCVVENEYGSINHTYHLDVVERSPHRPILQAGLPANASTVVGGDVEFVCKVYSDAQPHIQWIKHVEKNGSKYGPDGLPYLKVLKAAGVNTTDKEIEVLYIRNVTFEDAGEYTCLAGNSIGISFHSAWLTVLPAPGREKEITASPDYLEIAIYCIGVFLIACMVVTVILCRMKNTTKKPDFSSQPAVHKLTKRIPLRRQVSAESSSSMNSNTPLVRITTRLSSTADTPMLAGVSEYELPEDPKWEFPRDKLTLGKPLGEGCFGQVVMAEAVGIDKDKPKEAVTVAVKMLKDDATEKDLSDLVSEMEMMKMIGKHKNIINLLGACTQDGPLYVIVEYASKGNLREYLRARRPPGMEYSYDINRVPEEQMTFKDLVSCTYQLARGMEYLASQKCIHRDLAARNVLVTENNVMKIADFGLARDINNIDYYKKTTNGRLPVKWMAPEALFDRVYTHQSDVWSFGVLMWEIFTLGGSPYPGIPVEELFKLLKEGHRMDKPANCTNELYMMMRDCWHAVPSQRPTFKQLVEDLDRILTLTTNEEYLDLSQPLEQYSPSYPDTRSSCSSGDDSVFSPDPMPYEPCLPQYPHINGSVKT

SEQ ID NO: 1787 - protein, 1224 aa, Homo sapiens
MLPYTVNFKVSARTLTGALNAHNKAAVDWGWQGLIAYGCHSLVVVIDSITAQTLQVLEKHKADVVKVKWARENYHHNIGSPYCLRLASADVNGKIIVWDVAAGVAQCEIQEHAKPIQDVQWLWNQDASRDLLLAIHPPNYIVLWNADTGTKLWKKSYADNILSFSFDPFDPSHLTLLTSEGIVFISDFSPSKPPSGPGKKVYISSPHSSPAHNKLATATGAKKALNKVKILITQEKPSAEFITLNDCLQLAYLPSKRNHMLLLYPREILILDLEVNQTVGVIAIERTGVPFLQVIPCFQRDGLFCLHENGCITLRVRRSYNNIFTTSNEEPDPDPVQELTYDLRSQCDAIRVTKTVRPFSMVCCPVNENAAALVVSDGRVMIWELKSAVCNRNSRNSSSGVSPLYSPVSFCGIPVGVLQNKLPDLSLDNMIGQSAIAGEEHPRGSILREVHLKFLLTGLLSGLPAPQFAIRMCPPLTTKNIKMYQPLLAVGTSNGSVLVYHLTSGLLHKELSIHSCEVKGIEWTSLTSFLSFATSTPNNMGLVRNELQLVDLPTGRSIAFRGERGNDESAIEMIKVSHLKQYLAVVFRDKPLELWDVRTCTLLREMSKNFPTITALEWSPSHNLKSLRKKQLATREAMARQTVVSDTELSIVESSVISLLQEAESKSELSQNISAREHFVFTDIDGQVYHLTVEGNSVKDSARIPPDGSMGSITCIAWKGDTLVLGDMDGNLNFWDLKGRVSRGIPTHRSWVRKIRFAPGKGNQKLIAMYNDGAEVWDTKEVQMVSSLRSGRNVTFRILDVDWCTSDKVILASDDGCIRVLEMSMKSACFRMDEQELTEPVWCPYLLVPRASLALKAFLLHQPWNGQYSLDISHVDYPENEEIKNLLQEQLNSLSNDIKKLLLDPEFTLLQRCLLVSRLYGDESELHFWTVAAHYLHSLSQEKSASTTAPKEAAPRDKLSNPLDICYDVLCENAYFQKFQLERVNLQEVKRSTYDHTRKCTDQLLLLGQTDRAVQLLLETSADNQHYYCDSLKACLVTTVTSSGPSQSTIKLVATNMIANGKLAEGVQLLCLIDKAADACRYLQTYGEWNRAAWLAKVRLNPEECADVLRRWVDHLCSPQVNQKSKALLVLLSLGCFFSVAETLHSMRYFDRAALFVEACLKYGAFEVTEDTEKLITAIYADYARSLKNLGFKQGAVLFASKAGAAGKDLLNELESPKEEPIEE

SEQ ID NO: 1788 - protein, 831 aa, Homo sapiens
MTELKAKGPRAPHVAGGPPSPEVGSPLLCRPAAGPFPGSQTSDTLPEVSAIPISLDGLLFPRPCQGQDPSDEKTQDQQSLSDVEGAYSRAEATRGAGGSSSSPPEKDSGLLDSVLDTLLAPSGPGQSQPSPPACEVTSSWCLFGPELPEDPPAAPATQRVLSPLMSRSGCKVGDSSGTAAAHKVLPRGLSPARQLLLPASESPHWSGAPVKPSPQAAAVEVEEEDGSESEESAGPLLKGKPRALGGAAAGGGAAAVPPGAAAGGVALVPKEDSRFSAPRVALVEQDAPMAPGRSPLATTVMDFIHVPILPLNHALLAARTRQLLEDESYDGGAGAASAFAPPRSSPCASSTPVAVGDFPDCAYPPDAEPKDDAYPLYSDFQPPALKIKEEEEGAEASARSPRSYLVAGANPAAFPDFPLGPPPPLPPRATPSRPGEAAVTAAPASASVSSASSSGSTLECILYKAEGAPPQQGPFAPPPCKAPGASGCLLPRDGLPSTSASAAAAGAAPALYPALGLNGLPQLGYQAAVLKEGLPQVYPPYLNYLRPDSEASQSPQYSFESLPQKICLICGDEASGCHYGVLTCGSCKVFFKRAMEGQHNYLCAGRNDCIVDKIRRKNCPACRLRKCCQAGMVLGGFRNLHIDDQITLIQYSWMSLMVFGLGWRSYKHVSGQMLYFAPDLILNEQRMKESSFYSLCLTMWQIPQEFVKLQVSQEEFLCMKVLLLLNTIPLEGLRSQTQFEEMRSSYIRELIKAIGLRQKGVVSSSQRFYQLTKLLDNLHDLVKQLHLYCLNTFIQSRALSVEFPEMMSEVIAAQLPKILAGMVKPLLFHKK

SEQ ID NO: 1789 - protein, 604 aa, Homo sapiens
MNIVENSIFLSNLMKSANTFELKYDLSCELYRMSTYSTFPAGVPVSERSLARAGFYYTGVNDKVKCFCCGLMLDNWKRGDSPTEKHKKLYPSCRFVQSLNSVNNLEATSQPTFPSSVTNSTHSLLPGTENSGYFRGSYSNSPSNPVNSRANQDFSALMRSSYHCAMNNENARLLTFQTWPLTFLSPTDLAKAGFYYIGPGDRVACFACGGKLSNWEPKDNAMSEHLRHFPKCPFIENQLQDTSRYTVSNLSMQTHAARFKTFFNWPSSVLVNPEQLASAGFYYVGNSDDVKCFCCDGGLRCWESGDDPWVQHAKWFPRCEYLIRIKGQEFIRQVQASYPHLLEQLLSTSDSPGDENAESSIIHFEPGEDHSEDAIMMNTPVINAAVEMGFSRSLVKQTVQRKILATGENYRLVNDLVLDLLNAEDEIREEERERATEEKESNDLLLIRKNRMALFQHLTCVIPILDSLLTAGIINEQEHDVIKQKTQTSLQARELIDTILVKGNIAATVFRNSLQEAEAVLYEHLFVQQDIKYIPTEDVSDLPVEEQLRRLQEERTCKVCMDKEVSIVFIPCGHLVVCKDCAPSLRKCPICRSTIKGTVRTFLS

SEQ ID NO: 1790 - protein, 1117 aa, Homo sapiens
MLAGRPGTRSAVGELGTESSDNLDRAPLGPRESGGHHRPGSYLDMKIHLEKNLEEERQILLQQQKICRNRARKYFVESNRRKKAFEEKRKEQEEKEHQIREQILQQRKQKFEEVTEKFQRAHVPLSQRRKAVSRKPVPPLEEALKQIQESNLKSEVNLPFSRRPTINWRAIDSALPSALSKNDHKHQKQLLSKINCEKEMNENMRATLATSKNVFQLKLEETQKLLEDQHLSNLQKFCDEVNQITNSETLSSIDSLEATEHEEIYLTLNKEHSTSIQRNTISLKPANMQSTNLSCFDEDKLAFSKTQHINNWLTNLDASNTQNVTAFSDILSKSNVLPSWEYFNSKEQNPSPLNGTVERATNTANNSVPFVSSPPMFVLDKKCEKTSETSTMRTTDSTSGAFKRERPLVTESPTFKFSKSQSTSDSLTQEVATFPDQEKYSELNQENGTTSIPTSCVPVATPLVLPSNIQSARPSAKNSIHIKEIDAVQCSDKLDELKDGKEEEIKYFNCNKEELPLFSDSFQDAYIPHNPDSKDEKQKLAETSSLSNVTSNYDFVGQHKKMKYNIHERNGVRFLKSILKKESKYEHGYLKALIINQSFKFGNQKAAAIRDSIELTKEKGAEIPKTIKKLRWFDETSNIENNAENSHSLKNKTGTTQQHSQQFHIQSGAGSNIISVSTCAVNSADTKKSREDSISENVTTLGGSGADHMPLNCFIPSGYNFAKHAWPASKKEESKIPVHDDSKTKQGKPQRGRAKIIRKPGSAKVQSGFICTNRKGAVIQPQSASKVNIFTQAQGKLIIPCPPPQSTSNIRSGKNIQVSQCQPVTPENPQNIITHNSFNSKHVLPTEHSLNQWNQESSSPLSNACSDLVTVIPSLPSYCSSECQTFAKINHSNGTQAVARQDATLYCTQRSPVCEESYPSVTLRTAEEESVPLWKRGPNVLHQNKRATGSTVMRRKRIAETKRRNILEQKRQNPGSVGQKYSEQINNFGQSVLLSSSEPKQTTRGTSYIEEVSDSTSEFLMAENLVKASVPEDEILTVLNSKQIQKSNLPLNKTQQFNICTLSAEEQKILESLNDLSERLHYIQESICKNPSIKNTLQIIPLLEKREDRTSSCRDKR

SEQ ID NO: 1791 - protein, 1220 aa, Homo sapiens
MGDMANSSIEFHPKPQQQRDVPQAGGFGCTLAELRTLMELRGAEALQKIEEAYGDVSGLCRRLKTSPTEGLADNTNDLEKRRQIYGQNFIPPKQPKTFLQLVWEALQDVTLIILEVAAIVSLGLSFYAPPGEESEACGNVSGGAEDEGEAEAGWIEGAAILLSVICVVLVTAFNDWSKEKQFRGLQSRIEQEQKFTVIRNGQLLQVPVAALVVGDIAQVKYGDLLPADGVLIQANDLKIDESSLTGESDHVRKSADKDPMLLSGTHVMEGSGRMVVTAVGVNSQTGIIFTLLGAGGEEEEKKDKKGKQQDGAMESSQTKAKKQDGAVAMEMQPLKSAEGGEMEEREKKKANAPKKEKSVLQGKLTKLAVQIGKAGLVMSAITVIILVLYFVIETFVVEGRTWLAECTPVYVQYFVKFFIIGVTVLVVAVPEGLPLAVTISLAYSVKKMMKDNNLVRHLDACETMGNATAICSDKTGTLTTNRMTVVQSYLGDTHYKEIPAPSALTPKILDLLVHAISINSAYTTKILPPEKEGALPRQVGNKTECALLGFVLDLKRDFQPVREQIPEDKLYKVYTFNSVRKSMSTVIRMPDGGFRLFSKGASEILLKKCTNILNSNGELRGFRPRDRDDMVRKIIEPMACDGLRTICIAYRDFSAGQEPDWDNENEVVGDLTCIAVVGIEDPVRPEVPEAIRKCQRAGITVRMVTGDNINTARAIAAKCGIIQPGEDFLCLEGKEFNRRIRNEKGEIEQERLDKVWPKLRVLARSSPTDKHTLVKGIIDSTTGEQRQVVAVTGDGTNDGPALKKADVGFAMGIAGTDVAKEASDIILTDDNFTSIVKAVMWGRNVYDSISKFLQFQLTVNVVAVIVAFTGACITQDSPLKAVQMLWVNLIMDTFASLALATEPPTESLLLRKPYGRDKPLISRTMMKNILGHAVYQLAIIFTLLFVGELFFDIDSGRNAPLHSPPSEHYTIIFNTFVMMQLFNEINARKIHGERNVFDGIFSNPIFCTIVLGTFGIQIVIVQFGGKPFSCSPLSTEQWLWCLFVGVGELVWGQVIATIPTSQLKCLKEAGHGPGKDEMTDEELAEGEEEIDHAERELRRGQILWFRGLNRIQTQIRVVKAFRSSLYEGLEKPESKTSIHNFMATPEFLINDYTHNIPLIDDTDVDENEERLRAPPPPSPNQNNNAIDSGIYLTTHVTKSATSSVFSSSPGSPLHSVETSL

SEQ ID NO: 1792 - protein, 1358 aa, Homo sapiens
MGADGETVVLKNMLIGINLILLGSMIKPSECQLEVTTERVQRQSVEEEGGIANYNTSSKEQPVVFNHVYNINVPLDNLCSSGLEASAEQEVSAEDETLAEYMGQTSDHESQVTFTHRINFPKKACPCASSAQVLQELLSRIEMLEREVSVLRDQCNANCCQESAATGQLDYIPHCSGHGNFSFESCGCICNEGWFGKNCSEPYCPLGCSSRGVCVDGQCICDSEYSGDDCSELRCPTDCSSRGLCVDGECVCEEPYTGEDCRELRCPGDCSGKGRCANGTCLCEEGYVGEDCGQRQCLNACSGRGQCEEGLCVCEEGYQGPDCSAVAPPEDLRVAGISDRSIELEWDGPMAVTEYVISYQPTALGGLQLQQRVPGDWSGVTITELEPGLTYNISVYAVISNILSLPITAKVATHLSTPQGLQFKTITETTVEVQWEPFSFSFDGWEISFIPKNNEGGVIAQVPSDVTSFNQTGLKPGEEYIVNVVALKEQARSPPTSASVSTVIDGPTQILVRDVSDTVAFVEWIPPRAKVDFILLKYGLVGGEGGRTTFRLQPPLSQYSVQALRPGSRYEVSVSAVRGTNESDSATTQFTTEIDAPKNLRVGSRTATSLDLEWDNSEAEVQEYKVVYSTLAGEQYHEVLVPRGIGPTTRATLTDLVPGTEYGVGISAVMNSQQSVPATMNARTELDSPRDLMVTASSETSISLIWTKASGPIDHYRITFTPSSGIASEVTVPKDRTSYTLTDLEPGAEYIISVTAERGRQQSLESTVDAFTGFRPISHLHFSHVTSSSVNITWSDPSPPADRLILNYSPRDEEEEMMEVSLDATKRHAVLMGLQPATEYIVNLVAVHGTVTSEPIVGSITTGIDPPKDITISNVTKDSVMVSWSPPVASFDYYRVSYRPTQVGRLDSSVVPNTVTEFTITRLNPATEYEISLNSVRGREESERICTLVHTAMDNPVDLIATNITPTEALLQWKAPVGEVENYVIVLTHFAVAGETILVDGVSEEFRLVDLLPSTHYTATMYATNGPLTSGTISTNFSTLLDPPANLTASEVTRQSALISWQPPRAEIENYVLTYKSTDGSRKELIVDAEDTWIRLEGLLENTDYTVLLQAAQDTTWSSITSTAFTTGGRVFPHPQDCAQHLMNGDTLSGVYPIFLNGELSQKLQVYCDMTTDGGGWIVFQRRQNGQTDFFRKWADYRVGFGNVEDEFWLGLDNIHRITSQGRYELRVDMRDGQEAAFASYDRFSVEDSRNLYKLRIGSYNGTAGDSLSYHQGRPFSTEDRDNDVAVTNCAMSYKGAWWYKNCHRTNLNGKYGESRHSQGINWYHWKGHEFSIPFVEMKMRPYNHRLMAGRKRQSLQF

SEQ ID NO: 1793 - protein, 389 aa, Homo sapiens
MVIHSQLKKIQGASERMGDTTRQRIKFSDDRVCKSHLLNCCPHDVLSGTRMDLGECLKVHDLALRADYEIASKEQDFFFELDAMDHLQSFIADCDRRTEVAKKRLAETQEEISAEVAAKAERVHELNEEIGKLLAKVEQLGAEGNVEESQKVMDEVEKARAKKREAEEVYRNSMPASSFQQQKLRVCEVCSAYLGLHDNDRRLADHFGGKLHLGFIEIREKLEELKRVVAEKQEKRNQERLKRREEREREEREKLRRSRSHSKNPKRSRSREHRRHRSRSMSRERKRRTRSKSREKRHRHRSRSSSRSRSRSHQRSRHSSRDRSRERSKRRSSKERFRDQDLASCDRDRSSRDRSPRDRDRKDKKRSYESANGRSEDRRSSEEREAGEI

SEQ ID NO: 1794 - protein, 701 aa, Homo sapiens
MAQAGVVGEVTQVLCAAGGALELPELRRRLRMGLSADALERLLRQRGRFVVAVRAGGAAAAPERVVLAASPLRLCRAHQGSKPGCVGLCAQLHLCRFMVYGACKFLRAGKNCRNSHSLTTEHNLSVLRTHGVDHLSYNELCQLLFQNDPWLLPEICQHYNKGDGPHGSCAFQKQCIKLHICQYFLQGECKFGTSCKRSHDFSNSENLEKLEKLGMSSDLVSRLPTIYRNAHDIKNKSSAPSRVPPLFVPQGTSERKDSSGSVSPNTLSQEEGDQICLYHIRKSCSFQDKCHRVHFHLPYRWQFLDRGKWEDLDNMELIEEAYCNPKIERILCSESASTFHSHCLNFNAMTYGATQARRLSTASSVTKPPHFILTTDWIWYWSDEFGSWQEYGRQGTVHPVTTVSSSDVEKAYLAYCTPGSDGQAATLKFQAGKHNYELDFKAFVQKNLVYGTTKKVCRRPKYVSPQDVTTMQTCNTKFPGPKSIPDYWDSSALPDPGFQKITLSSSSEEYQKVWNLFNRTLPFYFVQKIERVQNLALWEVYQWQKGQMQKQNGGKAVDERQLFHGTSAIFVDAICQQNFDWRVCGVHGTSYGKGSYFARDAAYSHHYSKSDTQTHTMFLARVLVGEFVRGNASFVRPPAKEGWSNAFYDSCVNSVSDPSIFVIFEKHQVYPEYVIQYTTSSKPSVTPSILLALGSLFSSRQ

SEQ ID NO: 1795 - protein, 856 aa, Homo sapiens
MGTTASTAQQTVSAGTPFEGLQGSGTMDSRHSVSIHSFQSTSLHNSKAKSIIPNKVAPVVITYNCKEEFQIHDELLKAHYTLGRLSDNTPEHYLVQGRYFLVRDVTEKMDVLGTVGSCGAPNFRQVQGGLTVFGMGQPSLSGFRRVLQKLQKDGHRECVIFCVREEPVLFLRADEDFVSYTPRDKQNLHENLQGLGPGVRVESLELAIRKEIHDFAQLSENTYHVYHNTEDLWGEPHAVAIHGEDDLHVTEEVYKRPLFLQPTYRYHRLPLPEQGSPLEAQLDAFVSVLRETPSLLQLRDAHGPPPALVFSCQMGVGRTNLGMVLGTLILLHRSGTTSQPEAAPTQAKPLPMEQFQVIQSFLRMVPQGRRMVEEVDRAITACAELHDLKEVVLENQKKLEGIRPESPAQGSGSRHSVWQRALWSLERYFYLILFNYYLHEQYPLAFALSFSRWLCAHPELYRLPVTLSSAGPVAPRDLIARGSLREDDLVSPDALSTVREMDVANFRRVPRMPIYGTAQPSAKALGSILAYLTDAKRRLRKVVWVSLREEAVLECDGHTYSLRWPGPPVAPDQLETLEAQLKAHLSEPPPGKEGPLTYRFQTCLTMQEVFSQHRRACPGLTYHRIPMPDFCAPREEDFDQLLEALRAALSKDPGTGFVFSCLSGQGRTTTAMVVAVLAFWHIQGFPEVGEEELVSVPDAKFTKGEFQVVMKVVQLLPDGHRVKKEVDAALDTVSETMTPMHYHLREIIICTYRQAKAAKEAQEMRRLQLRSLQYLERYVCLILFNAYLHLEKADSWQRPFSTWMQEVASKAGIYEILNELGFPELESGEDQPFSRLRYRWQEQSCSLEPSAPEDLL

SEQ ID NO: 1796 - protein, 483 aa, Homo sapiens
MASLLWGGDAGAAESERLNSHFSNLSQPRKNLWGIKSTAVRNIDGSINNINEDDEEDVVDLAANSLLNKLIHQSLVESSHRVEVLQKDPSSPLYSVKTFEELRLKEELLKGIYAMGFNRPSKIQEMALPMMLAHPPQNLIAQSQSGTGKTAAFVLAMLSRVNALELFPQCLCLAPTYELALQTGRVVEQMGKFCVDVQVMYAIRGNRIPRGTDITKQIIIGTPGTVLDWCFKLKLIDLTKIRVFVLDEADVMIDTQGFSDHSIRIQRALPSECQMLLFSATFEDSVWHFAERIIPDPNVIKLRKEELTLNNIRQYYVLCEHRKDKYQALCNIYGSITIGQAIIFCQTRRNAKWLTVEMIQDGHQVSLLSGELTVEQRASIIQRFRDGKEKVLITTNVCARGIDVKQVTIVVNFDLPVKQGEEPDYETYLHRIGRTGRFGKKGLAFNMIEVDELPSLMKIQDHFNSSIKQLNAEDMDEIEKIDY

SEQ ID NO: 1797 - protein, 1264 aa, Homo sapiens
MHPDLGPLCTLLYVTLTILCSSVSSDLAPYFTSEPLSAVQKLGGPVVLHCSAQPVTTRISWLHNGKTLDGNLEHVKIHQGTLTILSLNSSLLGYYQCLANNSIGAIVSGPATVSVAVLGDFGSSTKHVITAEEKSAGFIGCRVPESNPKAEVRYKIRGKWLEHSTENYLILPSGNLQILNVSLEDKGSYKCAAYNPVTHQLKVEPIGRKLLVSRPSSDDVHILHPTHSQALAVLSRSPVTLECVVSGVPAPQVYWLKDGQDIAPGSNWRRLYSHLATDSVDPADSGNYSCMAGNKSGDVKYVTYMVNVLEHASISKGLQDQIVSLGATVHFTCDVHGNPAPNCTWFHNAQPIHPSARHLTAGNGLKISGVTVEDVGMYQCVADNGIGFMHSTGRLEIENDGGFKPVIITAPVSAKVADGDFVTLSCNASGLPVPVIRWYDSHGLITSHPSQVLRSKSRKSQLSRPEGLNLEPVYFVLSQAGASSLHIQAVTQEHAGKYICEAANEHGTTQAEASLMVVPFETNTKAETVTLPDAAQNDDRSKRDGSETGLLSSFPVKVHPSAVESAPEKNASGISVPDAPIILSPPQTHTPDTYNLVWRAGKDGGLPINAYFVKYRKLDDGVGMLGSWHTVRVPGSENELHLAELEPSSLYEVLMVARSAAGEGQPAMLTFRTSKEKTASSKNTQASSPPVGIPKYPVVSEAANNNFGVVLTDSSRHSGVPEAPDRPTISTASETSVYVTWIPRANGGSPITAFKVEYKRMRTSNWLVAAEDIPPSKLSVEVRSLEPGSTYKFRVIAINHYGESFRSSASRPYQVVGFPNRFSSRPITGPHIAYTEAVSDTQIMLKWTYIPSSNNNTPIQGFYIYYRPTDSDNDSDYKRDVVEGSKQWHMIGHLQPETSYDIKMQCFNEGGESEFSNVMICETKVKRVPGASEYPVKDLSTPPNSLGSGGNVGPATSPARSSDMLYLIVGCVLGVMVLILMVFIAMCLWKNRQQNTIQKYDPPGYLYQGSDMNGQMVDYTTLSGASQINGNVHGGFLTNGGLSSGYSHLHHKVPNAVNGIVNGSLNGGLYSGHSNSLTRTHVDFEHPHHLVNGGGMYTAVPQIDPLECVNCRNCRNNNRCFTKTNSTFSSSPPPVVPVVAPYPQDGLEMKPLSHVKVPVCLTSAVPDCGQLPEESVKDNVEPVPTQRTCCQDIVNDVSSDGSEDPAEFSRGDSCAHSETEINIVSWNALILPPVPEGCAEKTMWSPPGIPLDSPTEVLQQPRET

SEQ ID NO: 1798 - protein, 523 aa, Homo sapiens
MVAPGLVLGLVLPLILWADRSAGIGFRFASYINNDMVLQKEPAGAVIWGFGTPGATVTVTLRQGQETIMKKVTSVKAHSDTWMVVLDPMKPGGPFEVMAQQTLEKINFTLRVHDVLFGDVWLCSGQSNMQMTVLQIFNATRELSNTAAYQSVRILSVSPIQAEQELEDLVAVDLQWSKPTSENLGHGYFKYMSAVCWLFGRHLYDTLQYPIGLIASSWGGTPIEAWSSGRSLKACGVPKQGSIPYDSVTGPSKHSVLWNAMIHPLCNMTLKGVVWYQGESNINYNTDLYNCTFPALIEDWRETFHRGSQGQTERFFPFGLVQLSSDLSKKSSDDGFPQIRWHQTADFGYVPNPKMPNTFMAVAMDLCDRDSPFGSIHPRDKQTVAYRLHLGARALAYGEKNLTFEGPLPEKIELLAHKGLLNLTYYQQIQVQKKDNKIFEISCCSDHRCKWLPASMNTVSTQSLTLAIDSCHGTVVALRYAWTTWPCEYKQCPLYHPSSALPAPPFIAFITDQGPGHQSNVAK

SEQ ID NO: 1799 - protein, 1223 aa, Homo sapiens
MARAKLPRSPSEGKAGPGGAPAGAAAPEEPHGLSPLLPARGGGSVGSDVGQRVQVEFYVNENTFKERLKLFFIKNQRSSLRIRLFNFSLKLLTCLLYIVRVLLDDPALGIGCWGCPKQNYSFNDSSSEINWAPILWVERKMTLWAIQVIVAIISFLETMLLIYLSYKGNIWEQIFRVSFVLEMINTLPFIITIFWPPLRNLFIPVFLNCWLAKHALENMINDFHRAILRTQSAMFNQVLILFCTLLCLVFTGTCGIQHLERAGENLSLLTSFYFCIVTFSTVGYGDVTPKIWPSQLLVVIMICVALVVLPLQFEELVYLWMERQKSGGNYSRHRAQTEKHVVLCVSSLKIDLLMDFLNEFYAHPRLQDYYVVILCPTEMDVQVRRVLQIPLWSQRVIYLQGSALKDQDLMRAKMDNGEACFILSSRNEVDRTAADHQTILRAWAVKDFAPNCPLYVQILKPENKFHVKFADHVVCEEECKYAMLALNCICPATSTLITLLVHTSRGQEGQESPEQWQRMYGRCSGNEVYHIRMGDSKFFREYEGKSFTYAAFHAHKKYGVCLIGLKREDNKSILLNPGPRHILAASDTCFYINITKEENSAFIFKQEEKRKKRAFSGQGLHEGPARLPVHSIIASMGTVAMDLQGTEHRPTQSGGGGGGSKLALPTENGSGSRRPSIAPVLELADSSALLPCDLLSDQSEDEVTPSDDEGLSVVEYVKGYPPNSPYIGSSPTLCHLLPVKAPFCCLRLDKGCKHNSYEDAKAYGFKNKLIIVSAETAGNGLYNFIVPLRAYYRSRKELNPIVLLLDNKPDHHFLEAICCFPMVYYMEGSVDNLDSLLQCGIIYADNLVVVDKESTMSAEEDYMADAKTIVNVQTMFRLFPSLSITTELTHPSNMRFMQFRAKDSYSLALSKLEKRERENGSNLAFMFRLPFAAGRVFSISMLDTLLYQSFVKDYMITITRLLLGLDTTPGSGYLCAMKITEGDLWIRTYGRLFQKLCSSSAEIPIGIYRTESHVFSTSEPHDLRAQSQISVNVEDCEDTREVKGPWGSRAGTGGSSQGRHTGGGDPAEHPLLRRKSLQWARRLSRKAPKQAGRAAAAEWISQQRLSLYRRSERQELSELVKNRMKHLGLPTTGYEDVANLTASDVMNRVNLGYLQDEMNDHQNTLSYVLINPPPDTRLEPSDIVYLIRSDPLAHVASSSQSRKSSCSHKLSSCNPETRDETQL

SEQ ID NO: 1800 - protein, 327 aa, Homo sapiens
MEGSNGFGIDSILSHRAGSPALPKGDPLLGDCRSPLELSPRSESSSDCSSPASPGRDCLETGTPRPGGASGPGLDSHLQPGQLSAPAQSRTVTSSFLIRDILADCKPLAACAPYSSSGQPAAPEPGGRLAAKAAEDFRDKLDKSGSNASSDSEYKVKEEGDREISSSRDSPPVRLKKPRKARTAFTDHQLAQLERSFERQKYLSVQDRMELAASLNLTDTQVKTWYQNRRTKWKRQTAVGLELLAEAGNYSALQRMFPSPYFYPQSLVSNLDPGAALYLYRGPSAPPPALQRPLVPRILIHGLQGASEPPPPLPPLAGVLPRAAQPR

SEQ ID NO: 1801 - protein, 256 aa, Homo sapiens
ALSRWASLPGPSMREAAFMYSTAVAIFLVILVAALQGSAPRESPLPYHIPLDPEGSLELSWNVSYTQEAIHFQLLVRRLKAGVLFGMSDRGELENADLVVLWTDGDTAYFADGTVHLVYGILEEPFRSLEAINGSGLQMGLQRVQLLKPNIPEPELPSDACTMEVQAPNIQIPSQETTYWCYIKELPKGFSRHHIIKYEPIVTKGNEALVHHMEVFQCAPEMDSVPHFSGPCDSKMKPDRLNYCRHVLAAWALGAK

SEQ ID NO: 1802 - protein, 727 aa, Homo sapiens
MNQKLLKLENLLRFHTIYRQLHSLCQRRALRQWRHGFSSAYPVWTAQLCAWPWPTDVLTGAALSQYRLLVTKKEEGPWKSQLSSTKSKKVVEVWIGMTIEELARAMEKNTDYVYEALLNTDIDIDSLEADSHLDEVWIKEVITKAGMKLKWSKLKQDKVRKNKDAVRRPQADPALLTPRSPVVTIMGHVDHGKTTLLDKFRKTQVAAVETGGITQHIGAFLVSLPSGEKITFLDTPGHAAFSAMRARGAQVTDIVVLVVAADDGVMKQTVESIQHAKDAQVPIILAVNKCDKAEADPEKVKKELLAYDVVCEDYGGDVQAVPVSALTGDNLMALAEATVALAEMLELKADPNGPVEGTVIESFTDKGRGLVTTAIIQRGTLRKGSVLVAGKCWAKVRLMFDENGKTIDEAYPSMPVGITGWRDLPSAGEEILEVESEPRAREVVDWRKYEQEQEKGQEDLKIIEEKRKEHKEAHQKAREKYGHLLWKKRSILRFLERKEQIPLKPKEKRERDSNVLSVIIKGDVDGSVEAILNIIDTYDASHECELELVHFGVGDVSANDVNLAETFDGVIYGFNVNAGNVIQQSAAKKGVKIKLHKIIYRLVEDLQEELSSRLPCAVEEHPVGEASILATFSVTEGKKKVPVAGCRVQKGQLEKQKKFKLTRNGHVIWKGSLTSLKHHKDDISIVKTGMDCGLSLDEDNMEFQVGDRIVCYEEKQIQAKTSWDPGF

SEQ ID NO: 1803 - protein, 1843 aa, Homo sapiens
MENEIFTPLLEQFMTSPLVTWVKTFGPLAAGNGTNLDEYVALVDGVFLNQVMLQINPKLESQRVNKKVNNDASLRMHNLSILVRQIKFYYQETLQQLIMMSLPNVLIIGKNPFSEQGTEEVKKLLLLLLGCAVQCQKKEEFIERIQGLDFDTKAAVAAHIQEVTHNQENVFDLQWMEVTDMSQEDIEPLLKNMALHLKRLIDERDEHSETIIELSEERDGLHFLPHASSSAQSPCGSPGMKRTESRQHLSVELADAKAKIRRLRQELEEKTEQLLDCKQELEQMEIELKRLQQENMNLLSDARSARMYRDELDALREKAVRVDKLESEVSRYKERLHDIEFYKARVEELKEDNQVLLETKTMLEDQLEGTRARSDKLHELEKENLQLKAKLHDMEMERDMDRKKIEELMEENMTLEMAQKQSMDESLHLGWELEQISRTSELSEAPQKSLGHEVNELTSSRLLKLEMENQSLTKTVEELRTTVDSVEGNASKILKMEKENQRLSKKVEILENEIVQEKQSLQNCQNLSKDLMKEKAQLEKTIETLRENSERQIKILEQENEHLNQTVSSLRQRSQISAEARVKDIEKENKILHESIKETSSKLSKIEFEKRQIKKELEHYKEKGERAEELENELHHLEKENELLQKKITNLKITCEKIEALEQENSELERENRKLKKTLDSFKNLTFQLESLEKENSQLDEENLELRRNVESLKCASMKMAQLQLENKELESEKEQLKKGLELLKASFKKTERLEVSYQGLDIENQRLQKTLENSNKKIQQLESELQDLEMENQTLQKNLEELKISSKRLEQLEKENKSLEQETSQLEKDKKQLEKENKRLRQQAEIKDTTLEENNVKIGNLEKENKTLSKEIGIYKESCVRLKELEKENKELVKRATIDIKTLVTLREDLVSEKLKTQQMNNDLEKLTHELEKIGLNKERLLHDEQSTDDSRYKLLESKLESTLKKSLEIKEEKIAALEARLEESTNYNQQLRQELKTVKKNYEALKQRQDEERMVQSSPPISGEDNKWERESQETTRELLKVKDRLIEVERNNATLQAEKQALKTQLKQLETQNNNLQAQILALQRQTVSLQEQNTTLQTQNAKLQVENSTLNSQSTSLMNQNAQLLIQQSSLENENESVIKEREDLKSLYDSLIKDHEKLELLHERQASEYESLISKHGTLKSAHKNLEVEHRDLEDRYNQLLKQKGQLEDLEKMLKVEQEKMLLENKNHETVAAEYKKLCGENDRLNHTYSQLLKETEVLQTDHKNLKSLLNNSKLEQTRLEAEFSKLKEQYQQLDITSTKLNNQCELLSQLKGNLEEENRHLLDQIQTLMLQNRTLLEQNMESKDLFHVEQRQYIDKLNELRRQKEKLEEKIMDQYKFYDPSPPRRRGNWITLKMRKLIKSKKDINRERQKSLTLTPTRSDSSEGFLQLPHQDSQDSSSVGSNSLEDGQTLGTKKSSTMNDLVQSMVLAGQWTGSTENLEVPDDISTGKRRKELGAMAFSTTAINFSTVNSSAGFRSKQLVNNKDTTSFEDISPQGVSDDSSTGSRVHASRPASLDSGRTSTSNSNNNASLHEVKAGAVNNQSRPQSHSSGEFSLLHDHEAWSSSGSSPIQYLKRQTRSSPVLQHKISETLESRHHKIKTGSPGSEVVTLQQFLEESNKLTSVQIKSSSQENLLDEVMKSLSVSSDFLGKDKPVSCGLARSVSGKTPGDFYDRRTTKPEFLRPGPRKTEDTYFISSAGKPTPGTQGKIKLVKESSLSRQSKDSNPYATLPRASSVISTAEGTTRRTSIHDFLTKDSRLPISVDSPPAAADSNTTAASNVDKVQESRNSKSRSREQQSS

SEQ ID NO: 1804 - protein, 1861 aa, Homo sapiens
MLKAVLKKSREGGKGGKKEAGSDFGPETSPVLHLDHSADSPVSSLPTAEDTYRVSLAKGVSMSLPSSPLLPRQSHLVQSRVNKKSPGPVRKPKYVESPRVPGDAVIMPFREVAKPTEPDEHEAKADNEPSCSPAAQELLTRLGFLLGEGIPSATHITIEDKNETMCTALSQGISPCSTLTSSTASPSTDSPCSTLNSCVSKTAANKSPCETISSPSSTLESKDSGIIATITSSSENDDRSGSSLEWNKDGNLRLGVQKGVLHDRRADNCSPVAEEETTGSAESTLPKAESSAGDGPVPYSQGSSSLIMPRPNSVAATSSTKLEDLSYLDGQRNAPLRTSIRLPWHNTAGGRAQEVKARFAPYKPQDILLKPLLFEVPSITTDSVFVGRDWLFHQIEENLRNTELAENRGAVVVGNVGFGKTAIISKLVALSCHGSRMRQIASNSPGSSPKTSDPTQDLHFTPLLSPSSSTSASSTAKTPLGSISAENQRPREDAVKYLASKVVAYHYCQADNTYTCLVPEFVHSIAALLCRSHQLAAYRDLLIKEPQLQSMLSLRSCVQDPVAAFKRGVLEPLTNLRNEQKIPEEEYIILIDGLNEAEFHKPDYGDTLSSFITKIISKFPAWLKLIVTVRANFQEIISALPFVKLSLDDFPDNKDIHSDLHAYVQHRVHSSQDILSNISLNGKADATLIGKVSSHLVLRSLGSYLYLKLTLDLFQRGHLVIKSASYKVVPVSLSELYLLQCNMKFMTQSAFERALPILNVALASLHPMTDEQIFQAINAGHIQGEQGWEDFQQRMDALSCFLIKRRDKTRMFCHPSFREWLVWRADGENTAFLCEPRNGHALLAFMFSRQEGKLNRQQTMELGHHILKAHIFKGLSKKTGISSSHLQALWIGYSTEGLSAALASLRNLYTPNVKVSRLLILGGANVNYRTEVLNNAPILCVQSHLGHEEVVTLLLEFGACLDGTSENGMTALCYAAAAGHMKLVCLLTKKGVRVDHLDKKGQCALVHSALRGHGDILQYLLTCEWSPGPPQPGTLRKSHALQQALTAAASMGHSSVVQCLLGMEKEHEVEVNGTDTLWGETALTAAAGRGKLEVCELLLGHGAAVSRTNRRGVPPLFCAARQGHWQIVRLLLERGCDVNLSDKQGRTPLMVAACEGHLSTVEFLLSKGAALSSLDKEGLSALSWACLKGHRAVVQYLVEEGAAIDQTDKNGRTPLDLAAFYGDAETVLYLVEKGAVIEHVDHSGMRPLDRAIGCRNTSVVVALLRKGAKLGNAAWAMATSKPDILIILLQKLMEEGNVMYKKGKMKEAAQRYQYALRKFPREGFGEDMRPFNELRVSLYLNLSRCRRKTNDFGMAEEFASKALELKPKSYEAFYARARAKRNSRQFVAALADLQEAVKLCPTNQEVKRLLARVEEECKQLQRSQQQKQQGPLPAPLNDSENEEDTPTPGLSDHFHSEETEEEETSPQEESVSPTPRSQPSSSVPSSYIRNLQEGLQSKGRPVSPQSRAGIGKSLREPVAQPGLLLQPSKQAQIVKTSQHLGSGQSAVRNGSMKVQISSQNPPPSPMPGRIAATPAGSRTQHLEGTGTFTTRAGCGHFGDRLGPSQNVRLQCGENGPAHPLPSKTKTTERLLSHSSVAVDAAPPNQGGLATCSDVRHPASLTSSGSSGSPSSSIKMSSSTSSLTSSSSFSDGFKVQGPDTRIKDKVVTHVQSGTAEHRPRNTPFMGIMDKTARFQQQSNPPSRSWHCPAPEGLLTNTSSAAGLQSANTEKPSLMQVGGYNNQAKTCSVSTLSASVHNGAQVKELEESKCQIPVHSQENRITKTVSHLYQESISKQQPHISNEAHRSHLTAAKPKRSFIESNV

SEQ ID NO: 1805 - protein, 1722 aa, Homo sapiens
MRTGWATPRRPAGLLMLLFWFFDLAEPSGRAANDPFTIVHGNTGKCIKPVYGWIVADDCDETEDKLWKWVSQHRLFHLHSQKCLGLDITKSVNELRMFSCDSSAMLWWKCEHHSLYGAARYRLALKDGHGTAISNASDVWKKGGSEESLCDQPYHEIYTRDGNSYGRPCEFPFLIDGTWHHDCILDEDHSGPWCATTLNYEYDRKWGICLKPENGCEDNWEKNEQFGSCYQFNTQTALSWKEAYVSCQNQGADLLSINSAAELTYLKEKEGIAKIFWIGLNQLYSARGWEWSDHKPLNFLNWDPDRPSAPTIGGSSCARMDAESGLWQSFSCEAQLPYVCRKPLNNTVELTDVWTYSDTRCDAGWLPNNGFCYLLVNESNSWDKAHAKCKAFSSDLISIHSLADVEVVVTKLHNEDIKEEVWIGLKNINIPTLFQWSDGTEVTLTYWDENEPNVPYNKTPNCVSYLGELGQWKVQSCEEKLKYVCKRKGEKLNDASSDKMCPPDEGWKRHGETCYKIYEDEVPFGTNCNLTITSRFEQEYLNDLMKKYDKSLRKYFWTGLRDVDSCGEYNWATVGGRRRAVTFSNWNFLEPASPGGCVAMSTGKSVGKWEVKDCRSFKALSICKKMSGPLGPEEASPKPDDPCPEGWQSFPASLSCYKVFHAERIVRKRNWEEAERFCQALGAHLSSFSHVDEIKEFLHFLTDQFSGQHWLWIGLNKRSPDLQGSWQWSDRTPVSTIIMPNEFQQDYDIRDCAAVKVFHRPWRRGWHFYDDREFIYLRPFACDTKLEWVCQIPKGRTPKTPDWYNPDRAGIHGPPLIIEGSEYWFVADLHLNYEEAVLYCASNHSFLATITSFVGLKAIKNKIANISGDGQKWWIRISEWPIDDHFTYSRYPWHRFPVTFGEECLYMSAKTWLIDLGKPTDCSTKLPFICEKYNVSSLEKYSPDSAAKVQCSEQWIPFQNKCFLKIKPVSLTFSQASDTCHSYGGTLPSVLSQIEQDFITSLLPDMEATLWIGLRWTAYEKINKWTDNRELTYSNFHPLLVSGRLRIPENFFEEESRYHCALILNLQKSPFTGTWNFTSCSERHFVSLCQKYSEVKSRQTLQNASETVKYLNNLYKIIPKTLTWHSAKRECLKSNMQLVSITDPYQQAFLSVQALLHNSSLWIGLFSQDDELNFGWSDGKRLHFSRWAETNGQLEDCVVLDTDGFWKTVDCNDNQPGAICYYSGNETEKEVKPVDSVKCPSPVLNTPWIPFQNCCYNFIITKNRHMATTQDEVHTKCQKLNPKSHILSIRDEKENNFVLEQLLYFNYMASWVMLGITYRNKSLMWFDKTPLSYTHWRAGRPTIKNEKFLAGLSTDGFWDIQTFKVIEEAVYFHQHSILACKIEMVDYKEEYNTTLPQFMPYEDGIYSVIQKKVTWYEALNMCSQSGGHLASVHNQNGQLFLEDIVKRDGFPLWVGLSSHDGSESSFEWSDGSTFDYIPWKGQTSPGNCVLLDPKGTWKHEKCNSVKDGAICYKPTKSKKLSRLTYSSRCPAAKENGSRWIQYKGHCYKSDQALHSFSEAKKLCSKHDHSATIVSIKDEDENKFVSRLMRENNNITMRVWLGLSQHSVDQSWSWLDGSEVTFVKWENKSKSGVGRCSMLIASNETWKKVECEHGFGRVVCKVPLGPDYTAIAIIVATLSILVLMGGLIWFLFQRHRLHLAGFSSVRYAQGVNEDEIMLPSFHD

SEQ ID NO: 1806 - protein, 879 aa, Homo sapiens
MKEEAFLRRRFSLCPPSSTPQKVDPRKLTRNLLLSGDNELYPLSPGKDMEPNGPSLPRDEGPPTPSSATKVPPAEYRLCNGSDKECVSPTARVTKKETLKAQKENYRQEKKRATRQLLSALTDPSVVIMADSLKIRGTLKSWTKLWCVLKPGVLLIYKTPKVGQWVGTVLLHCCELIERPSKKDGFCFKLFHPLDQSVWAVKGPKGESVGSITQPLPSSYLIFRAASESDGRCWLDALELALRCSSLLRLGTCKPGRDGEPGTSPDASPSSLCGLPASATVHPDQDLFPLNGSSLENDAFSDKSERENPEESDTETQDHSRKTESGSDQSETPGAPVRRGTTYVEQVQEELGELGEASQVETVSEENKSLMWTLLKQLRPGMDLSRVVLPTFVLEPRSFLNKLSDYYYHADLLSRAAVEEDAYSRMKLVLRWYLSGFYKKPKGIKKPYNPILGETFRCCWFHPQTDSRTFYIAEQVSHHPPVSAFHVSNRKDGFCISGSITAKSRFYGNSLSALLDGKATLTFLNRAEDYTLTMPYAHCKGILYGTMTLELGGKVTIECAKNNFQAQLEFKLKPFFGGSTSINQISGKITSGEEVLASLSGHWDRDVFIKEEGSGSSALFWTPSGEVRRQRLRQHTVPLEEQTELESERLWQHVTRAISKGDQHRATQEKFALEEAQRQRARERQESLMPWKPQLFHLDPITQEWHYRYEDHSPWDPLKDIAQFEQDGILRTLQQEAVARQTTFLGSPGPRHERSGPDQRLRKASDQPSGHSQATESSGSTPESCPELSDEEQDGDFVPGGESPCPRCRKEARRLQALHEAILSIREAQQELHRHLSAMLSSTARAAQAPTPGLLQSPRSWFLLCVFLACQLFINHILK

SEQ ID NO: 1807 - protein, 252 aa, Homo sapiens
MESEMETQSARAEEGFTQVTRKGGRRAKKRQAEQLSAAGEGGDAGRMDTEEARPAKRPVFPPLCGDGLLSGKEETRKIPVPANRYTPLKENWMKIFTPIVEHLGLQIRFNLKSRNVEIRTCKETKDVSALTKAADFVKAFILGFQVEDALALIRLDDLFLESFEITDVKPLKGDHLSRAIGRIAGKGGKTKFTIENVTRTRIVLADVKVHILGSFQNIKMARTAICNLILGNPPSKVYGNIRAVASRSADRF

SEQ ID NO: 1808 - protein, 1028 aa, Homo sapiens
MMFPWKQLILLSFIGCLGGELLLQGPVFIKEPSNSIFPVGSEDKKITLHCEARGNPSPHYRWQLNGSDIDMSMEHRYKLNGGNLVVINPNRNWDTGTYQCFATNSLGTIVSREAKLQFAYLENFKTKMRSTVSVREGQGVVLLCGPPPHSGELSYAWIFNEYPSFVEEDSRRFVSQETGHLYISKVEPSDVGNYTCVVTSMVTNARVLGSPTPLVLRSDGVMGEYEPKIEVQFPETLPAAKGSTVKLECFALGNPIPQINWRRSDGLPFSSKIKLRKFSGVLEIPNFQQEDAGSYECIAENSRGKNVARGRLTYYAKPHWVQLIKDVEIAVEDSLYWECRASGKPKPSYRWLKNGAALVLEERTQIENGALTISNLSVTDSGMFQCIAENKHGLVYSSAELKVVASAPDFSKNPMKKLVQVQVGSLVSLDCKPRASPRALSSWKKGDVSVQEHERISLLNDGGLKIANVTKADAGTYTCMAENQFGKANGTTHLVVTEPTRITLAPSNMDVSVGESVILPCQVQHDPLLDIIFTWYFNGALADFKKDGSHFEKVGGSSSGDLMIRNIQLKHSGKYVCMVQTGVDSVSSAADLIVRGSPGPPENVKVDEITDTTAQLSWKEGKDNHSPVISYSIQARTPFSVGWQTVTTVPEVIDGKTHTATVVELNPWVEYEFRVVASNKIGGGEPSLPSEKVRTEEAVPEVPPSEVNGGGGSRSELVITWDPVPEELQNGEGFGYVVAFRPLGVTTWIQTVVTSPDTPRYVFRNESIVPYSPYEVKVGVYNNKGEGPFSPVTTVFSAEEEPTVAPSQVSANSLSSSEIEVSWNTIPWKLSNGHLLGYEVRYWNGGGKEESSSKMKVAGNETSARLRGLKSNLAYYTAVRAYNSAGAGPFSATVNVTTKKTPPSQPPGNVVWNATDTKVLLNWEQVKAMENESEVTGYKVFYRTSSQNNVQVLNTNKTSAELVLPIKEDYIIEVKATTDGGDGTSSEQIRIPRITSMDARGSTSAISNVHPMSSYMPIVLFLIVYVLW

SEQ ID NO: 1809 - protein, 1066 aa, Homo sapiens
MGFELDRFDGDVDPDLKCALCHKVLEDPLTTPCGHVFCAGCVLPWVVQEGSCPARCRGRLSAKELNHVLPLKRLILKLDIKCAYATRGCGRVVKLQQLPEHLERCDFAPARCRHAGCGQVLLRRDVEAHMRDACDARPVGRCQEGCGLPLTHGEQRAGGHCCARALRAHNGALQARLGALHKALKKEALRAGKREKSLVAQLAAAQLELQMTALRYQKKFTEYSARLDSLSRCVAAPPGGKGEETKSLTLVLHRDSGSLGFNIIGGRPSVDNHDGSSSEGIFVSKIVDSGPAAKEGGLQIHDRIIEVNGRDLSRATHDQAVEAFKTAKEPIVVQVLRRTPRTKMFTPPSESQLVDTGTQTDITFEHIMALTKMSSPSPPVLDPYLLPEEHPSAHEYYDPNDYIGDIHQEMDREELELEEVDLYRMNSQDKLGLTVCYRTDDEDDIGIYISEIDPNSIAAKDGRIREGDRIIQINGIEVQNREEAVALLTSEENKNFSLLIARPELQLDEGWMDDDRNDFLDDLHMDMLEEQHHQAMQFTASVLQQKKHDEDGGTTDTATILSNQHEKDSGVGRTDESTRNDESSEQENNGDDATASSNPLAGQRKLTCSQDTLGSGDLPFSNESFISADCTDADYLGIPVDECERFRELLELKCQVKSATPYGLYYPSGPLDAGKSDPESVDKELELLNEELRSIELECLSIVRAHKMQQLKEQYRESWMLHNSGFRNYNTSIDVRRHELSDITELPEKSDKDSSSAYNTGESCRSTPLTLEISPDNSLRRAAEGISCPSSEGAVGTTEAYGPASKNLLSITEDPEVGTPTYSPSLKELDPNQPLESKERRASDGSRSPTPSQKLGSAYLPSYHHSPYKHAHIPAHAQHYQSYMQLIQQKSAVEYAQSQMSLVSMCKDLSSPTPSEPRMEWKVKIRSDGTRYITKRPVRDRLLRERALKIREERSGMTTDDDAVSEMKMGRYWSKEERKQHLVKAKEQRRRREFMMQSRLDCLKEQQAADDRKEMNILELSHKKMMKKRNKKIFDNWMTIQELLTHGTKSPDGTRVYNSFLSVTTV

SEQ ID NO: 1810 - protein, 2063 aa, Homo sapiens
MADGAPRPQLYRSVSFKLLERWSGGPGLREEDTDTPGLRRRASCRPTTAARGQPSRRVSKLASGPLAAPAQPRPLRSLSPSVRQLSRRFDAPRLDDGSAGTRDGGVLPAAAEEAAEGPARGAWPSVTEMRKLFGGPGSRRPSADSESPGTPSPDGAAWEPPARESRQPPTPPPRTCFPLAGLRSARPLTGPETEGRLRRPQQQQERAQRPADGLHSWHIFSQPQAGARASCSSSSIAASYPVSRSRAASSSEEEEEGPPQLPGAQSPAYHGGHSSGSDDDRDGEGGHRWGGRPGLRPGSSLLDQDCRPDSDGLNLSSMNSAGVSGSPEPPTSPRAPREEGLREWGSGSPPCVPGPQEGLRPMSDSVGGAFRVAKVSFPSYLASPAGSRGSSRYSSTETLKDDDLWSSRGSGGWGVYRSPSFGAGEGLLRSQARTRAKGPGGTSRALRDGGFEPEKSRQRKSLSNPDIASETLTLLSFLRSDLSELRVRKPGGSSGDRGSNPLDGRDSPSAGGPVGQLEPIPIPAPASPGTRPTLKDLTATLRRAKSFTCSEKPMARRLPRTSALKSSSSELLLTGPGAEEDPLPLIVQDQYVQEARQVFEKIQRMGAQQDDGSDAPPGSPDWAGDVTRGQRSQEELSGPESSLTDEGIGADPEPPVAAFCGLGTTGMWRPLSSSSAQTNHHGPGTEDSLGGWALVSPETPPTPGALRRRRKVPPSGSGGSELSNGEAGEAYRSLSDPIPQRHRAATSEEPTGFSVDSNLLGSLSPKTGLPATSAMDEGLTSGHSDWSVGSEESKGYQEVIQSIVQGPGTLGRVVDDRIAGKAPKKKSLSDPSRRGELAGPGFEGPGGEPIREVEPMLPPSSSEPILVEQRAEPEEPGATRSRAQSERALPEALPPPATAHRNFHLDPKLADILSPRLIRRGSKKRPARSSHQELRRDEGSQDQTGSLSRARPSSRHVRHASVPATFMPIVVPEPPTSVGPPVAVPEPIGFPTRAHPTLQAPSLEDVTKQYMLNLHSGEVPAPVPVDMPCLPLAAPPSAEAKPPEAARPADEPTPASKCCSKPQVDMRKHVAMTLLDTEQSYVESLRTLMQGYMQPLKQPENSVLCDPSLVDEIFDQIPELLEHHEQFLEQVRHCMQTWHAQQKVGALLVQSFSKDVLVNIYSAYIDNFLNAKDAVRVAKEARPAFLKFLEQSMRENKEKQALSDLMIKPVQRIPRYELLVKDLLKHTPEDHPDHPLLLEAQRNIKQVAERINKGVRSAEEAERHARVLQEIEAHIEGMEDLQAPLRRFLRQEMVIEVKAIGGKKDRSLFLFTDLIVCTTLKRKSGSLRRSSMSLYTAASVIDTASKYKMLWKLPLEDADIIKGASQATNRENIQKAISRLDEDLTTLGQMSKLSESLGFPHQSLDDALRDLSAAMHRDLSEKQALCYALSFPPTKLELCATRPEGTDSYIFEFPHPDARLGFEQAFDEAKRKLASSKSCLDPEFLKAIPIMKTRSGMQFSCAAPTLNSCPEPSPEVWVCNSDGYVGQVCLLSLRAEPDVEACIAVCSARILCIGAVPGLQPRCHREPPPSLRSPPETAPEPAGPELDVEAAADEEAATLAEPGPQPCLHISIAGSGLEMTPGLGEGDPRPELVPFDSDSDDESSPSPSGTLQSQASRSTISSSFGNEETPSSKEATAETTSSEEEQEPGFLPLSGSFGPGGPCGTSPMDGRALRRSSHGSFTRGSLEDLLSVDPEAYQSSVWLGTEDGCVHVYQSSDSIRDRRNSMKLQHAASVTCILYLNNQVFVSLANGELVVYQREAGHFWDPQNFKSVTLGTQGSPITKMVSVGGRLWCGCQNRVLVLSPDTLQLEHMFYVGQDSSRCVACMVDSSLGVWVTLKGSAHVCLYHPDTFEQLAEVDVTPPVHRMLAGSDAIIRQHKAACLRITALLVCEELLWVGTSAGVVLTMPTSPGTVSCPRAPLSPTGLGQGHTGHVRFLAAVQLPDGFNLLCPTPPPPPDTGPEKLPSLEHRDSPWHRGPAPARPKMLVISGGDGYEDFRLSSGGGSSSETVGRDDSTNHLLLWRV

SEQ ID NO: 1811 - protein, 466 aa, Homo sapiens
MADQLYLENIDEFVTDQNKIVTYKWLSYTLGVHVNQAKQMLYDYVERKRKENSGAQLHVTYLVSGSLIQNGHSCHKVAVVREDKLEAVKSKLAVTASIHVYSIQKAMLKDSGPLFNTDYDILKSNLQNCSKFSAIQCAAAVPRAPAESSSSSKKFEQSHLHMSSETQANNELTTNGHGPPASKQVSQQPKGIMGMFASKAAAKTQETNKETKTEAKEVTNASAAGNKAPGKGNMMSNFFGKAAMNKFKVNLDSEQAVKEEKIVEQPTVSVTEPKLATPAGLKKSSKKAEPVKVLQKEKKRGKRVALSDDETKETENMRKKRRRIKLPESDSSEDEVFPDSPGAYEAESPSPPPPPSPPLEPVPKTEPEPPSVKSSSGENKRKRKRVLKSKTYLDGEGCIVTEKVYESESCTDSEEELNMKTSSVHRPPAMTVKKEPREERKGPKKGTAALGKANRQVSITGFFQRK

SEQ ID NO: 1812 - protein, 830 aa, Homo sapiens
MANCQIAILYQRFQRVVFGISQLLCFSALISELTNQKEVAAWTYHYSTKAYSWNISRKYCQNRYTDLVAIQNKNEIDYLNKVLPYYSSYYWIGIRKNNKTWTWVGTKKALTNEAENWADNEPNNKRNNEDCVEIYIKSPSAPGKWNDEHCLKKKHALCYTASCQDMSCSKQGECLETIGNYTCSCYPGFYGPECEYVRECGELELPQHVLMNCSHPLGNFSFNSQCSFHCTDGYQVNGPSKLECLASGIWTNKPPQCLAAQCPPLKIPERGNMTCLHSAKAFQHQSSCSFSCEEGFALVGPEVVQCTASGVWTAPAPVCKAVQCQHLEAPSEGTMDCVHPLTAFAYGSSCKFECQPGYRVRGLDMLRCIDSGHWSAPLPTCEAISCEPLESPVHGSMDCSPSLRAFQYDTNCSFRCAEGFMLRGADIVRCDNLGQWTAPAPVCQALQCQDLPVPNEARVNCSHPFGAFRYQSVCSFTCNEGLLLVGASVLQCLATGNWNSVPPECQAIPCTPLLSPQNGTMTCVQPLGSSSYKSTCQFICDEGYSLSGPERLDCTRSGRWTDSPPMCEAIKCPELFAPEQGSLDCSDTRGEFNVGSTCHFSCDNGFKLEGPNNVECTTSGRWSATPPTCKGIASLPTPGVQCPALTTPGQGTMYCRHHPGTFGFNTTCYFGCNAGFTLIGDSTLSCRPSGQWTAVTPACRAVKCSELHVNKPIAMNCSNLWGNFSYGSICSFHCLEGQLLNGSAQTACQENGHWSTTVPTCQAGPLTIQEALTYFGGAVASTIGLIMGGTLLALLRKRFRQKDDGKCPLNPHSHLGTYGVFTNAAFDPSP

SEQ ID NO: 1813 - protein, 1254 aa, Homo sapiens
MKKHRRALALVSCLFLCSLVWLPSWRVCCKESSSASASSYYSQDDNCALENEDVQFQKKDEREGPINAESLGKSGSNLPISPKEHKLKDDSIVDVQNTESKKLSPPVVETLPTVDLHEESSNAVVDSETVENISSSSTSEITPISKLDEIEKSGTIPIAKPSETEQSETDCDVGEALDASAPIEQPSFVSPPDSLVGQHIENVSSSHGKGKITKSEFESKVSASEQGGGDPKSALNASDNLKNESSDYTKPGDIDPTSVASPKDPEDIPTFDEWKKKVMEVEKEKSQSMHASSNGGSHATKKVQKNRNNYASVECGAKILAANPEAKSTSAILIENMDLYMLNPCSTKIWFVIELCEPIQVKQLDIANYELFSSTPKDFLVSISDRYPTNKWIKLGTFHGRDERNVQSFPLDEQMYAKYVKMFIKYIKVELLSHFGSEHFCPLSLIRVFGTSMVEEYEEIADSQYHSERQELFDEDYDYPLDYNTGEDKSSKNLLGSATNAILNMVNIAANILGAKTEDLTEGNKSISENATATAAPKMPESTPVSTPVPSPEYVTTEVHTHDMEPSTPDTPKESPIVQLVQEEEEEASPSTVTLLGSGEQEDESSPWFESETQIFCSELTTICCISSFSEYIYKWCSVRVALYRQRSRTALSKGKDYLVLAQPPLLLPAESVDVSVLQPLSGELENTNIEREAETVVLGDLSSSMHQDDLVNHTVDAVELEPSHSQTLSQSLLLDITPEINPLPKIEVSESVEYEAGHIPSPVIPQESSVEIDNETEQKSESFSSIEKPSITYETNKVNELMDNIIKEDVNSMQIFTKLSETIVPPINTATVPDNEDGEAKMNIADTAKQTLISVVDSSSLPEVKEEEQSPEDALLRGLQRTATDFYAELQNSTDLGYANGNLVHGSNQKESVFMRLNNRIKALEVNMSLSGRYLEELSQRYRKQMEEMQKAFNKTIVKLQNTSRIAEEQDQRQTEAIQLLQAQLTNMTQLVSNLSATVAELKREVSDRQSYLVISLVLCVVLGLMLCMQRCRNTSQFDGDYISKLPKSNQYPSPKRCFSSYDDMNLKRRTSFPLMRSKSLQLTGKEVDPNDLYIVEPLKFSPEKKKKRCKYKIEKIETIKPEEPLHPIANGDIKGRKPFTNQRDFSNMGEVYHSSYKGPPSEGSSETSSQSEESYFCGISACTSLCNGQSQKTKTEKRALKRRRSKVQDQGKLIKTLIQTKSGSLPSLHDIIKGNKEITVGTFGVTAVSGHI

SEQ ID NO: 1814 - protein, 926 aa, Homo sapiens
MTSRFRLPAGRTYNVRASELARDRQHTEVVCNILLLDNTVQAFKVNKHDQGQVLLDVVFKHLDLTEQDYFGLQLADDSTDNPRWLDPNKPIRKQLKRGSPYSLNFRVKFFVSDPNKLQEEYTRYQYFLQIKQDILTGRLPCPSNTAALLASFAVQSELGDYDQSENLSGYLSDYSFIPNQPQDFEKEIAKLHQQHIGLSPAEAEFNYLNTARTLELYGVEFHYARDQSNNEIMIGVMSGGILIYKNRVRMNTFPWLKIVKISFKCKQFFIQLRKELHESRETLLGFNMVNYRACKNLWKACVEHHTFFRLDRPLPPQKNFFAHYFTLGSKFRYCGRTEVQSVQYGKEKANKDRVFARSPSKPLARKLMDWEVVSRNSISDDRLETQSLPSRSPPGTPNHRNSTFTQEGTRLRPSSVGHLVDHMVHTSPSEVFVNQRSPSSTQANSIVLESSPSQETPGDGKPPALPPKQSKKNSWNQIHYSHSQQDLESHINETFDIPSSPEKPTPNGGIPHDNLVLIRMKPDENGRFGFNVKGGYDQKMPVIVSRVAPGTPADLCVPRLNEGDQVVLINGRDIAEHTHDQVVLFIKASCERHSGELMLLVRPNAVYDVVEEKLENEPDFQYIPEKAPLDSVHQDDHSLRESMIQLAEGLITGTVLTQFDQLYRKKPGMTMSCAKLPQNISKNRYRDISPYDATRVILKGNEDYINANYINMEIPSSSIINQYIACQGPLPHTCTDFWQMTWEQGSSMVVMLTTQVERGRVKCHQYWPEPTGSSSYGCYQVTCHSEEGNTAYIFRKMTLFNQEKNESRPLTQIQYIAWPDHGVPDDSSDFLDFVCHVRNKRAGKEEPVVVHCSAGIGRTGVLITMETAMCLIECNQPVYPLDIVRTMRDQRAMMIQTPSQYRFVCEAILKVYEEGFVKPLTTSTNK

SEQ ID NO: 1815 - protein, 1538 aa, Homo sapiens
MEPRMESCLAQVLQKDVGKRLQVGQELIDYFSDKQKSADLEHDQTMLDKLVDGLATSWVNSSNYKVVLLGMDILSALVTRLQDRFKAQIGTVLPSLIDRLGDAKDSVREQDQTLLLKIMDQAANPQYVWDRMLGGFKHKNFRTREGICLCLIATLNASGAQTLTLSKIVPHICNLLGDPNSQVRDAAINSLVEIYRHVGERVRADLSKKGLPQSRLNVIFTKFDEVQKSGNMIQSANDKNFDDEDSVDGNRPSSASSTSSKAPPSSRRNVGMGTTRRLGSSTLGSKSSAAKEGAGAVDEEDFIKAFDDVPVVQIYSSRDLEESINKIREILSDDKHDWEQRVNALKKIRSLLLAGAAEYDNFFQHLRLLDGAFKLSAKDLRSQVVREACITLGHLSSVLGNKFDHGAEAIMPTIFNLIPNSAKIMATSGVVAVRLIIRHTHIPRLIPVITSNCTSKSVAVRRRCFEFLDLLLQEWQTHSLERHISVLAETIKKGIHDADSEARIEARKCYWGFHSHFSREAEHLYHTLESSYQKALQSHLKNSDSIVSLPQSDRSSSSSQESLNRPLSAKRSPTGSTTSRASTVSTKSVSTTGSLQRSRSDIDVNAAASAKSKVSSSSGTTPFSSAAALPPGSYASLGRIRTRRQSSGSATNVASTPDNRGRSRAKVVSQSQRSRSANPAGAGSRSSSPGKLLGSGYGGLTGGSSRGPPVTPSSEKRSKIPRSQGCSRETSPNRIGLARSSRIPRPSMSQGCSRDTSRESSRDTSPARGFPPLDRFGLGQPGRIPGSVNAMRVLSTSTDLEAAVADALKKPVRRRYEPYGMYSDDDANSDASSVCSERSYGSRNGGIPHYLRQTEDVAEVLNHCASSNWSERKEGLLGLQNLLKSQRTLSRVELKRLCEIFTRMFADPHSKRVFSMFLETLVDFIIIHKDDLQDWLFVLLTQLLKKMGADLLGSVQAKVQKALDVTRDSFPFDQQFNILMRFIVDQTQTPNLKVKVAILKYIESLARQMDPTDFVNSSETRLAVSRIITWTTEPKSSDVRKAAQIVLISLFELNTPEFTMLLGALPKTFQDGATKLLHNHLKNSSNTSVGSPSNTIGRTPSRHTSSRTSPLTSPTNCSHGGLSPSRLWGWSADGLAKHPPPFSQPNSIPTAPSHKALRRSYSPSMLDYDTENLNSEEIYSSLRGVTEAIEKFSFRSQEDLNEPIKRDGKKECDIVSRDGGAASPATEGRGGSEVEGGRTALDNKTSLLNTQPPRAFPGPRARDYNPYPYSDAINTYDKTALKEAVFDDDMEQLRDVPIDHSDLVADLLKELSNHNERVEERKGALLELLKITREDSLGVWEEHFKTILLLLLETLGDKDHSIRALALRVLREILRNQPARFKNYAELTIMKTLEAHKDSHKEVVRAAEEAASTLASSIHPEQCIKVLCPIIQTADYPINLAAIKMQTKVVERIAKESLLQLLVDIIPGLLQGYDNTESSVRKASVFCLVAIYSVIGEDLKPHLAQLTGSKMKLLNLYIKRAQTTNSNSSSSSDVSTHS

SEQ ID NO: 1816 - protein, 733 aa, Homo sapiens
MLSFFRRTLGRRSMRKHAEKERLREAQRAATHIPAAGDSKSIITCRVSLLDGTDVSVDLPKKAKGQELFDQIMYHLDLIESDYFGLRFMDSAQVAHWLDGTKSIKKQVKIGSPYCLHLRVKFYSSEPNNLREELTRYLFVLQLKQDILSGKLDCPFDTAVQLAAYNLQAELGDYDLAEHSPELVSEFRFVPIQTEEMELAIFEKWKEYRGQTPAQAETNYLNKAKWLEMYGVDMHVVKARDGNDYSLGLTPTGVLVFEGDTKIGLFFWPKITRLDFKKNKLTLVVVEDDDQGKEQEHTFVFRLDHPKACKHLWKCAVEHHAFFRLRGPVQKSSHRSGFIRLGSRFRYSGKTEYQTTKTNKARRSTSFERRPSKRYSRRTLQMKACATKPEELSVHNNVSTQSNGSQQAWGMRSALPVSPSISSAPVPVEIENLPQSPGTDQHDRKCIPLNIDLLNSPDLLEATIGDVIGASDTMETSQALNDVNVATRLPGLGEPEVEYETLKDTSEKLKQLEMENSPLLSPRSNIDVNINSQEEVVKLTEKCLNNVIESPGLNVMRVPPDFKSNILKAQVEAVHKVTKEDSLLSHKNANVQDAATNSAVLNENNVPLPKESLETLMLITPADSGSVLKEATDELDALLASLTENLIDHTVAPQVSSTSMITPRWIVPQSGAMSNGLAGCEMLLTGKEGHGNKDGISLISPPAPFLVDAVTSSGPILAEEAVLKQKCLLTTEL

SEQ ID NO: 1817 - protein, 870 aa, Homo sapiens
MTADKEKKRSSSERRKEKSRDAARCRRSKETEVFYELAHELPLPHSVSSHLDKASIMRLAISFLRTHKLLSSVCSENESEAEADQQMDNLYLKALEGFIAVVTQDGDMIFLSENISKFMGLTQVELTGHSIFDFTHPCDHEEIRENLSLKNGSGFGKKSKDMSTERDFFMRMKCTVTNRGRTVNLKSATWKVLHCTGQVKVYNNCPPHNSLCGYKEPLLSCLIIMCEPIQHPSHMDIPLDSKTFLSRHSMDMKFTYCDDRITELIGYHPEELLGRSAYEFYHALDSENMTKSHQNLCTKGQVVSGQYRMLAKHGGYVWLETQGTVIYNPRNLQPQCIMCVNYVLSEIEKNDVVFSMDQTESLFKPHLMAMNSIFDSSGKGAVSEKSNFLFTKLKEEPEELAQLAPTPGDAIISLDFGNQNFEESSAYGKAILPPSQPWATELRSHSTQSEAGSLPAFTVPQAAAPGSTTPSATSSSSSCSTPNSPEDYYTSLDNDLKIEVIEKLFAMDTEAKDQCSTQTDFNELDLETLAPYIPMDGEDFQLSPICPEERLLAENPQSTPQHCFSAMTNIFQPLAPVAPHSPFLLDKFQQQLESKKTEPEHRPMSSIFFDAGSKASLPPCCGQASTPLSSMGGRSNTQWPPDPPLHFGPTKWAVGDQRTEFLGAAPLGPPVSPPHVSTFKTRSAKGFGARGPDVLSPAMVALSNKLKLKRQLEYEEQAFQDLSGGDPPGGSTSHLMWKRMKNLRGGSCPLMPDKPLSANVPNDKFTQNPMRGLGHPLRHLPLPQPPSAISPGENSKSRFPPQCYATQYQDYSLSSAHKVSGMASRLLGPSFESYLLPELTRYDCEVNVPVLGSSTLLQGGDLLRALDQAT

SEQ ID NO: 1818 - protein, 995 aa, Homo sapiens
MSSLPRRAKVQVQDVVLKDEFSSFSELSSASEEDDKEDSAWEPQKKVPRSRKQPPPKESKPKRMPRVKKNAPQISDGSEVVVVKEELNSSVAIADTALEDRKNKLDTVQTLKTAKTKQKCAAQPHTVRRTKKLKVEEETSKASNLEGESNSSETPSTSTVWGGTCKKEENDDDFTFGQSALKKIKTETYPQGQPVKFPANANSTKEEVEMNWDMVQVLSERTNIEPWVCANIIRLFNDDNTIPFIIRYRKELINNLDADSLREVQQTLEELRAVAKKVHSTIQKIKKEGKMSECLLKAMLNCKTFEELEHVSAPYKTGSKGTKAQRARQLGLEGAARALLEKPGELSLLSYIRPDVKGLSTLQDIEIGVQHILADMIAKDKDTLDFIRNLCQKRHVCIQSSLAKVSSKKVNEKDVDKFLLYQHFSCNIRNIHHHQILAINRGENLKVLTVKVNISDGVKDEFCRWCIQNRWRPRSFARPELMKILYNSLNDSFKRLIYPLLCREFRAKLTSDAEKESVMMFGRNLRQLLLTSPVPGRTLMGVDPGYKHGCKLAIISPTSQILHTDVVYLHCGQGFREAEKIKTLLLNFNCSTVVIGNGTACRETEAYFADLIMKNYFAPLDVVYCIVSEAGASIYSVSPEANKEMPGLDPNLRSAVSIARRVQDPLAELVKIEPKHIGVGMYQHDVSQTLLKATLDSVVEECVSFVGVDINICSEVLLRHIAGLNANRAKNIIEWREKNGPFINREQLKKVKGLGPKSFQQCAGFIRINQDYIRTFCSQQTETSGQIQGVAVTSSADVEVTNEKQGKKKSKTAVNVLLKPNPLDQTCIHPESYDIAMRFLSSIGGTLYEVGKPEMQQKINSFLEKEGMEKIAERLQTTVHTLQVIIDGLSQPESFDFRTDFDKPDFKRSIVCLEDLQIGTVLTGKVENATLFGIFVDIGVGKSGLIPIRNVTEAKLSKTKKRRSLGLGPGERVEVQVLNIDIPRSRITLDLIRVL

SEQ ID NO: 1819 - protein, 561 aa, Homo sapiens
MAKERCLKKSFQDSLEDIKKRMKEKRNKNLAEIGKRRSFIAAPCQIITNTSTLLKNYQDNNKMLVLALENEKSKVKEAQDIILQLRKECYYLTCQLYALKGKLTSQQTVEPAQNQEICSSGMDPNSDDSSRNLFVKDLPQIPLEETELPGQGESFQIEDQIPTIPQDTLGVDFDSGEAKSTDNVLPRTVSVRSSLKKHCNSICQFDSLDDFETSHLAGKSFEFERVGFLDPLVNMHIPENVQHNACQWSKDQVNLSPKLIQPGTFTKTKEDILESKSEQTKSKQRDTQERKREEKRKANRRKSKRMSKYKENKSENKKTVPQKKMHKSVSSNDAYNFNLEEGVHLTPFRQKVSNDSNREENNESEVSLCESSGSGDDSDDLYLPTCKYIQNPTSNSDRPVTRPLAKRALKYTDEKETEGSKPTKTPTTTPPETQQSPHLSLKDITNVSLYPVVKIRRLSLSPKKNKASPAVALPKRRCTASVNYKEPTLASKLRRGDPFTDLCFLNSPIFKQKKDLRRSKKRALEVSPAKEAIFILYYVREFVSRFPDCRKCKLETHICLR

SEQ ID NO: 1820 - protein, 832 aa, Homo sapiens
MSEAGGAGPGGCGAGAGAGAGPGALPPQPAALPPAPPQGSPCAAAAGGSGACGPATAVAAAGTAEGPGGGGSARIAVKKAQLRSAPRAKKLEKLGVYSACKAEESCKCNGWKNPNPSPTPPRADLQQIIVSLTESCRSCSHALAAHVSHLENVSEEEMNRLLGIVLDVEYLFTCVHKEEDADTKQVYFYLFKLLRKSILQRGKPVVEGSLEKKPPFEKPSIEQGVNNFVQYKFSHLPAKERQTIVELAKMFLNRINYWHLEAPSQRRLRSPNDDISGYKENYTRWLCYCNVPQFCDSLPRYETTQVFGRTLLRSVFTVMRRQLLEQARQEKDKLPLEKRTLILTHFPKFLSMLEEEVYSQNSPIWDQDFLSASSRTSQLGIQTVINPPPVAGTISYNSTSSSLEQPNAGSSSPACKASSGLEANPGEKRKMTDSHVLEEAKKPRVMGDIPMELINEVMSTITDPAAMLGPETNFLSAHSARDEAARLEERRGVIEFHVVGNSLNQKPNKKILMWLVGLQNVFSHQLPRMPKEYITRLVFDPKHKTLALIKDGRVIGGICFRMFPSQGFTEIVFCAVTSNEQVKGYGTHLMNHLKEYHIKHDILNFLTYADEYAIGYFKKQGFSKEIKIPKTKYVGYIKDYEGATLMGCELNPRIPYTEFSVIIKKQKEIIKKLIERKQAQIRKVYPGLSCFKDGVRQIPIESIPGIRETGWKPSGKEKSKEPRDPDQLYSTLKSILQQVKSHQSAWPFMEPVKRTEAPGYYEVIRFPMDLKTMSERLKNRYYVSKKLFMADLQRVFTNCKEYNPPESEYYKCANILEKFFFSKIKEAGLIDK

SEQ ID NO: 1821 - protein, 501 aa, Homo sapiens
MFTLPQKDFRAPTTCLGPTCMQDLGSSHGEDLEGECSRKLDQKLPELRGVGDPAMISSDTSYLSSRGRMIKWFWDSAEEGYRTYHMDEYDEDKNPSGIINLGTSENKLCFDLLSWRLSQRDMQRVEPSLLQYADWRGHLFLREEVAKFLSFYCKSPVPLRPENVVVLNGGASLFSALATVLCEAGEAFLIPTPYYGAITQHVCLYGNIRLAYVYLDSEVTGLDTRPFQLTVEKLEMALREAHSEGVKVKGLILISPQNPLGDVYSPEELQEYLVFAKRHRLHVIVDEVYMLSVFEKSVGYRSVLSLERLPDPQRTHVMWATSKDFGMSGLRFGTLYTENQDVATAVASLCRYHGLSGLVQYQMAQLLRDRDWINQVYLPENHARLKAAHTYVSEELRALGIPFLSRGAGFFIWVDLRKYLPKGTFEEEMLLWRRFLDNKVLLSFGKAFECKEPGWFRFVFSDQVHRLCLGMQRVQQVLAGKSQVAEDPRPSQSQEPSDQRR

SEQ ID NO: 1822 - protein, 291 aa, Homo sapiens
MSCQAFTSADTFIPLNSDASATLPLIMHHSAAECLPVSNHATNVMSTATGLHYSVPSCHYGNQPSTYGVMAGSLTPCLYKFPDHTLSHGFPPIHQPLLAEDPTAADFKQELRRKSKLVEEPIDMDSPEIRELEKFANEFKVRRIKLGYTQTNVGEALAAVHGSEFSQTTICRFENLQLSFKNACKLKAILSKWLEEAEQVGALYNEKVGANERKRKRRTTISIAAKDALERHFGEQNKPSSQEIMRMAEELNLEKEVVRVWFCNRRQREKRVKTSLNQSLFSISKEHLECR

SEQ ID NO: 1823 - protein, 1649 aa, Homo sapiens
MAGGRGAPGRGRDEPPESYPQRQDHELQALEAIYGADFQDLRPDACGPVKEPPEINLVLYPQGLTGEEVYVKVDLRVKCPPTYPDVVPEIELKNAKGLSNESVNLLKSRLEELAKKHCGEVMIFELAYHVQSFLSEHNKPPPKSFHEEMLERRAQEEQQRLLEAKRKEEQEQREILHEIQRRKEEIKEEKKRKEMAKQERLEIASLSNQDHTSKKDPGGHRTAAILHGGSPDFVGNGKHRANSSGRSRRERQYSVCNSEDSPGSCEILYFNMGSPDQLMVHKGKCIGSDEQLGKLVYNALETATGGFVLLYEWVLQWQKKMGPFLTSQEKEKIDKCKKQIQGTETEFNSLVKLSHPNVVRYLAMNLKEQDDSIVVDILVEHISGVSLAAHLSHSGPIPVHQLRRYTAQLLSGLDYLHSNSVVHKVLSASNVLVDAEGTVKITDYSISKRLADICKEDVFEQTRVRFSDNALPYKTGKKGDVWRLGLLLLSLSQGQECGEYPVTIPSDLPADFQDFLKKCVCLDDKERWSPQQLLKHSFINPQPKMPLVEQSPEDSEGQDYVETVIPSNRLPSAAFFSETQRQFSRYFIEFEELQLLGKGAFGAVIKVQNKLDGCCYAVKRIPINPASRQFRRIKGEVTLLSRLHHENIVRYYNAWIERHERPAGPGTPPPDSGPLAKDDRAARGQPASDTDGLDSVEAAAPPPILSSSVEWSTSGERSASARFPATGPGSSDDEDDDEDEHGGVFSQSFLPASDSESDIIFDNEDENSKSQNQDEDCNEKNGCHESEPSVTTEAVHYLYIQMEYCEKSTLRDTIDQGLYRDTVRLWRLFREILDGLAYIHEKGMIHRDLKPVNIFLDSDDHVKIGDFGLATDHLAFSADSKQDDQTGDLIKSDPSGHLTGMVGTALYVSPEVQGSTKSAYNQKVDLFSLGIIFFEMSYHPMVTASERIFVLNQLRDPTSPKFPEDFDDGEHAKQKSVISWLLNHDPAKRPTATELLKSELLPPPQMEESELHEVLHHTLTNVDGKAYRTMMAQIFSQRISPAIDYTYDSDILKGNFSIRTAKMQQHVCETIIRIFKRHGAVQLCTPLLLPRNRQIYEHNEAALFMDHSGMLVMLPFDLRIPFARYVARNNILNLKRYCIERVFRPRKLDRFHPKELLECAFDIVTSTTNSFLPTAEIIYTIYEIIQEFPALQERNYSIYLNHTMLLKAILLHCGIPEDKLSQVYIILYDAVTEKLTRREVEAKFCNLSLSSNSLCRLYKFIEQKGDLQDLMPTINSLIKQKTGIAQLVKYGLKDLEEVVGLLKKLGIKLQVLINLGLVYKVQQHNGIIFQFVAFIKRRQRAVPEILAAGGRYDLLIPQFRGPQALGPVPTAIGVSIAIDKISAAVLNMEESVTISSCDLLVVSVGQMSMSRAINLTQKLWTAGITAEIMYDWSQSQEELQEYCRHHEITYVALVSDKEGSHVKVKSFEKERQTEKRVLETELVDHVLQKLRTKVTDERNGREASDNLAVQNLKGSFSNASGLFEIHGATVVPIVSVLAPEKLSASTRRRYETQVQTRLQTSLANLHQKSSEIEILAVDLPKETILQFLSLEWDADEQAFNTTVKQLLSRLPKQRYLKLVCDEIYNIKVEKKVSVLFLYSYRDDYYRILF

SEQ ID NO: 1824 - protein, 626 aa, Homo sapiens
MSRSGAAAEKADSRQRPQMKVNEYKENQNIAYVSLRPAQTTVLIKTAKVYLAPFSLSNYQLDQLMCPKSLSEKNSNNEVACKKTKIKKTCRRIIPPKMKNTSSKAESTLQNSSSAVHTESNKLQPKRTADAMNLSVDVESSQDGDSDEDTTPSLDFSGLSPYERKRLKNISENADFFASLQLSESAARLREMIEKRQPPKSKRKKPKRENGIGCRRSMRLLKVDPSGVSLPAAPTPPTLVADETPLLPPGPLEMTSENQEDNNERFKGFLHTWAGMSKPSSKNTEKGLSSIKSYKANLNGMVISEDTVYKVTTGPIFSMALHPSETRTLVAVGAKFGQVGLCDLTQQPKEDGVYVFHPHSQPVSCLYFSPANPAHILSLSYDGTLRCGDFSRAIFEEVYRNERSSFSSFDFLAEDASTLIVGHWDGNMSLVDRRTPGTSYEKLTSSSMGKIRTVHVHPVHRQYFITAGLRDTHIYDARRLNSRRSQPLISLTEHTKSIASAYFSPLTGNRVVTTCADCNLRIFDSSCISSKIPLLTTIRHNTFTGRWLTRFQAMWDPKQEDCVIVGSMAHPRRVEIFHETGKRVHSFGGEYLVSVCSINAMHPTRYILAGGNSSGKIHVFMNEKSC

SEQ ID NO: 1825 - protein, 890 aa, Homo sapiens
MALRRSMGRPGLPPLPLPPPPRLGLLLAALASLLLPESAAAGLKLMGAPVKLTVSQGQPVKLNCSVEGMEEPDIQWVKDGAVVQNLDQLYIPVSEQHWIGFLSLKSVERSDAGRYWCQVEDGGETEISQPVWLTVEGVPFFTVEPKDLAVPPNAPFQLSCEAVGPPEPVTIVWWRGTTKIGGPAPSPSVLNVTGVTQSTMFSCEAHNLKGLASSRTATVHLQALPAAPFNITVTKLSSSNASVAWMPGADGRALLQSCTVQVTQAPGGWEVLAVVVPVPPFTCLLRDLVPATNYSLRVRCANALGPSPYADWVPFQTKGLAPASAPQNLHAIRTDSGLILEWEEVIPEAPLEGPLGPYKLSWVQDNGTQDELTVEGTRANLTGWDPQKDLIVRVCVSNAVGCGPWSQPLVVSSHDRAGQQGPPHSRTSWVPVVLGVLTALVTAAALALILLRKRRKETRFGQAFDSVMARGEPAVHFRAARSFNRERPERIEATLDSLGISDELKEKLEDVLIPEQQFTLGRMLGKGEFGSVREAQLKQEDGSFVKVAVKMLKADIIASSDIEEFLREAACMKEFDHPHVAKLVGVSLRSRAKGRLPIPMVILPFMKHGDLHAFLLASRIGENPFNLPLQTLIRFMVDIACGMEYLSSRNFIHRDLAARNCMLAEDMTVCVADFGLSRKIYSGDYYRQGCASKLPVKWLALESLADNLYTVQSDVWAFGVTMWEIMTRGQTPYAGIENAEIYNYLIGGNRLKQPPECMEDVYDLMYQCWSADPKQRPSFTCLRMELENILGQLSVLSASQDPLYINIERAEEPTAGGSLELPGRDQPYSGAGDGSGMGAVGGTPSDCRYILTPGGLAEQPGQAEHQPESPLNETQRLLLLQQGLLPHSSC

SEQ ID NO: 1826 - protein, 864 aa, Homo sapiens
MGCWGQLLVWFGAAGAILCSSPGSQETFLRSSPLPLASPSPRDPKVSAPPSILEPASPLNSPGTEGSWLFSTCGASGRHGPTQTQCDGAYAGTSVVVTVGAAGQLRGVQLWRVPGPGQYLISAYGAAGGKGAKNHLSRAHGVFVSAIFSLGLGESLYILVGQQGEDACPGGSPESQLVCLGESRAVEEHAAMDGSEGVPGSRRWAGGGGGGGGATYVFRVRAGELEPLLVAAGGGGRAYLRPRDRGRTQASPEKLENRSEAPGSGGRGGAAGGGGGWTSRAPSPQAGRSLQEGAEGGQGCSEAWATLGWAAAGGFGGGGGACTAGGGGGGYRGGDASETDNLWADGEDGVSFIHPSSELFLQPLAVTENHGEVEIRRHLNCSHCPLRDCQWQAELQLAECLCPEGMELAVDNVTCMDLHKPPGPLVLMVAVVATSTLSLLMVCGVLILVKQKKWQGLQEMRLPSPELELSKLRTSAIRTAPNPYYCQVGLGPAQSWPLPPGVTEVSPANVTLLRALGHGAFGEVYEGLVIGLPGDSSPLQVAIKTLPELCSPQDELDFLMEALIISKFRHQNIVRCVGLSLRATPRLILLELMSGGDMKSFLRHSRPHLGQPSPLVMRDLLQLAQDIAQGCHYLEENHFIHRDIAARNCLLSCAGPSRVAKIGDFGMARDIYRASYYRRGDRALLPVKWMPPEAFLEGIFTSKTDSWSFGVLLWEIFSLGYMPYPGRTNQEVLDFVVGGGRMDPPRGCPGPVYRIMTQCWQHEPELRPSFASILERLQYCTQDPDVLNSLLPMELGPTPEEEGTSGLGNRSLECLRPPQPQELSPEKLKSWGGSPLGPWLSSGLKPLKSRGLQPQNLWNPTYRS

SEQ ID NO: 1827 - protein, 1972 aa, Homo sapiens
MDPTGSQLDSDFSQQDTPCLIIEDSQPESQVLEDDSGSHFSMLSRHLPNLQTHKENPVLDVVSNPEQTAGEERGDGNSGFNEHLKENKVADPVDSSNLDTCGSISQVIEQLPQPNRTSSVLGMSVESAPAVEEEKGEELEQKEKEKEEDTSGNTTHSLGAEDTASSQLGFGVLELSQSQDVEENTVPYEVDKEQLQSVTTNSGYTRLSDVDANTAIKHEEQSNEDIPIAEQSSKDIPVTAQPSKDVHVVKEQNPPPARSEDMPFSPKASVAAMEAKEQLSAQELMESGLQIQKSPEPEVLSTQEDLFDQSNKTVSSDGCSTPSREEGGCSLASTPATTLHLLQLSGQRSLVQDSLSTNSSDLVAPSPDAFRSTPFIVPSSPTEQEGRQDKPMDTSVLSEEGGEPFQKKLQSGEPVELENPPLLPESTVSPQASTPISQSTPVFPPGSLPIPSQPQFSHDIFIPSPSLEEQSNDGKKDGDMHSSSLTVECSKTSEIEPKNSPEDLGLSLTGDSCKLMLSTSEYSQSPKMESLSSHRIDEDGENTQIEDTEPMSPVLNSKFVPAENDSILMNPAQDGEVQLSQNDDKTKGDDTDTRDDISILATGCKGREETVAEDVCIDLTCDSGSQAVPSPATRSEALSSVLDQEEAMEIKEHHPEEGSSGSEVEEIPETPCESQGEELKEENMESVPLHLSLTETQSQGLCLQKEMPKKECSEAMEVETSVISIDSPQKLAILDQELEHKEQEAWEEATSEDSSVVIVDVKEPSPRVDVSCEPLEGVEKCSDSQSWEDIAPEIEPCAENRLDTKEEKSVEYEGDLKSGTAETEPVEQDSSQPSLPLVRADDPLRLDQELQQPQTQEKTSNSLTEDSKMANAKQLSSDAEAQKLGKPSAHASQSFCESSSETPFHFTLPKEGDIIPPLTGATPPLIGHLKLEPKRHSTPIGISNYPESTIATSDVMSESMVETHDPILGSGKGDSGAAPDVDDKLCLRMKLVSPETEASEESLQFNLEKPATGERKNGSTAVAESVASPQKTMSVLSCICEARQENEARSEDPPTTPIRGNLLHFPSSQGEEEKEKLEGDHTIRQSQQPMKPISPVKDPVSPASQKMVIQGPSSPQGEAMVTDVLEDQKEGRSTNKENPSKALIERPSQNNIGIQTMECSLRVPETVSAATQTIKNVCEQGTSTVDQNFGKQDATVQTERGSGEKPVSAPGDDTESLHSQGEEEFDMPQPPHGHVLHRHMRTIREVRTLVTRVITDVYYVDGTEVERKVTEETEEPIVECQECETEVSPSQTGGSSGDLGDISSFSSKASSLHRTSSGTSLSAMHSSGSSGKGAGPLRGKTSGTEPADFALPSSRGGPGKLSPRKGVSQTGTPVCEEDGDAGLGIRQGGKAPVTPRGRGRRGRPPSRTTGTRETAVPGPLGIEDISPNLSPDDKSFSRVVPRVPDSTRRTDVGAGALRRSDSPEIPFQAAAGPSDGLDASSPGNSFVGLRVVAKWSSNGYFYSGKITRDVGAGKYKLLFDDGYECDVLGKDILLCDPIPLDTEVTALSEDEYFSAGVVKGHRKESGELYYSIEKEGQRKWYKRMAVILSLEQGNRLREQYGLGPYEAVTPLTKAADISLDNLVEGKRKRRSNVSSPATPTASSSSSTTPTRKITESPRASMGVLSGKRKLITSEEERSPAKRGRKSATVKPGAVGAGEFVSPCESGDNTGEPSALEEQRGPLPLNKTLFLGYAFLLTMATTSDKLASRSKLPDGPTGSSEEEEEFLEIPPFNKQYTESQLRAGAGYILEDFNEAQCNTAYQCLLIADQHCRTRKYFLCLASGIPCVSHVWVHDSCHANQLQNYRNYLLPAGYSLEEQRILDWQPRENPFQNLKVLLVSDQQQNFLELWSEILMTGGAASVKQHHSSAHNKDIALGVFDVVVTDPSCPASVLKCAEALQLPVVSQEWVIQCLIVGERIGFKQHPKYKHDYVSH

SEQ ID NO: 1828 - protein, 1883 aa, Homo sapiens
MPVGRIECPSSPSFPRDISHECRVCGVTEVGLSAYAKHISGQLHKDNVDAQEREDDGKGEEEEEDYFDKELIQLIKQRKEQSRQDEPSNSNQEINSDDRRPQWRREDRIPYQDRESYSQPAWHHRGPPQRDWKWEKDGFNNTRKNSFPHSLRNGGGPRGRSGWHKGVAGGSSTWFHNHSNSGGGWLSNSGAVDWNHNGTGRNSSWLSEGTGGFSSWHMNNSNGNWKSSVRSTNNWNYSGPGDKFQPGRNRNSNCQMEDMTMLWNKKSNKSNKYSHDRYNWQRQENDKLGTVATYRGPSEGFTSDKFPSEGLLDFNFEQLESQTTKQADTATSKVSGKNGSAAREKPRRWTPYPSQKTLDLQSGLKDITGNKSEMIEKPLFDFSLITTGIQEPQTDETRNSPTQKTQKEIHTGSLNHKASSDSAASFEVVRQCPTAEKPEQEHTPNKMPSLKSPLLPCPATKSLSQKQDPKNISKNTKTNFFSPGEHSNPSNKPTVEDNHGPYISKLRSSCPHVLKGNKSTFGSQKQSGDNLNDTLRKAKEVLQCHESLQNPLLSTSKSTRNYAKASRNVEESEKGSLKIEFQVHALEDESDGETSDTEKHGTKIGTLGSATTELLSGSTRTADEKEEDDRILKTSRELSTSPCNPIVRQKESELQMTSAASPHPGLLLDLKTSLEDAQVDDSIKSHVSYETEGFESASLDAELQKSDISQPSGPLLPELSKLGFPASLQRDLTRHISLKSKTGVHLPEPNLNSARRIRNISGHRKSETEKESGLKPTLRQILNASRRNVNWEQVIQQVTKKKQELGKGLPRFGIEMVPLVQNEQEALDLDGEPDLSSLEGFQWEGVSISSSPGLARKRSLSESSVIMDRAPSVYSFFSEEGTGKENEPQQMVSPSNSLRAGQSQKATMHLKQEVTPRAASLRTGERAENVATQRRHSAQLSSDHIIPLMHLAKDLNSQERSIPPSENQNSQESNGEGNCLSSSASSALAISSLADAATDSSCTSGAEQNDGQSIRKKRRATGDGSSPELPSLERKNKRRKIKGKKERSQVDQLLNISLREEELSKSLQCMDNNLLQARAALQTAYVEVQRLLMLKQQITMEMSALRTHRIQILQGLQETYEPSEHPDQVPCSLTRERRNSRSQTSIDAALLPTPFFPLFLEPPSSHVSPSPTGASLQITTSPTFQTHGSVPAPDSSVQIKQEPMSPEQDENVNAVPPSSACNVSKELLEANREISDSCPVYPVITARLSLPESTESFHEPSQELKFSVEQRNTRNRENSPSSQSAGLSSINKEGEEPTKGNSGSEACTSSFLRLSFASETPLEKEPHSPADQPEQQAESTLTSAETRGSKKKKKLRKKKSLRAAHVPENSDTEQDVLTVKPVRKVKAGKLIKGGKVTTSTWEDSRTGREQESVRDEPDSDSSLEVLEIPNPQLEVVAIDSSESGEEKPDSPSKKDIWNSTEQNPLETSRSGCDEVSSTSEIGTRYKDGIPVSVAETQTVISSIKGSKNSSEISSEPGDDDEPTEGSFEGHQAAVNAIQIFGNLLYTCSADKTVRVYNLVSRKCIGVFEGHTSKVNCLLVTQTSGKNAALYTGSSDHTIRCYNVKSRECVEQLQLEDRVLCLHSRWRILYAGLANGTVVTFNIKNNKRLEIFECHGPRAVSCLATAQEGARKLLVVGSYDCTISVRDARNGLLLRTLEGHSKTILCMKVVNDLVFSGSSDQSVHAHNIHTGELVRIYKGHNHAVTVVNILGKVMVTACLDKFVRVYELQSHDRLQVYGGHKDMIMCMTIHKSMIYTGCYDGSIQAVRLNLMQNYRCWWHGCSLIFGVVDHLKQHLLTDHTNPNFQTLKCRWKNCDAFFTARKGSKQDAAGHIERHAEDDSKIDS

SEQ ID NO: 1829 - protein, 479 aa, Homo sapiens
MSDVTIVKEGWVQKRGEYIKNWRPRYFLLKTDGSFIGYKEKPQDVDLPYPLNNFSVAKCQLMKTERPKPNTFIIRCLQWTTVIERTFHVDTPEEREEWTEAIQAVADRLQRQEEERMNCSPTSQIDNIGEEEMDASTTHHKRKTMNDFDYLKLLGKGTFGKVILVREKASGKYYAMKILKKEVIIAKDEVAHTLTESRVLKNTRHPFLTSLKYSFQTKDRLCFVMEYVNGGELFFHLSRERVFSEDRTRFYGAEIVSALDYLHSGKIVYRDLKLENLMLDKDGHIKITDFGLCKEGITDAATMKTFCGTPEYLAPEVLEDNDYGRAVDWWGLGVVMYEMMCGRLPFYNQDHEKLFELILMEDIKFPRTLSSDAKSLLSGLLIKDPNKRLGGGPDDAKEIMRHSFFSGVNWQDVYDKKLVPPFKPQVTSETDTRYFDEEFTAQTITITPPEKYDEDGMDCMDNERRPHFPQFSYSASGRE

SEQ ID NO: 1830 - protein, 409 aa, Homo sapiens
MGNSYAGQLKTTRFEEVLHNSIEASLRSNNLVPRPIFSQLYLEAEQQLAALEGGSRVDNEEEEEEGEGGLETNGPPNPFQLHPLPEGCCTTDGFCQAGKDLRLVSISNEPMDVPAGFLLVGVKSPSLPDHLLVCAVDKRFLPDDNGHNALLGFSGNCVGCGKKGFCYFTEFSNHINLKLTTQPKKQKHLKYYLVRNAQGTLTKGPLICWKGSEFRSRQIPASTCSSSLFPALESTAAFPSEPVPGTNPSILMGAQQAGPASDHPSLNAAMGPAVFNGKDSPKCQQLAKNNLLALPRPSALGILSNSGPPKKRHKGWSPESPSAPDGGCPQGGGNRAKYESAGMSCVPQVGLVGPASVTFPVVASGEPVSVPDNLLKICKAKPVIFKVFVNGATQMVALGPAEPASPRSL

SEQ ID NO: 1831 - protein, 403 aa, Homo sapiens
MYRDPEAASPGAPSRDVLLVSAIITVSLSVTVVLCGLCHWCQRKLGKRYKNSLETVGTPDSGRGRSEKKAIKLPAGGKAVNTAPVPGQTPHDESDRRTEPRSSVSDLVNSLTSEMLMLSPGSEEDEAHEGCSRENLGRIQFSVGYNFQESTLTVKIMKAQELPAKDFSGTSDPFVKIYLLPDKKHKLETKVKRKNLNPHWNETFLFEGFPYEKVVQRILYLQVLDYDRFSRNDPIGEVSIPLNKVDLTQMQTFWKDLKPCSDGSGSRGELLLSLCYNPSANSIIVNIIKARNLKAMDIGGTSDPYVKVWLMYKDKRVEKKKTVTMKRNLNPIFNESFAFDIPTEKLRETTIIITVMDKDKLSRNDVIGKIYLSWKSGPGEVKHWKDMIARPRQPVAQWHQLKA

SEQ ID NO: 1832 - protein, 807 aa, Homo sapiens
MAATELRGVVGPGPAAIAALGGGGAGPPVVGGGGGRGDAGPGSGAASGTVVAAAAGGPGPGAGGVAAAGPAPAPPTGGSGGSGAGGSGSAREGWLFKWTNYIKGYQRRWFVLSNGLLSYYRSKAEMRHTCRGTINLATANITVEDSCNFIISNGGAQTYHLKASSEVERQRWVTALELAKAKAVKMLAESDESGDEESVSQTDKTELQNTLRTLSSKVEDLSTCNDLIAKHGTALQRSLSELESLKLPAESNEKIKQVNERATLFRITSNAMINACRDFLMLAQTHSKKWQKSLQYERDQRIRLEETLEQLAKQHNHLERAFRGATVLPANTPGNVGSGKDQCCSGKGDMSDEDDENEFFDAPEIITMPENLGHKRTGSNISGASSDISLDEQYKHQLEETKKEKRTRIPYKPNYSLNLWSIMKNCIGKELSKIPMPVNFNEPLSMLQRLTEDLEYHELLDRAAKCENSLEQLCYVAAFTVSSYSTTVFRTSKPFNPLLGETFELDRLEENGYRSLCEQVSHHPPAAAHHAESKNGWTLRQEIKITSKFRGKYLSIMPLGTIHCIFHATGHHYTWKKVTTTVHNIIVGKLWIDQSGEIDIVNHKTGDKCNLKFVPYSYFSRDVARKVTGEVTDPSGKVHFALLGTWDEKMECFKVQPVIGENGGDARQRGHEAEESRVMLWKRNPLPKNAENMYYFSELALTLNAWESGTAPTDSRLRPDQRLMENGRWDEANAEKQRLEEKQRLSRKKREAEAMKATEDGTPYDPYKALWFERKKDPVTKELTHIYRGEYWECKEKQDWSSCPDIF

SEQ ID NO: 1833 - protein, 1720 aa, Homo sapiens
MLISKNMPWRRLQGISFGMYSAEELKKLSVKSITNPRYLDSLGNPSANGLYDLALGPADSKEVCSTCVQDFSNCSGHLGHIELPLTVYNPLLFDKLYLLLRGSCLNCHMLTCPRAVIHLLLCQLRVLEVGALQAVYELERILNRFLEENPDPSASEIREELEQYTTEIVQNNLLGSQGAHVKNVCESKSKLIALFWKAHMNAKRCPHCKTGRSVVRKEHNSKLTITFPAMVHRTAGQKDSEPLGIEEAQIGKRGYLTPTSAREHLSALWKNEGFFLNYLFSGMDDDGMESRFNPSVFFLDFLVVPPSRYRPVSRLGDQMFTNGQTVNLQAVMKDVVLIRKLLALMAQEQKLPEEVATPTTDEEKDSLIAIDRSFLSTLPGQSLIDKLYNIWIRLQSHVNIVFDSEMDKLMMDKYPGIRQILEKKEGLFRKHMMGKRVDYAARSVICPDMYINTNEIGIPMVFATKLTYPQPVTPWNVQELRQAVINGPNVHPGASMVINEDGSRTALSAVDMTQREAVAKQLLTPATGAPKPQGTKIVCRHVKNGDILLLNRQPTLHRPSIQAHRARILPEEKVLRLHYANCKAYNADFDGDEMNAHFPQSELGRAEAYVLACTDQQYLVPKDGQPLAGLIQDHMVSGASMTTRGCFFTREHYMELVYRGLTDKVGRVKLLSPSILKPFPLWTGKQVVSTLLINIIPEDHIPLNLSGKAKITGKAWVKETPRSVPGFNPDSMCESQVIIREGELLCGVLDKAHYGSSAYGLVHCCYEIYGGETSGKVLTCLARLFTAYLQLYRGFTLGVEDILVKPKADVKRQRIIEESTHCGPQAVRAALNLPEAASYDEVRGKWQDAHLGKDQRDFNMIDLKFKEEVNHYSNEINKACMPFGLHRQFPENSLQMMVQSGAKGSTVNTMQISCLLGQIELEGRRPPLMASGKSLPCFEPYEFTPRAGGFVTGRFLTGIKPPEFFFHCMAGREGLVDTAVKTSRSGYLQRCIIKHLEGLVVQYDLTVRDSDGSVVQFLYGEDGLDIPKTQFLQPKQFPFLASNYEVIMKSQHLHEVLSRADPKKALHHFRAIKKWQSKHPNTLLRRGAFLSYSQKIQEAVKALKLESENRNGRSPGTQEMLRMWYELDEESRRKYQKKAAACPDPSLSVWRPDIYFASVSETFETKVDDYSQEWAAQTEKSYEKSELSLDRLRTLLQLKWQRSLCEPGEAVGLLAAQSIGEPSTQMTLNTFHFAGRGEMNVTLGIPRLREILMVASANIKTPMMSVPVLNTKKALKRVKSLKKQLTRVCLGEVLQKIDVQESFCMEEKQNKFQVYQLRFQFLPHAYYQQEKCLRPEDILRFMETRFFKLLMESIKKKNNKASAFRNVNTRRATQRDLDNAGELGRSRGEQEGDEEEEGHIVDAEAEEGDADASDAKRKEKQEEEVDYESEEEEEREGEENDDEDMQEERNPHREGARKTQEQDEEVGLGTEEDPSLPALLTQPRKPTHSQEPQGPEAMERRVQAVREIHPFIDDYQYDTEESLWCQVTVKLPLMKINFDMSSLVVSLAHGAVIYATKGITRCLLNETTNNKNEKELVLNTEGINLPELFKYAEVLDLRRLYSNDIHAIANTYGIEAALRVIEKEIKDVFAVYGIAVDPRHLSLVADYMCFEGVYKPLNRFGIRSNSSPLQQMTFETSFQFLKQATMLGSHDELRSPSACLVVGKVVRGGTGLFELKQPLR

SEQ ID NO: 1834 - protein, 894 aa, Homo sapiens
MNPGFDLSRRNPQEDFELIQRIGSGTYGDVYKARNVNTGELAAIKVIKLEPGEDFAVVQQEIIMMKDCKHPNIVAYFGSYLRRDKLWICMEFCGGGSLQDIYHVTGPLSELQIAYVSRETLQGLYYLHSKGKMHRDIKGANILLTDNGHVKLADFGVSAQITATIAKRKSFIGTPYWMAPEVAAVERKGGYNQLCDLWAVGITAIELAELQPPMFDLHPMRALFLMTKSNFQPPKLKDKMKWSNSFHHFVKMALTKNPKKRPTAEKLLQHPFVTQHLTRSLAIELLDKVNNPDHSTYHDFDDDDPEPLVAVPHRIHSTSRNVREEKTRSEITFGQVKFDPPLRKETEPHHELPDSDGFLDSSEEIYYTARSNLDLQLEYGQGHQGGYFLGANKSLLKSVEEELHQRGHVAHLEDDEGDDDESKHSTLKAKIPPPLPPKPKSIFIPQEMHSTEDENQGTIKRCPMSGSPAKPSQVPPRPPPPRLPPHKPVALGNGMSSFQLNGERDGSLCQQQNEHRGTNLSRKEKKDVPKPISNGLPPTPKVHMGACFSKVFNGCPLKIHCASSWINPDTRDQYLIFGAEEGIYTLNLNELHETSMEQLFPRRCTWLYVMNNCLLSISGKASQLYSHNLPGLFDYARQMQKLPVAIPAHKLPDRILPRKFSVSAKIPETKWCQKCCVVRNPYTGHKYLCGALQTSIVLLEWVEPMQKFMLIKHIDFPIPCPLRMFEMLVVPEQEYPLVCVGVSRGRDFNQVVRFETVNPNSTSSWFTESDTPQTNVTHVTQLERDTILVCLDCCIKIVNLQGRLKSSRKLSSELTFDFQIESIVCLQDSVLAFWKHGMQGRSFRSNEVTQEISDSTRIFRLLGSDRVVVLESRPTDNPTANSNLYILAGHENSY

SEQ ID NO: 1835 - protein, 889 aa, Homo sapiens
MRALAVLSVTLVMACTEAFFPFISRGKELLWGKPEESRVSSVLEESKRLVDTAMYATMQRNLKKRGILSPAQLLSFSKLPEPTSGVIARAAEIMETSIQAMKRKVNLKTQQSQHPTDALSEDLLSIIANMSGCLPYMLPPKCPNTCLANKYRPITGACNNRDHPRWGASNTALARWLPPVYEDGFSQPRGWNPGFLYNGFPLPPVREVTRHVIQVSNEVVTDDDRYSDLLMAWGQYIDHDIAFTPQSTSKAAFGGGADCQMTCENQNPCFPIQLPEEARPAAGTACLPFYRSSAACGTGDQGALFGNLSTANPRQQMNGLTSFLDASTVYGSSPALERQLRNWTSAEGLLRVHARLRDSGRAYLPFVPPRAPAACAPEPGIPGETRGPCFLAGDGRASEVPSLTALHTLWLREHNRLAAALKALNAHWSADAVYQEARKVVGALHQIITLRDYIPRILGPEAFQQYVGPYEGYDSTANPTVSNVFSTAAFRFGHATIHPLVRRLDASFQEHPDLPGLWLHQAFFSPWTLLRGGGLDPLIRGLLARPAKLQVQDQLMNEELTERLFVLSNSSTLDLASINLQRGRDHGLPGYNEWREFCGLPRLETPADLSTAIASRSVADKILDLYKHPDNIDVWLGGLAENFLPRARTGPLFACLIGKQMKALRDGDWFWWENSHVFTDAQRRELEKHSLSRVICDNTGLTRVPMDAFQVGKFPEDFESCDSITGMNLEAWRETFPQDDKCGFPESVENGDFVHCEESGRRVLVYSCRHGYELQGREQLTCTQEGWDFQPPLCKDSGRLPRVTWISMSLAALLIGGFAGLTSTVICRWTRTGTKSTLPISETGGGTPELRCGKHQAVGTSPQRAAAQDSEQESAGMEGRDTHRLPRAL

SEQ ID NO: 1836 - protein, 259 aa, Homo sapiens
MAASRLELNLVRLLSRCEAMAAEKRDPDEWRLEKYVGALEDMLQALKVHASKPASEVINEYSWKVDFLKGMLQAEKLTSSSEKALANQFLAPGRVPTTARERVPATKTVHLQSRARYTSEMRSELLGTDSAEPEMDVRKRTGVAGSQPVSEKQLAAELDLVLQRHQNLQEKLAEEMLGLARSLKTNTLAAQSVIKKDNQTLSHSLKMADQNLEKLKTESERLEQHTQKSVNWLLWAMLIIVCFIFISMILFIRIMPKLK

SEQ ID NO: 1837 - protein, 525 aa, Homo sapiens [sequence omitted]

SEQ ID NO: 1838 - protein, 540 aa, Homo sapiens
MTTSLQDGQSAASRAAARDSPLAAQVCGAAQGRGDAHDLAPAPWLHARALLPLPDGTRGCAADRRKKKDLDVPEMPSIPNPFPELCCSPFTSVLSADLFPKANSRKKQVIKVYSEDETSRALDVPSDITARDVCQLLILKNHYIDDHSWTLFEHLPHIGVERTIEDHELVIEVLSNWGIEEENKLYFRKNYAKYEFFKNPMYFFPEHMVSFATETNGEISPTQILQMFLSSSTYPEIHGFLHAKEQGKKSWKKIYFFLRRSGLYFSTKGTSKEPRHLQFFSEFGNSDIYVSLAGKKKHGAPTNYGFCFKPNKAGGPRDLKMLCAEEEQSRTCWVTAIRLLKYGMQLYQNYMHPYQGRSGCSSQSISPMRSISENSLVAMDFSGQKSRVIENPTEALSVAVEEGLAWRKKGCLRLGTHGSPTASSQSSATNMAIHRSQPWFHHKISRDEAQRLIIQQGLVDGVFLVRDSQSNPKTFVLSMSHGQKIKHFQIIPVEDDGEMFHTLDDGHTRFTDLIQLVEFYQLNKGVLPCKLKHYCARIAL

SEQ ID NO: 1839 - protein, 780 aa, Homo sapiens
MDEQAGPGVFFSNNHPGAGGAKGLGPLAEAAAAGDGAAAAGAARAQYSLPGILHFLQHEWARFEVERAQWEVERAELQAQIAFLQGERKGQENLKKDLVRRIKMLEYALKQERAKYHKLKYGTELNQGDMKPPSYDSDEGNETEVQPQQNSQLMWKQGRQLLRQYLQEVGYTDTILDVKSKRVRALLGFSSDVTDREDDKNQDSVVNGTEAEVKETAMIAKSELTDSASVLDNFKFLESAAADFSDEDEDDDVDGREKSVIDTSTIVRKKALPDSGEDRDTKEALKEFDFLVTSEEGDNESRSAGDGTDWEKEDQCLMPEAWNVDQGVITKLKEQYKKERKGKKGVKRPNRSKLQDMLANLRDVDELPSLQPSVGSPSRPSSSRLPEHEINRADEVEALTFPPSSGKSFIMGADEALESELGLGELAGLTVANEADSLTYDIANNKDALRKTWNPKFTLRSHFDGIRALAFHPIEPVLITASEDHTLKMWNLQKTAPAKKSTSLDVEPIYTFRAHKGPVLCVVMSSNGEQCYSGGTDGLIQGWNTTNPNIDPYDSYDPSVLRGPLLGHTDAVWGLAYSAAHQRLLSCSADGTLRLWNTTEVAPALSVFNDTKELGIPASVDLVSSDPSHMVASFSKGYTSIFNMETQQRILTLESNVDTTANSSCQINRVISHPTLPISITAHEDRHIKFYDNNTGKLIHSMVAHLEAVTSLAVDPNGLYLMSGSHDCSIRLWNLESKTCIQEFTAHRKKFEESIHDVAFHPSKCYIASAGADALAKVFV

SEQ ID NO: 1840 - protein, 1356 aa, Homo sapiens
MQSKVLLAVALWLCVETRAASVGLPSVSLDLPRLSIQKDILTIKANTTLQITCRGQRDLDWLWPNNQSGSEQRVEVTECSDGLFCKTLTIPKVIGNDTGAYKCFYRETDLASVIYVYVQDYRSPFIASVSDQHGVVYITENKNKTVVIPCLGSISNLNVSLCARYPEKRFVPDGNRISWDSKKGFTIPSYMISYAGMVFCEAKINDESYQSIMYIVVVVGYRIYDVVLSPSHGIELSVGEKLVLNCTARTELNVGIDFNWEYPSSKHQHKKLVNRDLKTQSGSEMKKFLSTLTIDGVTRSDQGLYTCAASSGLMTKKNSTFVRVHEKPFVAFGSGMESLVEATVGERVRIPAKYLGYPPPEIKWYKNGIPLESNHTIKAGHVLTIMEVSERDTGNYTVILTNPISKEKQSHVVSLVVYVPPQIGEKSLISPVDSYQYGTTQTLTCTVYAIPPPHHIHWYWQLEEECANEPSQAVSVTNPYPCEEWRSVEDFQGGNKIEVNKNQFALIEGKNKTVSTLVIQAANVSALYKCEAVNKVGRGERVISFHVTRGPEITLQPDMQPTEQESVSLWCTADRSTFENLTWYKLGPQPLPIHVGELPTPVCKNLDTLWKLNATMFSNSTNDILIMELKNASLQDQGDYVCLAQDRKTKKRHCVVRQLTVLERVAPTITGNLENQTTSIGESIEVSCTASGNPPPQIMWFKDNETLVEDSGIVLKDGNRNLTIRRVRKEDEGLYTCQACSVLGCAKVEAFFIIEGAQEKTNLEIIILVGTAVIAMFFWLLLVIILRTVKRANGGELKTGYLSIVMDPDELPLDEHCERLPYDASKWEFPRDRLKLGKPLGRGAFGQVIEADAFGIDKTATCRTVAVKMLKEGATHSEHRALMSELKILIHIGHHLNVVNLLGACTKPGGPLMVIVEFCKFGNLSTYLRSKRNEFVPYKTKGARFRQGKDYVGAIPVDLKRRLDSITSSQSSASSGFVEEKSLSDVEEEEAPEDLYKDFLTLEHLICYSFQVAKGMEFLASRKCIHRDLAARNILLSEKNVVKICDFGLARDIYKDPDYVRKGDARLPLKWMAPETIFDRVYTIQSDVWSFGVLLWEIFSLGASPYPGVKIDEEFCRRLKEGTRMRAPDYTTPEMYQTMLDCWHGEPSQRPTFSELVEHLGNLLQANAQQDGKDYIVLPISETLSMEEDSGLSLPTSPVSCMEEEEVCDPKFHYDNTAGISQYLQNSKRKSRPVSVKTFEDIPLEEPEVKVIPDDNQTDSGMVLASEELKTLEDRTKLSPSFGGMVPSKSRESVASEGSNQTSGYQSGYHSDDTDTTVYSSEEAELLKLIEIGVQTGSTAQILQPDSGTTLSSPPV

SEQ ID NO: 1841 - protein, 728 aa, Homo sapiens
MNQPESANDPEPLCAVCGQAHSLEENHFYSYPEEVDDDLICHICLQALLDPLDTPCGHTYCTLCLTNFLVEKDFCPMDRKPLVLQHCKKSSILVNKLLNKLLVTCPFREHCTQVLQRCDLEHHFQTSCKGASHYGLTKDRKRRSQDGCPDGCASLTATAPSPEVSAAATISLMTDEPGLDNPAYVSSAEDGQPAISPVDSGRSNRTRARPFERSTIRSRSFKKINRALSVLRRTKSGSAVANHADQGRENSENTTAPEVFPRLYHLIPDGEITSIKINRVDPSESLSIRLVGGSETPLVHIIIQHIYRDGVIARDGRLLPGDIILKVNGMDISNVPHNYAVRLLRQPCQVLWLTVMREQKFRSRNNGQAPDAYRPRDDSFHVILNKSSPEEQLGIKLVRKVDEPGVFIFNVLDGGVAYRHGQLEENDRVLAINGHDLRYGSPESAAHLIQASERRVHLVVSRQVRQRSPDIFQEAGWNSNGSWSPGPGERSNTPKPLHPTITCHEKVVNIQKDPGESLGMTVAGGASHREWDLPIYVISVEPGGVISRDGRIKTGDILLNVDGVELTEVSRSEAVALLKRTSSSIVLKALEVKEYEPQEDCSSPAALDSNHNMAPPSDWSPSWVMWLELPRCLYNCKDIVLRRNTAGSLGFCIVGGYEEYNGNKPFFIKSIVEGTPAYNDGRIRCGDILLAVNGRSTSGMIHACLARLLKELKGRITLTIVSWPGTFL

SEQ ID NO: 1842 - protein, 595 aa, Homo sapiens
MRVLLAALGLLFLGALRAFPQDRPFEDTCHGNPSHYYDKAVRRCCYRCPMGLFPTQQCPQRPTDCRKQCEPDYYLDEADRCTACVTCSRDDLVEKTPCAWNSSRVCECRPGMFCSTSAVNSCARCFFHSVCPAGMIVKFPGTAQKNTVCEPASPGVSPACASPENCKEPSSGTIPQAKPTPVSPATSSASTMPVRGGTRLAQEAASKLTRAPDSPSSVGRPSSDPGLSPTQPCPEGSGDCRKQCEPDYYLDEAGRCTACVSCSRDDLVEKTPCAWNSSRTCECRPGMICATSATNSCARCVPYPICAAETVTKPQDMAEKDTTFEAPPLGTQPDCNPTPENGEAPASTSPTQSLLVDSQASKTLPIPTSAPVALSSTGKPVLDAGPVLFWVILVLVVVVGSSAFLLCHRRACRKRIRQKLHLCYPVQTSQPKLELVDSRPRRSSTQLRSGASVTEPVAEERGLMSQPLMETCHSVGAAYLESLPLQDASPAGGPSSPRDLPEPRVSTEHTNNKIEKIYIMKADTVIVGTVKAELPEGRGLAGPAEPELEEELEADHTPHYPEQETEPPLGSCSDVMLSVEEEGKEDPLPTAASGK

SEQ ID NO: 1843 - protein, 1770 aa, Homo sapiens
MSGASVKVAVRVRPFNSRETSKESKCIIQMQGNSTSIINPKNPKEAPKSFSFDYSYWSHTSPEDPCFASQNRVYNDIGKEMLLHAFEGYNVCIFAYGQTGAGKSYTMMGKQEESQAGIIPQLCEELFEKINDNCNEEMSYSVEVSYMEIYCERVRDLLNPKNKGNLRVREHPLLGPYVEDLSKLAVTSYTDIADLMDAGNKARTVAATNMNETSSRSHAVFTIVFTQKKHDNETNLSTEKVSKISLVDLAGSERADSTGAKGTRLKEGANINKSLTTLGKVISALAEVSKKKKKTDFIPYRDSVLTWLLRENLGGNSRTAMVAALSPADINYDETLSTLRYADRAKQIKCNAVINEDPNAKLVRELKEEVTRLKDLLRAQGLGDIIDTSMGSLTSSPSSCSLSSQVGLTSVTSIQERIMSTPGGEEAIERLKESEKIIAELNETWEEKLRKTEAIRMEREALLAEMGVAIREDGGTLGVFSPKKTPHLVNLNEDPLMSECLLYYIKDGITRVGQADAERRQDIVLSGAHIKEEHCIFRSERSNSGEVIVTLEPCERSETYVNGKRVSQPVQLRSGNRIIMGKNHVFRFNHPEQARAEREKTPSAETPSEPVDWTFAQRELLEKQGIDMKQEMEKRLQEMEILYKKEKEEADLLLEQQRLDYESKLQALQKQVETRSLAAETTEEEEEEEEVPWTQHEFELAQWAFRKWKSHQFTSLRDLLWGNAVYLKEANAISVELKKKVQFQFVLLTDTLYSPLPPELLPTEMEKTHEDRPFPRTVVAVEVQDLKNGATHYWSLEKLKQRLDLMREMYDRAGEMASSAQDESETTVTGSDPFYDRFHWFKLVGSSPIFHGCVNERLADRTPSPTFSTADSDITELADEQQDEMEDFDDEAFVDDAGSDAGTEEGSDLFSDGHDPFYDRSPWFILVGRAFVYLSNLLYPVPLIHRVAIVSEKGEVRGFLRVAVQAIAADEEAPDYGSGIRQSGTAKISFDNEYFNQSDFSSVAMTRSGLSLEELRIVEGQGQSSEVITPPEEISRINDLDLKSSTLLDGKMVMEGFSEEIGNHLKLGSAFTFRVTVLQASGILPEYADIFCQFNFLHRHDEAFSTEPLKNNGRGSPLAFYHVQNIAVEITESFVDYIKTKPIVFEVFGHYQQHPLHLQGQELNSPPQPCRRFFPPPMPLSKPVPATKLNTMSKTSLGQSMSKYDLLVWFEISELEPTGEYIPAVVDHTAGLPCQGTFLLHQGIQRRITVTIIHEKGSELHWKDVRELVVGRIRNKPEVDEAAVDAILSLNIISAKYLKSSHNSSRTFYRFEAVWDSSLHNSLLLNRVTPYGEKIYMTLSAYLELDHCIQPAVITKDVCMVFYSRDAKISPPRSLRSLFGSGYSKSPDSNRVTGIYELSLCKMSDTGSPGMQRRRRKILDTSVAYVRGEENLAGWRPRGDSLILEHQWELEKLELLHEVEKTRHFLLLRERLGDSIPKSLSDSLSPSLSSGTLSTSTSISSQISTTTFESAITPSESSGYDSGDIESLVDREKELATKCLQLLTHTFNREFSQVHGSVSDCKLSDISPIGRDPSESSFSSATLTPSSTCPSLVDSRSNSLDQKTPEANSRASSPCPEFEQFQIVPAVETPYLARAGKNEFLNLVPDIEEIRPSSVVSKKGYLHFKEPLYSNWAKHFVVVRRPYVFIYNSDKDPVERGIINLSTAQVEYSEDQQAMVKTPNTFAVCTKHRGVLLQALNDKDMNDWLYAFNPLLAGTIRSKLSRRCPSQSKY

SEQ ID NO: 1844 - protein, 747 aa, Homo sapiens
MNHSPLKTALAYECFQDQDNSTLALPSDQKMKTGTSGRQRVQEQVMMTVKRQKSKSSQSSTLSHSNRGSMYDGLADNYNYGTTSRSSYYSKFQAGNGSWGYPIYNGTLKREPDNRRFSSYSQMENWSRHYPRGSCNTTGAGSDICFMQKIKASRSEPDLYCDPRGTLRKGTLGSKGQKTTQNRYSFYSTCSGQKAIKKCPVRPPSCASKQDPVYIPPISCNKDLSFGHSRASSKICSEDIECSGLTIPKAVQYLSSQDEKYQAIGAYYIQHTCFQDESAKQQVYQLGGICKLVDLLRSPNQNVQQAAAGALRNLVFRSTTNKLETRRQNGIREAVSLLRRTGNAEIQKQLTGLLWNLSSTDELKEELIADALPVLADRVIIPFSGWCDGNSNMSREVVDPEVFFNATGCLRKRLGMRELLALVPQRATSSRVNLSSADAGRQTMRNYSGLIDSLMAYVQNCVAASRCDDKSVENCMCVLHNLSYRLDAEVPTRYRQLEYNARNAYTEKSSTGCFSNKSDKMMNNNYDCPLPEEETNPKGSGWLYHSDAIRTYLNLMGKSKKDATLEACAGALQNLTASKGLMSSGMSQLIGLKEKGLPQIARLLQSGNSDVVRSGASLLSNMSRHPLLHRVMGNQVFPEVTRLLTSHTGNTSNSEDILSSACYTVRNLMASQPQLAKQYFSSSMLNNIINLCRSSASPKAAEAARLLLSDMWSSKELQGVLRQQGFDRNMLGTLAGANSLRNFTSRF

SEQ ID NO: 1845 - protein, 372 aa, Homo sapiens
MSRRRFDCRSISGLLTTTPQIPIKMENFNNFYILTSKELGRGKFAVVRQCISKSTGQEYAAKFLKKRRRGQDCRAEILHEIAVLELAKSCPRVINLHEVYENTSEIILILEYAAGGEIFSLCLPELAEMVSENDVIRLIKQILEGVYYLHQNNIVHLDLKPQNILLSSIYPLGDIKIVDFGMSRKIGHACELREIMGTPEYLAPEILNYDPITTATDMWNIGIIAYMLLTHTSPFVGEDNQETYLNISQVNVDYSEETFSSVSQLATDFIQSLLVKNPEKRPTAEICLSHSWLQQWDFENLFHPEETSSSSQTQDHSVRSSEDKTSKSSCNGTCGDREDKENIPEDSSMVSKRFRFDDSLPNPHELVSDLLC

SEQ ID NO: 1846 - protein, 886 aa, Homo sapiens
MSGFSPELIDYLEGKISFEEFERRREERKTREKKSLQEKGKLSAEENPDDSEVPSSSGINSTKSQDKDVNEGETSDGVRKSVHKVFASMLGENEDDEEEEEEEEEEEEEEETPEQPTAGDVFVLEMVLNRETKKMMKEKRPRSKLPRALRGLMGEANIRFARGEREEAILMCMEIIRQAPLAYEPFSTLAMIYEDQGDMEKSLQFELIAAHLNPSDTEEWVRLAEMSLEQDNIKQAIFCYTKALKYEPTNVRYLWERSSLYEQMGDHKMAMDGYRRILNLLSPSDGERFMQLARDMAKSYYEANDVTSAINIIDEAFSKHQGLVSMEDVNIAAELYISNKQYDKALEIITDFSGIVLEKKTSEEGTSEENKAPENVTCTIPDGVPIDITVKLMVCLVHLNILEPLNPLLTTLVEQNPEDMGDLYLDVAEAFLDVGEYNSALPLLSALVCSERYNLAVVWLRHAECLKALGYMERAAESYGKVVDLAPLHLDARISLSTLQQQLGQPEKALEALEPMYDPDTLAQDANAAQQELKLLLHRSTLLFSQGKMYGYVDTLLTMLAMLLKVAMNRAQVCLISSSKSGERHLYLIKVSRDKISDSNDQESANCDAKAIFAVLTSVLTKDDWWNLLLKAIYSLCDLSRFQEAELLVDSSLEYYSFYDDRQKRKELEYFGLSAAILDKNFRKAYNYIRIMVMENVNKPQLWNIFNQVTMHSQDVRHHRFCLRLMLKNPENHALCVLNGHNAFVSGSFKHALGQYVQAFRTHPDEPLYSFCIGLTFIHMASQKYVLRRHALIVQGFSFLNRYLSLRGPCQESFYNLGRGLHQLGLIHLAIHYYQKALELPPLVVEGIELDQLDLRRDIAYNLSLIYQSSGNTGMAQTLLYTYCSI

SEQ ID NO: 1847 - protein, 624 aa, Homo sapiens
MYQGHMQVVGVTLKKKWHCLQKSDLTLALGKGSRAADKAVAMVMKEIPREESAEEKPLLTMTSQLVNEQQESRPLLSPSIDDFLCETKSEAIARPVTSNTAVLTTGLDLLDLSEPVSQTQTKAKKSEPSSKTSSLKKKADGSDLISTDAEQRGQPLRVPETSSLDLDIQTQLEKWDDVKFHGDRNTKGHPMAERKSSSSRTGSKELLWSSEHRSQPELSGGKSALNSESASELELVAPTQARLTKEHRWGSALLSRNHSLEEEFERAKAAVESDTEFWDKMQAEWEEMARRNWISENQEAQNQVTISASEKGYYFHTENPFKDWPGAFEEGLKRLKEGDLPVTILFMEAAILQDPGDAEAWQFLGITQAENENEQAAIVALQRCLELQPNNLKALMALAVSYTNTGHQQDACDALKNWIKQNPKYKYLVKSKKGSPGLTRRMSKSPVDSSVLEGVKELYLEAAHQNGDMIDPDLQTGLGVLFHLSGEFNRAIDAFNAALTVRPEDYSLWNRLGATLANGDRSEEAVEAYTRALEIQPGFIRSRYNLGISCINLGAYREAVSNFLTALSLQRKSRNQQQVPHPAISGNIWAALRIALSLMDQPELFQAANLGDLDVLLRAFNLDP

SEQ ID NO: 1848 - protein, 514 aa, Homo sapiens
MSISSDEVNFLVYRYLQESGFSHSAFTFGIESHISQSNINGALVPPAALISIIQKGLQYVEAEVSINEDGTLFDGRPIESLSLIDAVMPDVVQTRQQAYRDKLAQQQAAAAAAAAAAASQQGSAKNGENTANGEENGAHTIANNHTDMMEVDGDVEIPPNKAVVLRGHESEVFICAWNPVSDLLASGSGDSTARIWNLSENSTSGSTQLVLRHCIREGGQDVPSNKDVTSLDWNSEGTLLATGSYDGFARIWTKDGNLASTLGQHKGPIFALKWNKKGNFILSAGVDKTTIIWDAHTGEAKQQFPFHSAPALDVDWQSNNTFASCSTDMCIHVCKLGQDRPIKTFQGHTNEVNAIKWDPTGNLLASCSDDMTLKIWSMKQDNCVHDLQAHNKEIYTIKWSPTGPGTNNPNANLMLASASFDSTVRLWDVDRGICIHTLTKHQEPVYSVAFSPDGRYLASGSFDKCVHIWNTQTGALVHSYRGTGGIFEVCWNAAGDKVGASASDGSVCVLDLRK

SEQ ID NO: 1849 - protein, 863 aa, Homo sapiens
MQRRGALFGMPGGSGGRKMAAGDIGELLVPHMPTIRVPRSGDRVYKNECAFSYDSPNSEGGLYVCMNTFLAFGREHVERHFRKTGQSVYMHLKRHVREKVRGASGGALPKRRNSKIFLDLDTDDDLNSDDYEYEDEAKLVIFPDHYEIALPNIEELPALVTIACDAVLSSKSPYRKQDPDTWENELPVSKYANNLTQLDNGVRIPPSGWKCARCDLRENLWLNLTDGSVLCGKWFFDSSGGNGHALEHYRDMGYPLAVKLGTITPDGADVYSFQEEEPVLDPHLAKHLAHFGIDMLHMHGTENGLQDNDIKLRVSEWEVIQESGTKLKPMYGPGYTGLKNLGNSCYLSSVMQAIFSIPEFQRAYVGNLPRIFDYSPLDPTQDFNTQMTKLGHGLLSGQYSKPPVKSELIEQVMKEEHKPQQNGISPRMFKAFVSKSHPEFSSNRQQDAQEFFLHLVNLVERNRIGSENPSDVFRFLVEERIQCCQTRKVRYTERVDYLMQLPVAMEAATNKDELIAYELTRREAEANRRPLPELVRAKIPFSACLQAFSEPENVDDFWSSALQAKSAGVKTSRFASFPEYLVVQIKKFTFGLDWVPKKFDVSIDMPDLLDINHLRARGLQPGEEELPDISPPIVIPDDSKDRLMNQLIDPSDIDESSVMQLAEMGFPLEACRKAVYFTGNMGAEVAFNWIIVHMEEPDFAEPLTMPGYGGAASAGASVFGASGLDNQPPEEIVAIITSMGFQRNQAIQALRATNNNLERALDWIFSHPEFEEDSDFVIEMENNANANIISEAKPEGPRVKDGSGTYELFAFISHMGTSTMSGHYICHIKKEGRWVIYNDHKVCASERPPKDLGYMYFYRRIPS

SEQ ID NO: 1850 - protein, 1068 aa, Homo sapiens
MPPRPSSGELWGIHLMPPRILVECLLPNGMIVTLECLREATLITIKHELFKEARKYPLHQLLQDESSYIFVSVTQEAEREEFFDETRRLCDLRLFQPFLKVIEPVGNREEKILNREIGFAIGMPVCEFDMVKDPEVQDFRRNILNVCKEAVDLRDLNSPHSRAMYVYPPNVESSPELPKHIYNKLDKGQIIVVIWVIVSPNNDKQKYTLKINHDCVPEQVIAEAIRKKTRSMLLSSEQLKLCVLEYQGKYILKVCGCDEYFLEKYPLSQYKYIRSCIMLGRMPNLMLMAKESLYSQLPMDCFTMPSYSRRISTATPYMNGETSTKSLWVINSALRIKILCATYVNVNIRDIDKIYVRTGIYHGGEPLCDNVNTQRVPCSNPRWNEWLNYDIYIPDLPRAARLCLSICSVKGRKGAKEEHCPLAWGNINLFDYTDTLVSGKMALNLWPVPHGLEDLLNPIGVTGSNPNKETPCLELEFDWFSSVVKFPDMSVIEEHANWSVSREAGFSYSHAGLSNRLARDNELRENDKEQLKAISTRDPLSEITEQEKDFLWSHRHYCVTIPEILPKLLLSVKWNSRDEVAQMYCLVKDWPPIKPEQAMELLDCNYPDPMVRGFAVRCLEKYLTDDKLSQYLIQLVQVLKYEQYLDNLLVRFLLKKALTNQRIGHFFFWHLKSEMHNKTVSQRFGLLLESYCRACGMYLKHLNRQVEAMEKLINLTDILKQEKKDETQKVQMKFLVEQMRRPDFMDALQGFLSPLNPAHQLGNLRLEECRIMSSAKRPLWLNWENPDIMSELLFQNNEIIFKNGDDLRQDMLTLQIIRIMENIWQNQGLDLRMLPYGCLSIGDCVGLIEVVRNSHTIMQIQCKGGLKGALQFNSHTLHQWLKDKNKGEIYDAAIDLFTRSCAGYCVATFILGIGDRHNSNIMVKDDGQLFHIDFGHFLDHKKKKFGYKRERVPFVLTQDFLIVISKGAQECTKTREFERFQEMCYKAYLAIRQHANLFINLFSMMLGSGMPELQSFDDIAYIRKTLALDKTEQEALEYFMKQMNDAHHGGWTTKMDWIFHTIKQHALN

SEQ ID NO: 1851 - protein, 741 aa, Homo sapiens
MAEPVSPLKHFVLAKKAITAIFDQLLEFVTEGSHFVEATYKNPELDRIATEDDLVEMQGYKDKLSIIGEVLSRRHMKVAFFGRTSSGKSSVINAMLWDKVLPSGIGHITNCFLSVEGTDGDKAYLMTEGSDEKKSVKTVNQLAHALHMDKDLKAGCLVRVFWPKAKCALLRDDLVLVDSPGTDVTTELDSWIDKFCLDADVFVLVANSESTLMNTEKHFFHKVNERLSKPNIFILNNRWDASASEPEYMEDVRRQHMERCLHFLVEELKVVNALEAQNRIFFVSAKEVLSARKQKAQGMPESGVALAEGFHARLQEFQNFEQIFEECISQSAVKTKFEQHTIRAKQILATVKNIMDSVNLAAEDKRHYSVEEREDQIDRLDFIRNQMNLLTLDVKKKIKEVTEEVANKVSCAMTDEICRLSVLVDEFCSEFHPNPDVLKIYKSELNKHIEDGMGRNLADRCTDEVNALVLQTQQEIIENLKPLLPAGIQDKLHTLIPCKKFDLSYNLNYHKLCSDFQEDIVFRFSLGWSSLVHRFLGPRNAQRVLLGLSEPIFQLPRSLASTPTAPTTPATPDNASQEELMITLVTGLASVTSRTSMGIIIVGGVIWKTIGWKLLSVSLTMYGALYLYERLSWTTHAKERAFKQQFVNYATEKLRMIVSSTSANCSHQVKQQIATTFARLCQQVDITQKQLEEEIARLPKEIDQLEKIQNNSKLLRNKAVQLENELENFTKQFLPSSNEES

SEQ ID NO: 1852 - protein, 1231 aa, Homo sapiens
MASVWKRLQRVGKHASKFQFVASYQELMVECTKKWQPDKLVVVWTRRSRRKSSKAHSWQPGIKNPYRGVVVWPVPENIEITVTLFKDPHAEEFEDKEWTFVIENESPSGRRKALATSSINMKQYASPMPTQTDVKLKFKPLSKKVVSAALQFSLSCIFLREGKATDEDMQSLASLMSMKQADIGNLDDFEEDNEDDDENRVNQEEKAAKITEIVNQLNALSSLDEDQDDCIKQANMRSAKSASSSEELINKLNFLDEAEKDLATVNSNPFDDPDAAELNPFGDPDSEEPITETASPRKTEDSFYNNSYNPFKEVQTPQYLNPFDEPEAFVTIKDSPPQSTKRKNIRPVDMSKYLYADSSKTEEEELDESNPFYEPKSTPPPNNLVNPVQELETERRVKRKAPAPPVLSPKTGVLNENTVSAGKDLSTSPKPSPIPSPVLGRKPNASQSLLVWCKEVTKNYRGVKITNFTTSWRNGLSFCAILHHFRPDLIDYKSLNPQDIKENNKKAYDGFASIGISRLLEPSDMVLLAIPDKLTVMTYLYQIRAHFSGQELNVVQIEENSSKSTYKVGNYETDTNSSVDQEKFYAELSDLKREPELQQPISGAVDFLSQDDSVFVNDSGVGESESEHQTPDDHLSPSTASPYCRRTKSDTEPQKSQQSSGRTSGSDDPGICSNTDSTQAQVLLGKKRLLKAETLELSDLYVSDKKKDMSPPFICEETDEQKLQTLDIGSNLEKEKLENSRSLECRSDPESPIKKTSLSPTSKLGYSYSRDLDLAKKKHASLRQTESDPDADRTTLNHADHSSKIVQHRLLSRQEELKERARVLLEQARRDAALKAGNKHNTNTATPFCNRQLSDQQDEERRRQLRERARQLIAEARSGVKMSELPSYGEMAAEKLKERSKASGDENDNIEIDTNEEIPEGFVVGGGDELTNLENDLDTPEQNSKLVDLKLKKLLEVQPQVANSPSSAAQKAVTESSEQDMKSGTEDLRTERLQKTTERFRNPVVFSKDSTVRKTQLQSFSQYIENRPEMKRQRSIQEDTKKGNEEKAAITETQRKPSEDEVLNKGFKDTSQYVVGELAALENEQKQIDTRAALVEKRLRYLMDTGRNTEEEEAMMQEWFMLVNKKNALIRRMNQLSLLEKEHDLERRYELLNRELRAMLAIEDWQKTEAQKRREQLLLDELVALVNKRDALVRDLDAQEKQAEEEDEHLERTLEQNKGKMAKKEEKCVLQ

SEQ ID NO: 1853 - protein, 309 aa, Homo sapiens
MEAARTAVLRVKRKRSAEPAEALVLACKRLRSDAVESAAQKTSEGLERAAENNVFHLVATVCSQEEPVQPLLREVLRPSRDSQQRVRRNLRASAREVRQEGRYRVLSSRRSLGTTSSGQESEYTPGNPEAAGNSGFQLLDLVHEEGEPEAASAGSCKTSDPDVILCNSVELIRERLTVSEDGPGVRRQEEQKHDDYVYDIYYLETATPGWIENILSVQPYSQEWELVNDDQEPEDIYDDEDDENSENNWRNEYPEEESSDGDEDSRGSADYNSLSEEERGSSRQRMWSKYPLDVQKEFGYDSPHDLDSD

SEQ ID NO: 1854 - protein, 1065 aa, Homo sapiens
MTTANCGAHDELDFKLVFGEDGAPAPPPPGSRPADLEPDDCASIYIFNVDPPPSTLTTPLCLPHHGLPSHSSVLSPSFQLQSHKNYEGTCEIPESKYSPLGGPKPFECPSIQITSISPNCHQELDAHEDDLQINDPEREFLERPSRDHLYLPLEPSYRESSLSPSPASSISSRSWFSDASSCESLSHIYDDVDSELNEAAARFTLGSPLTSPGGSPGGCPGEETWHQQYGLGHSLSPRQSPCHSPRSSVTDENWLSPRPASGPSSRPTSPCGKRRHSSAEVCYAGSLSPHHSPVPSPGHSPRGSVTEDTWLNASVHGGSGLGPAVFPFQYCVETDIPLKTRKTSEDQAAILPGKLELCSDDQGSLSPARETSIDDGLGSQYPLKKDSCGDQFLSVPSPFTWSKPKPGHTPIFRTSSLPPLDWPLPAHFGQCELKIEVQPKTHHRAHYETEGSRGAVKASTGGHPVVKLLGYNEKPINLQMFIGTADDRYLRPHAFYQVHRITGKTVATASQEIIIASTKVLEIPLLPENNMSASIDCAGILKLRNSDIELRKGETDIGRKNTRVRLVFRVHIPQPSGKVLSLQIASIPVECSQRSAQELPHIEKYSINSCSVNGGHEMVVTGSNFLPESKIIFLEKGQDGRPQWEVEGKIIREKCQGAHIVLEVPPYHNPAVTAAVQVHFYLCNGKRKKSQSQRFTYTPVLMKQEHREEIDLSSVPSLPVPHPAQTQRPSSDSGCSHDSVLSGQRSLICSIPQTYASMVTSSHLPQLQCRDESVSKEQHMIPSPIVHQPFQVTPTPPVGSSYQPMQTNVVYNGPTCLPINAASSQEFDSVLFQQDATLSGLVNLGCQPLSSIPFHSSNSGSTGHLLAHTPHSVHTLPHLQSMGYHCSNTGQRSLSSPVADQITGQPSSQLQPITYGPSHSGSATTASPAASHPLASSPLSGPPSPQLQPMPYQSPSSGTASSPSPATRMHSGQHSTQAQSTGQGGLSAPSSLICHSLCDPASFPPDGATVSIKPEPEDREPNFATIGLQDITLDDDLFTSNNFDLLQLRPTFWPVPAGRYLRNLE

SEQ ID NO: 1855 - protein, 727 aa, Homo sapiens
MEGDAVEAIVEESETFIKGKERKTYQRRREGGQEEDACHLPQNQTDGGEVVQDVNSSVQMVMMEQLDPTLLQMKTEVMEGTVAPEAEAAVDDTQIITLQVVNMEEQPINIGELQLVQVPVPVTVPVATTSVEELQGAYENEVSKEGLAESEPMICHTLPLPEGFQVVKVGANGEVETLEQGELPPQEDPSWQKDPDYQPPAKKTKKTKKSKLRYTEEGKDVDVSVYDFEEEQQEGLLSEVNAEKVVGNMKPPKPTKIKKKGVKKTFQCELCSYTCPRRSNLDRHMKSHTDERPHKCHLCGRAFRTVTLLRNHLNTHTGTRPHKCPDCDMAFVTSGELVRHRRYKHTHEKPFKCSMCDYASVEVSKLKRHIRSHTGERPFQCSLCSYASRDTYKLKRHMRTHSGEKPYECYICHARFTQSGTMKMHILQKHTENVAKFHCPHCDTVIARKSDLGVHLRKQHSYIEQGKKCRYCDAVFHERYALIQHQKSHKNEKRFKCDQCDYACRQERHMIMHKRTHTGEKPYACSHCDKTFRQKQLLDMHFKRYHDPNFVPAAFVCSKCGKTFTRRNTMARHADNCAGPDGVEGENGGETKKSKRGRKRKMRSKKEDSSDSENAEPDLDDNEDEEEPAVEIEPEPEPQPVTPAPPPAKKRRGRPPGRTNQPKQNQPTAIIQVEDQNTGAIENIIVEVKKEPDAEPAEGEEEEAQPAATDAPNGDLTPEMILSMMDR

SEQ ID NO: 1856 - protein, 517 aa, Homo sapiens
MARMGLAGAAGRWWGLALGLTAFFLPGVHSQVVQVNDSMYGFIGTDVVLHCSFANPLPSVKITQVTWQKSTNGSKQNVAIYNPSMGVSVLAPYRERVEFLRPSFTDGTIRLSRLELEDEGVYICEFATFPTGNRESQLNLTVMAKPTNWIEGTQAVLRAKKGQDDKVLVATCTSANGKPPSVVSWETRLKGEAEYQEIRNPNGTVTVISRYRLVPSREAHQQSLACIVNYHMDRFKESLTLNVQYEPEVTIEGFDGNWYLQRMDVKLTCKADANPPATEYHWTTLNGSLPKGVEAQNRTLFFKGPINYSLAGTYICEATNPIGTRSGQVEVNITEFPYTPSPPEHGRRAGPVPTAIIGGVAGSILLVLIVVGGIVVALRRRRHTFKGDYSTKKHVYGNGYSKAGIPQHHPPMAQNLQYPDDSDDEKKAGPLGGSSYEEEEEEEEGGGGGERKVGGPHPKYDEDAKRPYFTVDEAEARQDGYGDRTLGYQYDPEQLDLAENMVSQNDGSFISKKEWYV

SEQ ID NO: 1857 - protein, 906 aa, Homo sapiens
MAGNVKKSSGAGGGSGSGGSGSGGLIGLMKDAFQPHHHHHHHLSPHPPGTVDKKMVEKCWKLMDKVVRLCQNPKLALKNSPPYILDLLPDTYQHLRTILSRYEGKMETLGENEYFRVFMENLMKKTKQTISLFKEGKERMYEENSQPRRNLTKLSLIFSHMLAELKGIFPSGLFQGDTFRITKADAAEFWRKAFGEKTIVPWKSFRQALHEVHPISSGLEAMALKSTIDLTCNDYISVFEFDIFTRLFQPWSSLLRNWNSLAVTHPGYMAFLTYDEVKARLQKFIHKPGSYIFRLSCTRLGQWAIGYVTADGNILQTIPHNKPLFQALIDGFREGFYLFPDGRNQNPDLTGLCEPTPQDHIKVTQEQYELYCEMGSTFQLCKICAENDKDVKIEPCGHLMCTSCLTSWQESEGQGCPFCRCEIKGTEPIVVDPFDPRGSGSLLRQGAEGAPSPNYDDDDDERADDTLFMMKELAGAKVERPPSPFSMAPQASLPPVPPRLDLLPQRVCVPSSASALGTASKAASGSLHKDKPLPVPPTLRDLPPPPPPDRPYSVGAESRPQRRPLPCTPGDCPSRDKLPPVPSSRLGDSWLPRPIPKVPVSAPSSSDPWTGRELTNRHSLPFSLPSQMEPRPDVPRLGSTFSLDTSMSMNSSPLVGPECDHPKIKPSSSANAIYSLAARPLPVPKLPPGEQCEGEEDTEYMTPSSRPLRPLDTSQSSRACDCDQQIDSCTYEAMYNIQSQAPSITESSTFGEGNLAAAHANTGPEESENEDDGYDVPKPPVPAVLARRTLSDISNASSSFGWLSLDGDPTTNVTEGSQVPERPPKPFPRRINSERKAGSCQQGSGPAASAATASPQLSSEIENLMSQGYSYQDIQKALVIAQNNIEMAKNILREFVSISSPAHVAT

SEQ ID NO: 1858 - protein, 2155 aa, Homo sapiens
MNYSSFLRIWVSFIFALVQHQAQPRELMYPFWQNDTKTPKVDDGSSSEIKLAIPVFFFGVPYRTVYVNNNGVVSFNVLVSQFTPESFPLTDGRAFVAPFWADVHNGIRGEIYYRETMEPAILKRATKDIRKYFKDMATFSATWVFIVTWEEVTFYGGSSTTPVNTFQAVLVSDGSYTFTLFNYYEINWTTGTASGGDPLTGLGGVMAQAGFNGGNLTNFFSLPGSRTPEIVNIQETTNVNVPGRWAFKVDGKEIDPANGCTSRGQFLRRGEVFWDDLNCTVKCRCLDFNNEIYCQEASCSPYEVCEPKGKFFYCSAVETSTCVVFGEPHYHTFDGFLFHFQGSCAYLLARQCLQTSSLPFFSVEAKNEHRRGSAVSWVKELSVEVNGYKILIPKGSYGRVKVNDLVTSLPVTLDLGTVKIYQSGISTAVETDFGLLVTFDGQHYASISVPGSYINSTCGLCGNYNKNPLDDFLRPDGRPAMSVLDLGESWRVYHADWKCDSGCVDNCTQCDAATEALYFGSDYCGFLNKTDGPLWECGTVVDPTAFVHSCVYDLCSVRDNGTLLCQAIQAYALVCQALGIPIGDWRTQTGCVSTVQCPSFSHYSVCTSSCPDTCSDLTASRNCATPCTEGCECNQGFVLSTSQCVPLHKCGCDFDGHYYTMGEFFWATANCTVQCLCEEGGDVYCFNKTCGSGEVCAVEDGYQGCFPKRETVCLLSQNQVLHTFDGASYAFPSEFSYTLLKTCPERPEYLEIDINKKKPDAGPAWLRGLRILVADQEVKIGGIGASEVKLNGQEVELPFFHPSGKLEIYRNKNSTTVESKGVVTVQYSDIGLLYIRLSTTYFNCTGGLCGFYNANASDEFCLPNGKCTDNLAVFLESWTTFEEICNGECGDLLKACNNDSELLKFYRSRSRCGIINDPSNSSFLECHGVVNVTAYYRTCLFRLCQSGGNESELCDSVARYASACKNADVEVGPWRTYDFCPLECPENSHFEECITCTETCETLTLGPICVDSCSEGCQCDEGYALLGSQCVTRSECGCNFEGHQLATNETFWVDLDCQIFCYCSGTDNRVHCETIPCKDDEYCMEEGGLYYCQARTDASCIVSGYGHYLTFDGFPFDFQTSCPLILCTTGSRPSSDSFPKFVVTAKNEDRDPSLALWVKQVDVTVFGYSIVIHRAYKHTVLVNSERLYLPLKLGQGKINIFSFGFHVVVETDFGLKVVYDWKTFLSITVPRSMQNSTYGLCGRYNGNPDDDLEMPMGLLASSVNEFGQSWVKRDTFCQVGCGDRCPSCAKVEGFSKVQQLCSLIPNQNAAFSKCHSKVNPTFFYKNCLFDSCIDGGAVQTACSWLQNYASTCQTQGITVTGWRNYTSCTVTCPPNSHYESCVSVCQPRCAAIRLKSDCSHYCVEGCHCDAGYVLNGKSCILPHSCGCYSDGKYYEPKQLFWNSDCTRRCRCFRRNVIQCDPRQCKSDEECALRNGVRGCFSTKTSYCLAAGGGVFRTFDGAFLRFPANCAFVLSTICQKLPDISFQLIINFDKWSAPNLTIISPVYFYINEEQILINDRNTVKVNGTQVNVPFITGLATKIYSSEGFLVIDTSPDIQIYYNGFNVIKISISERLQNKVCGLCGNFNGDLTDDYVTLRGKPVVSSVVLAQSWKTNGMQKRPLAPSCNELQFSQYAAMCDNVHIQKMQGDGYCLKLTDMKGFFQPCYGLLDPLPFYESCYLDGCYSHKKFQLCGSLAAYGEACRSFGILSTEWIEKENCSGVVEDPCVGADCPNRTCELGNGRELCGCIEPPPYGNNSHDIIDAEVTCKAAQMEVSISKCKLFQLGFEREGVRINDRQCTGIEGEDFISFQINNTKGNCGNIVQSNGTHIMYKNTLWIESANNTGNIITRDRTINVEFSCAYELDIKISLDSVVKPMLSVINLTVPTQEGSFITKMALYKNASYKHPYRQGEVVLTTRDVLYVGVFVVGADATHLILTLNKCYATPTRDSNDKLRYFIIEGGCQNLKDNTIGIEENAVSLTCRFHVTVFKFIGDYDEVHLHCAVSLCDSEKYSCKITCPHNSRIATDYTKEPKEQIISVGPIRRKRLDWCEDNGGCEQICTSRVDGPLCSCVTGTLQEDGKSCRASNSSMELQVWTLLLIMIQISLWHFVYKSGTTS

SEQ ID NO: 1859 - protein, 1054 aa, Homo sapiens
MGEIEGTYRVLQTAGMRLGAQTPVGVSTLEPGQTLLPRMQEKHLHLRVKLLDNTMEIFDIEPKCDGQVLLTQVWKRLNLVECDYFGMEFQNTQSYWIWLEPMKPIIRQIRRPKNVVLRLAVKFFPPDPGQLQEEYTRYLFALQLKRDLLEERLTCADTTAALLTSHLLQSEIGDYDETLDREHLKVNEYLPGQQHCLEKILEFHQKHVGQTPAESDFQVLEIARKLEMYGIRFHMASDREGTKIQLAVSHMGVLVFQGTTKINTFNWSKVRKLSFKRKRFLIKLHPEVHGPYQDTLEFLLGSRDECKNFWKICVEYHTFFRLLDQPKPKAKAVFFSRGSSFRYSGRTQKQLVDYFKDSGMKRIPYERRHSKTHTSVRALTADLPKQSISFPEGLRTPASPSSANAFYSLSPSTLVPSGLPEFKDSSSSLTDPQVSYVKSPAAERRSGAVAGGPDTPSAQPLGPPALQPGPGLSTKSPQPSPSSRKSPLSLSPAFQVPLGPAEQGSSPLLSPVLSDAGGAGMDCEEPRHKRVPADEAYFIVKEILATERTYLKDLEVITVWFRSAVVKEDAMPATLMTLLFSNIDPIYEFHRGFLREVEQRLALWEGPSKAHTKGSHQRIGDILLRNMRQLKEFTSYFQRHDEVLTELEKATKRCKKLEAVYKEFELQKVCYLPLNTFLLKPIQRLLHYRLLLRRLCGHYSPGHHDYADCHDALKAITEVTTTLQHILIRLENLQKLTELQRDLVGIENLIAPGREFIREGCLHKLTKKGLQQRMFFLFSDMLLYTSKGVAGTSHFRIRGLLPLQGMLVEESDNEWSVPHCFTIYAAQKTIVVAASTRLEKEKWMLDLNSAIQAAKSGGDTAPALPGRTVCTRPPRSPNEVSLEQESEDDARGVRSSLEGHGQHRANTTMHVCWYRNTSVSRADHSAAVENQLSGYLLRKFKNSHGWQKLWVVFTNFCLFFYKTHQDDYPLASLPLLGYSVSIPREADGIHKDYVFKLQFKSHVYFFRAESKYTFERWMEVIQGASSSAGRAPSIVQDGPQPSSGLEGMVRGKEE

SEQ ID NO: 1860 - protein, 710 aa, Homo sapiens
METRESEDLEKTRRKSASDQWNTDNEPAKVKPELLPEKEETSQADQDIQDKEPHCHIPIKRNSIFNRSIRRKSKAKARDNPERNASCLADSQDNGKSVNEPLTLNIPWSRMPPCRTAMQTDPGAQEMSESSSTPGNGATPEEWPALADSPTTLTEALRMIHPIPADSWRNLIEQIGLLYQEYRDKSTLQEIETRRQQDAEIEDNTNGSPASEDTPEEEEEEEEEEEPASPPERKTLPQICLLSNPHSRFNLWQDLPEIRSSGVLEILQPEEIKLQEAMFELVTSEASYYKSLNLLVSHFMENERIRKILHPSEAHILFSNVLDVLAVSERFLLELEHRMEENIVISDVCDIVYRYAADHFSVYITYVSNQTYQERTYKQLLQEKAAFRELIAQLELDPKCRGLPFSSFLILPFQRITRLKLLVQNILKRVEERSERECTALDAHKELEMVVKACNEGVRKMSRTEQMISIQKKMEFKIKSVPIISHSRWLLKQGELQQMSGPKTSRTLRTKKLFHEIYLFLFNDLLVICRQIPGDKYQVFDSAPRGLLRVEELEDQGQTLANVFILRLLENADDREATYMLKASSQSEMKRWMTSLAPNRRTKFVSFTSRLLDCPQVQCVHPYVAQQPDELTLELADILNILDKTDDGWIFGERLHDQERGWFPSSMTEEILNPKIRSQNLKECFRVHKMDDPQRSQNKDRRKLGSRNRQ

SEQ ID NO: 1861 - protein, 879 aa, Homo sapiens
MAGGGGDLSTRRLNECISPVANEMNHLPAHSHDLQRMFTEDQGVDDRLLYDIVFKHFKRNKVEISNAIKKTFPFLEGLRDRDLITNKMFEDSQDSCRNLVPVQRVVYNVLSELEKTFNLPVLEALFSDVNMQEYPDLIHIYKGFENVIHDKLPLQESEEEEREERSGLQLSLEQGTGENSFRSLTWPPSGSPSHAGTTPPENGLSEHPCETEQINAKRKDTTSDKDDSLGSQQTNEQCAQKAEPTESCEQIAVQVNNGDAGREMPCPLPCDEESPEAELHNHGIQINSCSVRLVDIKKEKPFSNSKVECQAQARTHHNQASDIIVISSEDSEGSTDVDEPLEVFISAPRSEPVINNDNPLESNDEKEGQEATCSRPQIVPEPMDFRKLSTFRESFKKRVIGQDHDFSESSEEEAPAEASSGALRSKHGEKAPMTSRSTSTWRIPSRKRRFSSSDFSDLSNGEELQETCSSSLRRGSGSQPQEPENKKCSCVMCFPKGVPRSQEARTESSQASDMMDTMDVENNSTLEKHSGKRRKKRRHRSKVNGLQRGRKKDRPRKHLTLNNKVQKKRWQQRGRKANTRPLKRRRKRGPRIPKDENINFKQSELPVTCGEVKGTLYKERFKQGTSKKCIQSEDKKWFTPREFEIEGDRGASKNWKLSIRCGGYTLKVLMENKFLPEPPSTRKKRILESHNNTLVDPCEEHKKKNPDASVKFSEFLKKCSETWKTIFAKEKGKFEDMAKADKAHYEREMKTYIPPKGEKKKKFKDPNAPKRPPLAFFLFCSEYRPKIKGEHPGLSIDDVVKKLAGMWNNTAAADKQFYEKKAAKLKEKYKKDIAAYRAKGKPNSAKKRVVKAEKSKKKKEEEEDEEDEQEEENEEDDDK

SEQ ID NO: 1862 - protein, 1214 aa, Homo sapiens
MAAAAGAPPPGPPQPPPPPPPEESSDSEPEAEPGSPQKLIRKVSTSGQIRQKTIIKEGMLTKQNNSFQRSKRRYFKLRGRTLYYAKTAKSIIFDEVDLTDASVAESSTKNVNNSFTVITPCRKLILCADNRKEMEDWIAALKTVQNREHFEPTQYSMDHFSGMHNWYACSHARPTYCNVCREALSGVTSHGLSCEVCKFKAHKRCAVRATNNCKWTTLASIGKDIIEDADGIAMPHQWLEGNLPVSAKCTVCDKTCGSVLRLQDWRCLWCKAMVHTSCKESLLTKCPLGLCKVSVIPPTALNSIDSDGFWKASCPPSCTSPLLVFVNSKSGDNQGVKFLRRFKQLLNPAQVFDLMNGGPHLGLRLFQKFDTFRILVCGGDGSVGWVLSEIDSLNLHKQCQLGVLPLGTGNDLARVLGWGSACDDDTQLPQILEKLERASTKMLDRWSVMAYEAKLPRQASSSTVTEDFSEDSEVQQILFYEDSVAAHLSKILTSDQHSVVISSAKVLCETVKDFVARVGKAYEKTTESSEESEVMAKKCSVLKEKLDSLLKTLDDESQASSSLPNPPPTIAEEAEDGDGSGSICGSTGDRLVASACPARPQIFRPREQLMLRANSLKKAIRQIIEHTEKAVDEQNAQTQEQEGFVLGLSESEEKMDHRVCPPLSHSESFGVPKGRSQRKVSKSPCEKLISKGSLSLGSSASLPPQPGSRDGLPALNTKILYPNVRAGMSGSLPGGSVISRLLINADPFNSEPETLEYYTEKCVMNNYFGIGLDAKISLDFNNKRDEHPEKCRSRTKNMMWYGVLGTKELLHRTYKNLEQKVLLECDGRPIPLPSLQGIAVLNIPSYAGGTNFWGGTKEDDTFAAPSFDDKILEVVAVFGSMQMAVSRVIRLQHHRIAQCRTVKISILGDEGVPVQVDGEAWVQPPGYIRIVHKNRAQTLTRDRAFESTLKSWEDKQKCELPRPPSCSLHPEMLSEEEATQMDQFGQAAGVLIHSIREIAQSHRDMEQELAHAVNASSKSMDRVYGKPRTTEGLNCSFVLEMVNNFRALRSETELLLSGKMALQLDPPQKEQLGSALAEMDRQLRRLADTPWLCQSAEPGDEESVMLDLAKRSRSGKFRLVTKFKKEKNNKNKEAHSSLGAPVHLWGTEEVAAWLEHLSLCEYKDIFTRHDIRGSELLHLERRDLKDLGVTKVGHMKRILCGIKELSRSAPAVEA

SEQ ID NO: 1863 - protein, 239 aa, Homo sapiens
MASEELACKLERRLRREEAEESGPQLAPLGAPAPEPKPEPEPPARAPTASADAELSAQLSRRLDINEGAARPRRCRVFNPYTEFPEFSRRLIKDLESMFKLYDAGRDGFIDLMELKLMMEKLGAPQTHLGLKSMIKEVDEDFDGKLSFREFLLIFHKAAAGELQEDSGLMALAKLSEIDVALEGVKGAKNFFEAKVQALSSASKFEAELKAEQDERKREEEERRLRQAAFQKLKANFNT

SEQ ID NO: 1864 - protein, 793 aa, Homo sapiens
MGVWLNKDDYIRDLKRIILCFLIVYMAILVGTDQDFYSLLGVSKTASSREIRQAFKKLALKLHPDKNPNNPNAHGDFLKINRAYEVLKDEDLRKKYDKYGEKGLEDNQGGQYESWNYYRYDFGIYDDDPEIITLERREFDAAVNSGELWFVNFYSPGCSHCHDLAPTWRDFAKEVDGLLRIGAVNCGDDRMLCRMKGVNSYPSLFIFRSGMAPVKYHGDRSKESLVSFAMQHVRSTVTELWTGNFVNSIQTAFAAGIGWLITFCSKGGDCLTSQTRLRLSGMLDGLVNVGWMDCATQDNLCKSLDITTSTTAYFPPGATLNNKEKNSILFLNSLDAKEIYLEVIHNLPDFELLSANTLEDRLAHHRWLLFFHFGKNENSNDPELKKLKTLLKNDHIQVGRFDCSSAPDICSNLYVFQPSLAVFKGQGTKEYEIHHGKKILYDILAFAKESVNSHVTTLGPQNFPANDKEPWLVDFFAPWCPPCRALLPELRRASNLLYGQLKFGTLDCTVHEGLCNMYNIQAYPTTVVFNQSNIHEYEGHHSAEQILEFIEDLMNPSVVSLTPTTFNELVTQRKHNEVWMVDFYSPWCHPCQVLMPEWKRMARTLTGLINVGSIDCQQYHSFCAQENVQRYPEIRFFPPKSNKAYHYHSYNGWNRDAYSLRIWGLGFLPQVSTDLTPQTFSEKVLQGKNHWVIDFYAPWCGPCQNFAPEFELLARMIKGKVKAGKVDCQAYAQTCQKAGIRAYPTVKFYFYERAKRNFQEEQINTRDAKAIAALISEKLETLRNQGKRNKDEL

SEQ ID NO: 1865 - protein, 580 aa, Homo sapiens
MTAPAGPRGSETERLLTPNPGYGTQAGPSPAPPTPPEEEDLRRRLKYFFMSPCDKFRAKGRKPCKLMLQVVKILVVTVQLILFGLSNQLAVTFREENTIAFRHLFLLGYSDGADDTFAAYTREQLYQAIFHAVDQYLALPDVSLGRYAYVRGGGDPWTNGSGLALCQRYYHRGHVDPANDTFDIDPMVVTDCIQVDPPERPPPPPSDDLTLLESSSSYKNLTLKFHKLVNVTIHFRLKTINLQSLINNEIPDCYTFSVLITFDNKAHSGRIPISLETQAHIQECKHPSVFQHGDNSFRLLFDVVVILTCSLSFLLCARSLLRGFLLQNEFVGFMWRQRGRVISLWERLEFVNGWYILLVTSDVLTISGTIMKIGIEAKNLASYDVCSILLGTSTLLVWVGVIRYLTFFHNYNILIATLRVALPSVMRFCCCVAVIYLGYCFCGWIVLGPYHVKFRSLSMVSECLFSLINGDDMFVTFAAMQAQQGRSSLVWLFSQLYLYSFISLFIYMVLSLFIALITGAYDTIKHPGGAGAEESELQAYIAQCQDSPTSGKFRRGSGSACSLLCCCGRDPSEEHSLLVN

SEQ ID NO: 1866 - protein, 543 aa, Homo sapiens
MAVSERRGLGRGSPAEWGQRLLLVLLLGGCSGRIHQLALTGEKRADIQLNSFGFYTNGSLEVELSVLRLGLREAEEKSLLVGFSLSRVRSGRVRSYSTRDFQDCPLQKNSSSFLVLFLINTKDLQVQVRKYGEQKTLFIFPGLLPEAPSKPGLPKPQATVPRKVDGGGTSAASKPKSTPAVIQGPSGKDKDLVLGLSHLNNSYNFSFHVVIGSQAEEGQYSLNFHNCNNSVPGKEHPFDITVMIREKNPDGFLSAAEMPLFKLYMVMSACFLAAGIFWVSILCRNTYSVFKIHWLMAALAFTKSISLLFHSINYYFINSQGHPIEGLAVMYYIAHLLKGALLFITIALIGSGWAFIKYVLSDKEKKVFGIVIPMQVLANVAYIIIESREEGASDYVLWKEILFLVDLICCGAILFPVVWSIRHLQDASGTDGKVAVNLAKLKLFRHYYVMVICYVYFTRIIAILLQVAVPFQWQWLYQLLVEGSTLAFFVLTGYKFQPTGNNPYLQLPQEDEEDVQMEQVMTDSGFREGLSKVNKTASGRELL

SEQ ID NO: 1867 - protein, 753 aa, Homo sapiens
MRPVSVWQWSPWGLLLCLLCSSCLGSPSPSTGPEKKAGSQGLRFRLAGFPRKPYEGRVEIQRAGEWGTICDDDFTLQAAHILCRELGFTEATGWTHSAKYGPGTGRIWLDNLSCSGTEQSVTECASRGWGNSDCTHDEDAGVICKDQRLPGFSDSNVIEVEHHLQVEEVRIRPAVGWGRRPLPVTEGLVEVRLPDGWSQVCDKGWSAHNSHVVCGMLGFPSEKRVNAAFYRLLAQRQQHSFGLHGVACVGTEAHLSLCSLEFYRANDTARCPGGGPAVVSCVPGPVYAASSGQKKQQQSKPQGEARVRLKGGAHPGEGRVEVLKASTWGTVCDRKWDLHAASVVCRELGFGSAREALSGARMGQGMGAIHLSEVRCSGQELSLWKCPHKNITAEDCSHSQDAGVRCNLPYTGAETRIRLSGGRSQHEGRVEVQIGGPGPLRWGLICGDDWGTLEAMVACRQLGLGYANHGLQETWYWDSGNITEVVMSGVRCTGTELSLDQCAHHGTHITCKRTGTRFTAGVICSETASDLLLHSALVQETAYIEDRPLHMLYCAAEENCLASSARSANWPYGHRRLLRFSSQIHNLGRADFRPKAGRHSWVWHECHGHYHSMDIFTHYDILTPNGTKVAEGHKASFCLEDTECQEDVSKRYECANFGEQGITVGCWDLYRHDIDCQWIDITDVKPGNYILQVVINPNFEVAESDFTNNAMKCNCKYDGHRIWVHNCHIGDAFSEEANRRFERYPGQTSNQII

SEQ ID NO: 1868 - protein, 1073 aa, Homo sapiens
MAAAGQLCLLYLSAGLLSRLGAAFNLDTREDNVIRKYGDPGSLFGFSLAMHWQLQPEDKRLLLVGAPRAEALPLQRANRTGGLYSCDITARGPCTRIEFDNDADPTSESKEDQWMGVTVQSQGPGGKVVTCAHRYEKRQHVNTKQESRDIFGRCYVLSQNLRIEDDMDGGDWSFCDGRLRGHEKFGSCQQGVAATFTKDFHYIVFGAPGTYNWKGIVRVEQKNNTFFDMNIFEDGPYEVGGETEHDESLVPVPANSYLGFSLDSGKGIVSKDEITFVSGAPRANHSGAVVLLKRDMKSAHLLPEHIFDGEGLASSFGYDVAVVDLNKDGWQDIVIGAPQYFDRDGEVGGAVYVYMNQQGRWNNVKPIRLNGTKDSMFGIAVKNIGDINQDGYPDIAVGAPYDDLGKVFIYHGSANGINTKPTQVLKGISPYFGYSIAGNMDLDRNSYPDVAVGSLSDSVTIFRSRPVINIQKTITVTPNRIDLRQKTACGAPSGICLQVKSCFEYTANPAGYNPSISIVGTLEAEKERRKSGLSSRVQFRNQGSEPKYTQELTLKRQKQKVCMEETLWLQDNIRDKLRPIPITASVEIQEPSSRRRVNSLPEVLPILNSDEPKTAHIDVHFLKEGCGDDNVCNSNLKLEYKFCTREGNQDKFSYLPIQKGVPELVLKDQKDIALEITVTNSPSNPRNPTKDGDDAHEAKLIATFPDTLTYSAYRELRAFPEKQLSCVANQNGSQADCELGNPFKRNSNVTFYLVLSTTEVTFDTPDLDINLKLETTSNQDNLAPITAKAKVVIELLLSVSGVAKPSQVYFGGTVVGEQAMKSEDEVGSLIEYEFRVINLGKPLTNLGTATLNIQWPKEISNGKWLLYLVKVESKGLEKVTCEPQKEINSLNLTESHNSRKKREITEKQIDDNRKFSLFAERKYQTLNCSVNVNCVNIRCPLRGLDSKASLILRSRLWNSTFLEEYSKLNYLDILMRAFIDVTAAAENIRLPNAGTQVRVTVFPSKTVAQYSGVPWWIILVAILAGILMLALLVFILWKCGFFKRNKKDHYDATYHKAEIHAQPSDKERLTSDA

SEQ ID NO: 1869 - protein, 684 aa, Homo sapiens
MEENLISMREDHSFHVRYRMEASCLELALEGERLCKSGDCRAGVSFFEAAVQVGTEDLKTLSAIYSQLGNAYFYLHDYAKALEYHHHDLTLARTIGDQLGEAKASGNLGNTLKVLGNFDEAIVCCQRHLDISRELNDKVGEARALYNLGNVYHAKGKSFGCPGPQDVGEFPEEVRDALQAAVDFYEENLSLVTALGDRAAQGRAFGNLGNTHYLLGNFRDAVIAHEQRLLIAKEFGDKAAERRAYSNLGNAYIFLGEFETASEYYKKTLLLARQLKDRAVEAQSCYSLGNTYTLLQDYEKAIDYHLKHLAIAQELNDRIGEGRACWSLGNAYTALGNHDQAMHFAEKHLEISREVGDKSGELTARLNLSDLQMVLGLSYSTNNSIMSENTEIDSSLNGVRPKLGRRHSMENMELMKLTPEKVQNWNSEILAKQKPLIAKPSAKLLFVNRLKGKKYKTNSSTKVLQDASNSIDHRIPNSQRKISADTIGDEGFFDLLSRFQSNRMDDQRCCLQEKNCHTASTTTSSTPPKMMLKTSSVPVVSPNTDEFLDLLASSQSRRLDDQRASFSNLPGLRLTQNSQSVLSHLMTNDNKEADEDFFDILVKCQGSRLDDQRCAPPPATTKGPTVPDEDFFSLILRSQGKRMDEQRVLLQRDQNRDTDFGLKDFLQNNALLEFKNSGKKSADH

SEQ ID NO: 1870 - protein, 1193 aa, Homo sapiens
MPALWLGCCLCFSLLLPAARATSRREVCDCNGKSRQCIFDRELHRQTGNGFRCLNCNDNTDGIHCEKCKNGFYRHRERDRCLPCNCNSKGSLSARCDNSGRCSCKPGVTGARCDRCLPGFHMLTDAGCTQDQRLLDSKCDCDPAGIAGPCDAGRCVCKPAVTGERCDRCRSGYYNLDGGNPEGCTQCFCYGHSASCRSSAEYSVHKITSTFHQDVDGWKAVQRNGSPAKLQWSQRHQDVFSSAQRLDPVYFVAPAKFLGNQQVSYGQSLSFDYRVDRGGRHPSAHDVILEGAGLRITAPLMPLGKTLPCGLTKTYTFRLNEHPSNNWSPQLSYFEYRRLLRNLTALRIRATYGEYSTGYIDNVTLISARPVSGAPAPWVEQCICPVGYKGQFCQDCASGYKRDSARLGPFGTCIPCNCQGGGACDPDTGDCYSGDENPDIECADCPIGFYNDPHDPRSCKPCPCHNGFSCSVMPETEEVVCNNCPPGVTGARCELCADGYFGDPFGEHGPVRPCQPCQCNNNVDPSASGNCDRLTGRCLKCIHNTAGIYCDQCKAGYFGDPLAPNPADKCRACNCNPMGSEPVGCRSDGTCVCKPGFGGPNCEHGAFSCPACYNQVKIQMDQFMQQLQRMEALISKAQGGDGVVPDTELEGRMQQAEQALQDILRDAQISEGASRSLGLQLAKVRSQENSYQSRLDDLKMTVERVRALGSQYQNRVRDTHRLITQMQLSLAESEASLGNTNIPASDHYVGPNGFKSLAQEATRLAESHVESASNMEQLTRETEDYSKQALSLVRKALHEGVGSGSGSPDGAVVQGLVEKLEKTKSLAQQLTREATQAEIEADRSYQHSLRLLDSVSRLQGVSDQSFQVEEAKRIKQKADSLSSLVTRHMDEFKRTQKNLGNWKEEAQQLLQNGKSGREKSDQLLSRANLAKSRAQEALSMGNATFYEVESILKNLREFDLQVDNRKAEAEEAMKRLSYISQKVSDASDKTQQAERALGSAAADAQRAKNGAGEALEISSEIEQEIGSLNLEANVTADGALAMEKGLASLKSEMREVEGELERKELEFDTNMDAVQMVITEAQKVDTRAKNAGVTIQDTLNTLDGLLHLMDQPLSVDEEGLVLLEQKLSRAKTQINSQLRPMMSELEERARQQRGHLHLLETSIDGILADVKNLENIRDNLPPGCYNTQALEQQ

SEQ ID NO: 1871 - protein, 821 aa, Homo sapiens
MDLAAAAEPGAGSQHLEVRDEVAEKCQKLFLDFLEEFQSSDGEIKYLQLAEELIRPERNTLVVSFVDLEQFNQQLSTTIQEEFYRVYPYLCRALKTFVKDRKEIPLAKDFYVAFQDLPTRHKIRELTSSRIGLLTRISGQVVRTHPVHPELVSGTFLCLDCQTVIRDVEQQFKYTQPNICRNPVCANRRRFLLDTNKSRFVDFQKVRIQETQAELPRGSIPRSLEVILRAEAVESAQAGDKCDFTGTLIVVPDVSKLSTPGARAETNSRVSGVDGYETEGIRGLRALGVRDLSYRLVFLACCVAPTNPRFGGKELRDEEQTAESIKNQMTVKEWEKVFEMSQDKNLYHNLCTSLFPTIHGNDEVKRGVLLMLFGGVPKTTGEGTSLRGDINVCIVGDPSTAKSQFLKHVEEFSPRAVYTSGKASSAAGLTAAVVRDEESHEFVIEAGALMLADNGVCCIDEFDKMDVRDQVAIHEAMEQQTISITKAGVKATLNARTSILAAANPISGHYDRSKSLKQNINLSAPIMSRFDLFFILVDECNEVTDYAIARRIVDLHSRIEESIDRVYSLDDIRRYLLFARQFKPKISKESEDFIVEQYKHLRQRDGSGVTKSSWRITVRQLESMIRLSEAMARMHCCDEVQPKHVKEAFRLLNKSIIRVETPDVNLDQEEEIQMEVDEGAGGINGHADSPAPVNGINGYNEDINQESAPKASLRLGFSEYCRISNLIVLHLRKVEEEEDESALKRSELVNWYLKEIESEIDSEEELINKKRIIEKVIHRLTHYDHVLIELTQAGLKGSTEGSESYEEDPYLVVNPNYLLED

SEQ ID NO: 1872 - protein, 730 aa, Homo sapiens
MASGRGASSRWFFTREQLENTPSRRCGVEADKELSCRQQAANLIQEMGQRLNVSQLTINTAIVYMHRFYMHHSFTKFNKNIISSTALFLAAKVEEQARKLEHVIKVAHACLHPLEPLLDTKCDAYLQQTQELVILETIMLQTLGFEITIEHPHTDVVKCTQLVRASKDLAQTSYFMATNSLHLTTFCLQYKPTVIACVCIHLACKWSNWEIPVSTDGKHWWEYVDPTVTLELLDELTHEFLQILEKTPNRLKKIRNWRANQAARKPKVDGQVSETPLLGSSLVQNSILVDSVTGVPTNPSFQKPSTSAFPAPVPLNSGNISVQDSHTSDNLSMLATGMPSTSYGLSSHQEWPQHQDSARTEQLYSQKQETSLSGSQYNINFQQGPSISLHSGLHHRPDKISDHSSVKQEYTHKAGSSKHHGPISTTPGIIPQKMSLDKYREKRKLETLDLDVRDHYIAAQVEQQHKQGQSQAASSSSVTSPIKMKIPIANTEKYMADKKEKSGSLKLRIPIPPTDKSASKEELKMKIKVSSSERHSSSDEGSGKSKHSSPHISRDHKEKHKEHPSSRHHTSSHKHSHSHSGSSSGGSKHSADGIPPTVLRSPVGLSSDGISSSSSSSRKRLHVNDASHNHHSKMSKSSKSSGSSSSSSSSVKQYISSHNSVFNHPLPPPPPVTYQVGYGHLSTLVKLDKKPVETNGPDANHEYSTSSQHMDYKDTFDMLDSLLSAQGMNM

SEQ ID NO: 1873 - protein, 1079 aa, Homo sapiens
MPRVHNIKKSLTPHISCVTNESDNLLDFLPDRLRAKLLPFQKDGIIFALKRNGRCMVADEMGLGKTIQAIGITYFYKEEWPLLIVVPSSLRYPWTEEIEKWIPELSPEEINVIQNKTDVRRMSTSKVTVLGYGLLTADAKTLIDALNNQNFKVVIVDESHYMKSRNATRSRILLPIVQKARRAILLTGTPALGRPEELFMQIEALFPQKFGRWTDYAKRYCNAHIRYFGKRPQWDCRGASNLNELHQLLSDIMIRRLKTEVLTQLPPKVRQRIPFDLPSAAAKELNTSFEEWEKIMRTPNSGAMETVMGLITRMFKQTAIAKAGAVKDYIKMMLQNDSLKFLVFAHHLSMLQACTEAVIENKTRYIRIDGSVSSSERIHLVNQFQKDPDTRVAILSIQAAGQGLTFTAASHVVFAELYWDPGHIKQAEDRAHRIGQCSSVNIHYLIANGTLDTLMWGMLNRKAQVTGSTLNGRKEKIQAEEGDKEKWDFLQFAEAWTPNDSSEELRKEALFTHFEKEKQHDIRSFFVPQPKKRQLMTSCDESKRFREENTVVSSDPTKTAARDIIDYESDVEPETKRLKLAASEDHCSPSEETPSQSKQIRTPLVESVQEAKAQLTTPAFPVEGWQCSLCTYINNSELPYCEMCETPQGSAVMQIDSLNHIQDKNEKDDSQKDTSKKVQTISDCEKQALAQSEPGQLADSKEETPKIEKEDGLTSQPGNEQWKSSDTLPVYDTLMFCASRNTDRIHIYTKDGKQMSCNFIPLDIKLDLWEDLPASFQLKQYRSLILRFVREWSSLTAMKQRIIRKSGQLFCSPILALEEITKQQTKQNCTKRYITKEDVAVASMDKVKNVGGHVRLITKESRPRDPFTKKLLEDGACVPFLNPYTVQADLTVKPSTSKGYLQAVDNEGNPLCLRCQQPTCQTKQACKANSWDSRFCSLKCQEEFWIRSNNSYLRAKVFETEHGVCQLCNVNAQELFLRLRDAPKSQRKNLLYATWTSKLPLEQLNEMIRNPGEGHFWQVDHIKPVYGGGGQCSLDNLQTLCTVCHKERTARQAKERSQVRRQSLASKHGSDITRFLVKK

SEQ ID NO: 1874 - protein, 1099 aa, Homo sapiens
MRMSDTVTVKDETATMKDLEAEVKDTTRVENLIKSENYGKILVEKNEHCIENNIDLQRPLQSFGQTGKRSKSSSKLKLVRSLAVCEESPPPPAPEISQENQEKIQIQLTQSFEKEEKPSKDEAEKEKASDKLPRKMLSRDSSQEYTDSTGIDLHEFLVNTLKNNPRDRMMLLKLEQEILDFIGNNESPRKKFPPMTSYHRMLLHRVAAYFGLDHNVDQSGKSVIVNKTSNTRIPDQKFNEHIKDDKGEDFQKRYILKRDNSSFDKDDNQMRIRLKDDRRSKSIEEREEEYQRARDRIFSQDSLCSQENYIIDKRLQDEDASSTQQRRQIFRVNKDASGRSTNSHQSSTENELKYSEPRPWSSTDSDSSLRNLKPAVTKASSFSGISVLTRGDSSGSSKSIGRLSKTGSESSGSVGSSTGSLSHIQQPLPGTALSQSSHGAPVVYPTVSTHSSLSFDGGLNGQVASPSTSFFLLPLEAAGIPPGSILINPQTGQPFINPDGSPVVYNPPMTQQPVRSQVPGPPQPPLPAPPQQPAANHIFSQDNLGSQFSHMSLARQPSADGSDPHAAMFQSTVVLQSPQQSGYIMTAAPPPHPPPPPPPPPPPPPLPPGQPVPTAGYPASGHPVSQPVLQQQGYIQQPSPQMPACYCAPGHYHSSQPQYRPVPSVHYNSHLNQPLPQPAQQTGYQVIPNQQQNYQGIVGVQQPQSQSLVSGQPNSIGNQIQGVVIPYTSVPTYQVSLPQGSQGIPHQTYQQPVMFPNQSNQGSMPTTGMPVYYSVIPPGQQNNLSSSVGYLQHPGSEQVQFPRTTSPCSSQQLQGHQCTAGPPPPPGGGMVMMQLSVPNNPQSCAHSPPQWKQNKYYCDHQRGQKCVEFSSVDNIVQHSPQLSSPIISPAQSPAPAQLSTLKTVRPSGPPLSIMPQFSRPFVPGQGDSRYPLLGQPLQYNPPAVLHGHIPNQQGQPGSRHGNRGRRQAKKAASTDLGAGETVVGKVLEITELPDGITRMEAEKLFGELFKIGAKIRWLRDPQSQPRRHPLCCGSGDNTANPERSKPSDLASTYTVLATFPSISAAQNALKKQINSVNKFKLRTSKKHYDFHILERASSQ

SEQ ID NO: 1875 - protein, 1927 aa, Homo sapiens
MELSWHVVFIALLSFSCWGSDWESDRNFISTAGPLTNDLLHNLSGLLGDQSSNFVAGDKDMYVCHQPLPTFLPEYFSSLHASQITHYKVFLSWAQLLPAGSTQNPDEKTVQCYRRLLKALKTARLQPMVILHHQTLPASTLRRTEAFADLFADYATFAFHSFGDLVGIWFTFSDLEEVIKELPHQESRASQLQTLSDAHRKAYEIYHESYAFQGGKLSVVLRAEDIPELLLEPPISALAQDTVDFLSLDLSYECQNEASLRQKLSKLQTIEPKVKVFIFNLKLPDCPSTMKNPASLLFSLFEAINKDQVLTIGFDINEFLSCSSSSKKSMSCSLTGSLALQPDQQQDHETTDSSPASAYQRIWEAFANQSRAERDAFLQDTFPEGFLWGASTGAFNVEGGWAEGGRGVSIWDPRRPLNTTEGQATLEVASDSYHKVASDVALLCGLRAQVYKFSISWSRIFPMGHGSSPSLPGVAYYNKLIDRLQDAGIEPMATLFHWDLPQALQDHGGWQNESVVDAFLDYAAFCFSTFGDRVKLWVTFHEPWVMSYAGYGTGQHPPGISDPGVASFKVAHLVLKAHARTWHHYNSHHRPQQQGHVGIVLNSDWAEPLSPERPEDLRASERFLHFMLGWFAHPVFVDGDYPATLRTQIQQMNRQCSHPVAQLPEFTEAEKQLLKGSADFLGLSHYTSRLISNAPQNTCIPSYDTIGGFSQHVNHVWPQTSSSWIRVVPWGIRRLLQFVSLEYTRGKVPIYLAGNGMPIGESENLFDDSLRVDYFNQYINEVLKAIKEDSVDVRSYIARSLIDGFEGPSGYSQRFGLHHVNFSDSSKSRTPRKSAYFFTSIIEKNGFLTKGAKRLLPPNTVNLPSKVRAFTFPSEVPSKAKVVWEKFSSQPKFERDLFYHGTFRDDFLWGVSSSAYQIEGAWDADGKGPSIWDNFTHTPGSNVKDNATGDIACDSYHQLDADLNMLRALKVKAYRFSISWSRIFPTGRNSSINSHGVDYYNRLINGLVASNIFPMVTLFHWDLPQALQDIGGWENPALIDLFDSYADFCFQTFGDRVKFWMTFNEPMYLAWLGYGSGEFPPGVKDPGWAPYRIAHAVIKAHARVYHTYDEKYRQEQKGVISLSLSTHWAEPKSPGVPRDVEAADRMLQFSLGWFAHPIFRNGDYPDTMKWKVGNRSELQHLATSRLPSFTEEEKRFIRATADVFCLNTYYSRIVQHKTPRLNPPSYEDDQEMAEEEDPSWPSTAMNRAAPWGTRRLLNWIKEEYGDIPIYITENGVGLTNPNTEDTDRIFYHKTYINEALKAYRLDGIDLRGYVAWSLMDNFEWLNGYTVKFGLYHVDFNNTNRPRTARASARYYTEVITNNGMPLAREDEFLYGRFPEGFIWSAASAAYQIEGAWRADGKGLSIWDTFSHTPLRVENDAIGDVACDSYHKIAEDLVTLQNLGVSHYRFSISWSRILPDGTTRYINEAGLNYYVRLIDTLLAASIQPQVTIYHWDLPQTLQDVGGWENETIVQRFKEYADVLFQRLGDKVKFWITLNEPFVIAYQGYGYGTAAPGVSNRPGTAPYIVGHNLIKAHAEAWHLYNDVYRASQGGVISITISSDWAEPRDPSNQEDVEAARRYVQFMGGWFAHPIFKNGDYNEVMKTRIRDRSLAAGLNKSRLPEFTESEKRRINGTYDFFGFNHYTTVLAYNLNYATAISSFDADRGVASIADRSWPDSGSFWLKMTPFGFRRILNWLKEEYNDPPIYVTENGVSQREETDLNDTARIYYLRTYINEALKAVQDKVDLRGYTVWSAMDNFEWATGFSERFGLHFVNYSDPSLPRIPKASAKFYASVVRCNGFPDPATGPHACLHQPDAGPTISPVRQEEVQFLGLMLGTTEAQTALYVLFSLVLLGVCGLAFLSYKYCKRSKQGKTQRSQQELSPVSSF

SEQ ID NO: 1876 - protein, 465 aa, Homo sapiens
MEPSSLELPADTVQRIAAELKCHPTDERVALHLDEEDKLRHFRECFYIPKIQDLPPVDLSLVNKDENAIYFLGNSLGLQPKMVKTYLEEELDKWAKIAAYGHEVGKRPWITGDESIVGLMKDIVGANEKEIALMNALTVNLHLLMLSFFKPTPKRYKILLEAKAFPSDHYAIESQLQLHGLNIEESMRMIKPREGEETLRIEDILEVIEKEGDSIAVILFSGVHFYTGQHFNIPAITKAGQAKGCYVGFDLAHAVGNVELYLHDWGVDFACWCSYKYLNAGAGGIAGAFIHEKHAHTIKPALVGWFGHELSTRFKMDNKLQLIPGVCGFRISNPPILLVCSLHASLEIFKQATMKALRKKSVLLTGYLEYLIKHNYGKDKAATKKPVVNIITPSHVEERGCQLTITFSVPNKDVFQELEKRGVVCDKRNPNGIRVAPVPLYNSFHDVYKFTNLLTSILDSAETKN

SEQ ID NO: 1877 - protein, 1312 aa, Homo sapiens
MKALDEPPYLTVGTDVSAKYRGAFCEAKIKTAKRLVKVKVTFRHDSSTVEVQDDHIKGPLKVGAIVEVKNLDGAYQEAVINKLTDASWYTVVFDDGDEKTLRRSSLCLKGERHFAESETLDQLPLTNPEHFGTPVIGKKTNRGRRSNHIPEEESSSSSSDEDEDDRKQIDELLGKVVCVDYISLDKKKALWFPALVVCPDCSDEIAVKKDNILVRSFKDGKFTSVPRKDVHEITSDTAPKPDAVLKQAFEQALEFHKSRTIPANWKTELKEDSSSSEAEEEEEEEDDEKEKEDNSSEEEEEIEPFPEERENFLQQLYKFMEDRGTPINKRPVLGYRNLNLFKLFRLVHKLGGFDNIESGAVWKQVYQDLGIPVLNSAAGYNVKCAYKKYLYGFEEYCRSANIEFQMALPEKVVNKQCKECENVKEIKVKEENETEIKEIKMEEERNIIPREEKPIEDEIERKENIKPSLGSKKNLLESIPTHSDQEKEVNIKKPEDNENLDDKDDDTTRVDESLNIKVEAEEEKAKSGDETNKEEDEDDEEAEEEEEEEEEEEDEDDDDNNEEEEFECYPPGMKVQVRYGRGKNQKMYEASIKDSDVEGGEVLYLVHYCGWNVRYDEWIKADKIVRPADKNVPKIKHRKKIKNKLDKEKDKDEKYSPKNCKLRRLSKPPFQTNPSPEMVSKLDLTDAKNSDTAHIKSIEITSILNGLQASESSAEDSEQEDERGAQDMDNNGKEESKIDHLTNNRNDLISKEEQNSSSLLEENKVHADLVISKPVSKSPERLRKDIEVLSEDTDYEEDEVTKKRKDVKKDTTDKSSKPQIKRGKRRYCNTEECLKTGSPGKKEEKAKNKESLCMENSSNSSSDEDEEETKAKMTPTKKYNGLEEKRKSLRTTGFYSGFSEVAEKRIKLLNNSDERLQNSRAKDRKDVWSSIQGQWPKKTLKELFSDSDTEAAASPPHPAPEEGVAEESLQTVAEEESCSPSVELEKPPPVNVDSKPIEEKTVEVNDRKAEFPSSGSNSVLNTPPTTPESPSSVTVTEGSRQQSSVTVSEPLAPNQEEVRSIKSETDSTIEVDSVAGELQDLQSEGNSSPAGFDASVSSSSSNQPEPEHPEKACTGQKRVKDAQGGGSSSKKQKRSHKATVVNNKKKGKGTNSSDSEELSAGESITKSQPVKSVSTGMKSHSTKSPARTQSPGKCGKNGDKDPDLKEPSNRLPKVYKWSFQMSDLENMTSAERITILQEKLQEIRKHYLSLKSEVASIDRRRKRLKKKERESAATSSSSSSPSSSSITAAVMLTLAEPSMSSASQNGMSVECR

SEQ ID NO: 1878 - protein, 1226 aa, Homo sapiens
MKALDEPPYLTVGTDVSAKYRGAFCEAKIKTAKRLVKVKVTFRHDSSTVEVQDDHIKGPLKVGAIVEVKNLDGAYQEAVINKLTDASWYTVVFDDGDEKTLRRSSLCLKGERHFAESETLDQLPLTNPEHFGTPVIGKKTNRGRRSNHIPEEESSSSSSDEDEDDRKQIDELLGKVVCVDYISLDKKKALWFPALVVCPDCSDEIAVKKDNILVRSFKDGKFTSVPRKDVHEITSDTAPKPDAVLKQAFEQALEFHKSRTIPANWKTELKEDSSSSEAEEEEEEEDDEKEKEDNSSEEEEEIEPFPEERENFLQQLYKFMEDRGTPINKRPVLGYRNLNLFKLFRLVHKLGGFDNIESGAVWKQVYQDLGIPVLNSAAGYNVKCAYKKYLYGFEEYCRSANIEFQMALPEKVVNKQCKECENVKEIKVKEENETEIKEIKMEEERNIIPREEKPIEDEIERKENIKPSLGSKKNLLESIPTHSDQEKEVNIKKPEDNENLDDKDDDTTRVDESLNIKVEAEEEKAKSGYDEWIKADKIVRPADKNVPKIKHRKKIKNKLDKEKDKDEKYSPKNCKLRRLSKPPFQTNPSPEMVSKLDLTDAKNSDTAHIKSIEITSILNGLQASESSAEDSEQEDERGAQDMDNNGKEESKIDHLTNNRNDLISKEEQNSSSLLEENKVHADLVISKPVSKSPERLRKDIEVLSEDTDYEEDEVTKKRKDVKKDTTDKSSKPQIKRGKRRYCNTEECLKTGSPGKKEEKAKNKESLCMENSSNSSSDEDEEETKAKMTPTKKYNGLEEKRKSLRTTGFYSGFSEVAEKRIKLLNNSDERLQNSRAKDRKDVWSSIQGQWPKKTLKELFSDSDTEAAASPPHPAPEEGVAEESLQTVAEEESCSPSVELEKPPPVNVDSKPIEEKTVEVNDRKAEFPSSGSNSVLNTPPTTPESPSSVTVTEGSRQQSSVTVSEPLAPNQEEVRSIKSETDSTIEVDSVAGELQDLQSEGNSSPAGFDASVSSSSSNQPEPEHPEKACTGQKRVKDAQGGGSSSKKQKRSHKATVVNNKKKGKGTNSSDSEELSAGESITKSQPVKSVSTGMKSHSTKSPARTQSPGKCGKNGDKDPDLKEPSNRLPKVYKWSFQMSDLENMTSAERITILQEKLQEIRKHYLSLKSEVASIDRRRKRLKKKERESAATSSSSSSPSSSSITAAVMLTLAEPSMSSASQNGMSVECR

SEQ ID NO: 1879 - protein, 1247 aa, Homo sapiens
MLASSSRIRAAWTRALLLPLLLAGPVGCLSRQELFPFGPGQGDLELEDGDDFVSPALELSGALRFYDRSDIDAVYVTTNGIIATSEPPAKESHPGLFPPTFGAVAPFLADLDTTDGLGKVYYREDLSPSITQRAAECVHRGFPEISFQPSSAVVVTWESVAPYQGPSRDPDQKGKRNTFQAVLASSDSSSYAIFLYPEDGLQFHTTFSKKENNQVPAVVAFSQGSVGFLWKSNGAYNIFANDRESVENLAKSSNSGQQGVWVFEIGSPATTNGVVPADVILGTEDGAEYDDEDEDYDLATTRLGLEDVGTTPFSYKALRRGGADTYSVPSVLSPRRAATERPLGPPTERTRSFQLAVETFHQQHPQVIDVDEVEETGVVFSYNTDSRQTCANNRHQCSVHAECRDYATGFCCSCVAGYTGNGRQCVAEGSPQRVNGKVKGRIFVGSSQVPIVFENTDLHSYVVMNHGRSYTAISTIPETVGYSLLPLAPVGGIIGWMFAVEQDGFKNGFSITGGEFTRQAEVTFVGHPGNLVIKQRFSGIDEHGHLTIDTELEGRVPQIPFGSSVHIEPYTELYHYSTSVITSSSTREYTVTEPERDGASPSRIYTYQWRQTITFQECVHDDSRPALPSTQQLSVDSVFVLYNQEEKILRYALSNSIGPVREGSPDALQNPCYIGTHGCDTNAACRPGPRTQFTCECSIGFRGDGRTCYDIDECSEQPSVCGSHTICNNHPGTFRCECVEGYQFSDEGTCVAVVDQRPINYCETGLHNCDIPQRAQCIYTGGSSYTCSCLPGFSGDGQACQDVDECQPSRCHPDAFCYNTPGSFTCQCKPGYQGDGFRCVPGEVEKTRCQHEREHILGAAGATDPQRPIPPGLFVPECDAHGHYAPTQCHGSTGYCWCVDRDGREVEGTRTRPGMTPPCLSTVAPPIHQGPAVPTAVIPLPPGTHLLFAQTGKIERLPLEGNTMRKTEAKAFLHVPAKVIIGLAFDCVDKMVYWTDITEPSIGRASLHGGEPTTIIRQDLGSPEGIAVDHLGRNIFWTDSNLDRIEVAKLDGTQRRVLFETDLVNPRGIVTDSVRGNLYWTDWNRDNPKIETSYMDGTNRRILVQDDLGLPNGLTFDAFSSQLCWVDAGTNRAECLNPSQPSRRKALEGLQYPFAVTSYGKNLYFTDWKMNSVVALDLAISKETDAFQPHKQTRLYGITTALSQCPQGHNYCSVNNGGCTHLCLATPGSRTCRCPDNTLGVDCIEQK

SEQ ID NO: 1880 - protein, 359 aa, Homo sapiens
MSLQRLLQHSSNGNLADFCAGPAYSSYSTLTGSLTMDDNRRIQMLADTVATLPRGRKQLALTRSSSLSDFSWSQRKLVTVEKQDNETFGFEIQSYRPQNQNACSSEMFTLICKIQEDSPAHCAGLQAGDVLANINGVSTEGFTYKQVVDLIRSSGNLLTIETLNGTMILKRTELEAKLQVLKQTLKQKWVEYRSLQLQEHRLLHGDAANCPSLENMDLDELSLFGPLPGPGPALVDRNRLSSESSCKSWLSSMTMDSEDGYQTCVSEDSSRGAFSRQTSTDDECFIPKEGDDFLRRSSSRRNRSISNTSSGSMSPLWEGNLSSMFGTLPRKSRKGSVRKQLLKFIPGLHRAVEEEESRF

SEQ ID NO: 1881 - protein, 260 aa, Homo sapiens
MPRQFQDTGFSRPGLGQPRRCDPEPRKSDQQLDCALDLMRRLPPQQIEKNLSDLIDLVPSLCEDLLSSVDQPLKIARDKVVGKDYLLCDYNRDGDSYRSPWSNKYDPPLEDGAMPSARLRKLEVEANNAFDQYRDLYFEGGVSSVYLWDLDHGFAGVILIKKAGDGSKKIKGCWDSIHVVEVQEKSSGRTAHYKLTSTVMLWLQTNKSGSGTMNLGGSLTRQMEKDETVSDCSPHIANIGRLVEVCADFCRQIKTRSSEE

SEQ ID NO: 1882 - protein, 767 aa, Homo sapiens
MEALRESVLHLALQMSTYKRATLDEEDLVDSLSEGDAYPNGLQVNFHSPRSGQRCWAARTQVEKRLVVLVVLLAAGLVACLAALGIQYQTRSPSVCLSEACVSVTSSILSSMDPTVDPCHDFFSYACGGWIKANPVPDGHSRWGTFSNLWEHNQAIIKHLLENSTASVSEAERKAQVYYRACMNETRIEELRAKPLMELIERLGGWNITGPWAKDNFQDTLQVVTAHYRTSPFFSVYVSADSKNSNSNVIQVDQSGLGLPSRDYYLNKTENEKVLTGYLNYMVQLGKLLGGGDEEAIRPQMQQILDFETALANITIPQEKRRDEELIYHKVTAAELQTLAPAINWLPFLNTIFYPVEINESEPIVVYDKEYLEQISTLINTTDRCLLNNYMIWNLVRKTSSFLDQRFQDADEKFMEVMYGTKKTCLPRWKFCVSDTENNLGFALGPMFVKATFAEDSKSIATEIILEIKKAFEESLSTLKWMDEETRKSAKEKADAIYNMIGYPNFIMDPKELDKVFNDYTAVPDLYFENAMRFFNFSWRVTADQLRKAPNRDQWSMTPPMVNAYYSPTKNEIVFPAGILQAPFYTRSSPKALNFGGIGVVVGHELTHAFDDQGREYDKDGNLRPWWKNSSVEAFKRQTECMVEQYSNYSVNGEPVNGRHTLGENIADNGGLKAAYRAYQNWVKKNGAEHSLPTLGLTNNQLFFLGFAQVWCSVRTPESSHEGLITDPHSPSRFRVIGSLSNSKEFSEHFRCPPGSPMNPPHKCEVW

SEQ ID NO: 1883 - protein, 1585 aa, Homo sapiens
MNSQPQTRSPFFQRPQIQPPRATIPNSSPSIRPGAQTPTAVYQANQHIMMVNHLPMPYPVPQGPQYCIPQYRHSGPPYVGPPQQYPVQPPGPGPFYPGPGPGDFPNAYGTPFYPSQPVYQSAPIIVPTQQQPPPAKREKKTIRIRDPNQGGKDITEEIMSGGGSRNPTPPIGRPTSTPTPPQQLPSQVPEHSPVVYGTVESAHLAASTPVTAASDQKQEEKPKPDPVLKSPSPVLRLVLSGEKKEQEGQTSETTAIVSIAELPLPPSPTTVSSVARSTIAAPTSSALSSQPIFTTAIDDRCELSSPREDTIPIPSLTSCTETSDPLPTNENDDDICKKPCSVAPNDIPLVSSTNLINEINGVSEKLSATESIVEIVKQEVLPLTLELEILENPPEEMKLECIPAPITPSTVPSFPPTPPTPPASPPHTPVIVPAAATTVSSPSAAITVQRVLEEDESIRTCLSEDAKEIQNKIEVEADGQTEEILDSQNLNSRRSPVPAQIAITVPKTWKKPKDRTRTTEEMLEAELELKAEEELSIDKVLESEQDKMSQGFHPERDPSDLKKVKAVEENGEEAEPVRNGAESVSEGEGIDANSGSTDSSGDGVTFPFKPESWKPTDTEGKKQYDREFLLDFQFMPACIQKPEGLPPISDVVLDKINQPKLPMRTLDPRILPRGPDFTPAFADFGRQTPGGRGVPLLNVGSRRSQPGQRREPRKIITVSVKEDVHLKKAENAWKPSQKRDSQADDPENIKTQELFRKVRSILNKLTPQMFNQLMKQVSGLTVDTEERLKGVIDLVFEKAIDEPSFSVAYANMCRCLVTLKVPMADKPGNTVNFRKLLLNRCQKEFEKDKADDDVFEKKQKELEAASAPEERTRLHDELEEAKDKARRRSIGNIKFIGELFKLKMLTEAIMHDCVVKLLKNHDEESLECLCRLLTTIGKDLDFEKAKPRMDQYFNQMEKIVKERKTSSRIRFMLQDVIDLRLCNWVSRRADQGPKTIEQIHKEAKIEEQEEQRKVQQLMTKEKRRPGVQRVDEGGWNTVQGAKNSRVLDPSKFLKITKPTIDEKIQLVPKAQLGSWGKGSSGGAKASETDALRSSASSLNRFSALQPPAPSGSTPSTPVEFDSRRTLTSRGSMGREKNDKPLPSATARPNTFMRGGSSKDLLDNQSQEEQRREMLETVKQLTGGVDVERNSTEAERNKTRESAKPEISAMSAHDKAALSEEELERKSKSIIDEFLHINDFKEAMQCVEELNAQGLLHVFVRVGVESTLERSQITRDHMGQLLYQLVQSEKLSKQDFFKGFSETLELADDMAIDIPHIWLYLAELVTPMLKEGGISMRELTIEFSKPLLPVGRAGVLLSEILHLLCKQMSHKKVGALWREADLSWKDFLPEGEDVHNFLLEQKLDFIESDSPCSSEALSKKELSAEELYKRLEKLIIEDKANDEQIFDWVEANLDEIQMSSPTFLRALMTAVCKAAIIADSSTFRVDTAVIKQRVPILLKYLDSDTEKELQALYALQASIVKLDQPANLLRMFFDCLYDEEVISEDAFYKWESSKDPAEQNGKGVALKSVTAFFTWLREAEEESEDN

SEQ ID NO: 1884 - protein, 517 aa, Homo sapiens
MELEELGIREECGVFGCIASGEWPTQLDVPHVITLGLVGLQHRGQESAGIVTSDGSSVPTFKSHKGMGLVNHVFTEDNLKKLYVSNLGIGHTRYATTGKCELENCQPFVVETLHGKIAVAHNGELVNAARLRKKLLRHGIGLSTSSDSEMITQLLAYTPPQEQDDTPDWVARIKNLMKEAPTAYSLLIMHRDVIYAVRDPYGNRPLCIGRLIPVSDINDKEKKTSETEGWVVSSESCSFLSIGARYYREVLPGEIVEISRHNVQTLDIISRSEGNPVAFCIFEYVYFARPDSMFEDQMVYTVRYRCGQQLAIEAPVDADLVSTVPESATPAALAYAGKCGLPYVEVLCKNRYVGRTFIQPNMRLRQLGVAKKFGVLSDNFKGKRIVLVDDSIVRGNTISPIIKLLKESGAKEVHIRVASPPIKYPCFMGINIPTKEELIANKPEFDHLAEYLGANSVVYLSVEGLVSSVQEGIKFKKQKEKKHDIMIQENGNGLECFEKSGHCTACLTGKYPVELEW

SEQ ID NO: 1885 - protein, 1233 aa, Homo sapiens
MGTRAFSHDSIFIPDGGAESEQTVQAMSQDNILGKVKTLQQQLGKNIKFGQRSPNAIPMNKANSGEASLEEDLFLTSPMEIVTQQDIVLSDAENKSSDTPSSLSPLNLPGAGSEMEEKVAPVKPSRPKRHFSSAGTIESVNLDAIPLAIARLDNSAAKHKLAVKPKKQRVSKKHRRLAQDPQHEQGGLESRPCLDQNGHPGEDKPTWHEEEPNPLDSEEERRRQEDYWRELEAKCKRQKAEAAEKRRLEEQRLQALERRLWEENRRQELLEEEGEGQEPPLEAERAPREEQQRSLEAPGWEDAERREREERERLEAEEERRRLQAQAQAEERRRLEEDARLEERRRQEEEEGRCAEELKRQEEEEAEGWEELEQQEAEVQGPPEALEETGEGRRGAEEEDLGEEEEEGQAHLEDWRGQLSELLNDFEERLEDQERLKPEGQREHSEEPGICEEQNPEAERRREQQGRSGDFQGADRPGPEEKREEGDTEPLLKQEGPVEAAQPPVERKEAAALEQGRKVEELRWQEVDERQTMPRPYTFQVSSGGKQILFPKVNLSPVTPAKDTGLTAAPQEPKAPKASPVQHALPSSLSVPHTAILVTGAQLCGPAVNLSQIKDTACKSLLGLEEKKHAEAPAGENPPRGPGDARAGSGKAKPRQESPSSASALAEWASIRSRILKNAESDPRSSERDQLRPGDESTPRGRCDSRGNQRKTPPVNAKFSIMPAWQKFSDGGTETSKQSTEAESIRKRPMLGPSEETAPQPPPAGVRELGKGPEKSEMHREPADTTEGCKFAKDLPSFLVPSLPYPPQKVVAHTEFTTSSDSETANGIAKPDPVMPGGEEKASPFGIKLRRTNYSLRFNCDQQAEQKKKKRHSSTGDSADAGPPAAGSARGEKEMEGVALKHGPSLPQERKQAPSTRRDSAEPSSSRSVPVAHPGPPPASSQTPAPEHDKAANKMPLAQKPALAPKPTSQTPPASPLSKLSRPYLVELLSRRAGRPDPEPSEPSKEDQESSDRRPPSPPGPEERKGQKRDEEEEATERKPASPPLPATQQEKPSQTPEAGRKEKPMLQSRHSLDGSKLTEKVETAQPLWITLALQKQKGFREQQATREERKQAREAKQAEKLSKENVSVSVQPGSSSVSRAGSLHKSTALPEEKRPETAVSRLERREQLKKANTLPTSVTVEISDSAPPAPLVKEVTKRFSTPDAAPVSTEPAWLALAKRKAKAWSDCPQIIK

SEQ ID NO: 1886 - protein, 698 aa, Homo sapiens
MLPARLPFRLLSLFLRGSAPTAARHGLREPLLERRCAAASSFQHSSSLGRELPYDPVDTEGFGEGGDMQERFLFPEYILDPEPQPTREKQLQELQQQQEEEERQRQQRREERRQQNLRARSREHPVVGHPDPALPPSGVNCSGCGAELHCQDAGVPGYLPREKFLRTAEADGGLARTVCQRCWLLSHHRRALRLQVSREQYLELVSAALRRPGPSLVLYMVDLLDLPDALLPDLPALVGPKQLIVLGNKVDLLPQDAPGYRQRLRERLWEDCARAGLLLAPGHQGPQRPVKDEPQDGENPNPPNWSRTVVRDVRLISAKTGYGVEELISALQRSWRYRGDVYLVGATNAGKSTLFNTLLESDYCTAKGSEAIDRATISPWPGTTLNLLKFPICNPTPYRMFKRHQRLKKDSTQAEEDLSEQEQNQLNVLKKHGYVVGRVGRTFLYSEEQKDNIPFEFDADSLAFDMENDPVMGTHKSTKQVELTAQDVKDAHWFYDTPGITKENCILNLLTEKEVNIVLPTQSIVPRTFVLKPGMVLFLGAIGRIDFLQGNQSAWFTVVASNILPVHITSLDRADALYQKHAGHTLLQIPMGGKERMAGFPPLVAEDIMLKEGLGASEAVADIKFSSAGWVSVTPNFKDRLHLRGYTPEGTVLTVRPPLLPYIVNIKGQRIKKSVAYKTKKPPSLMYNVRKKKGKINV

SEQ ID NO: 1887 - protein, 2590 aa, Homo sapiens
MNLLRRSGKRRRSESGSDSFSGSGGDSSASPQFLSGSVLSPPPGLGRCLKAAAAGECKPTVPDYERDKLLLANWGLPKAVLEKYHSFGVKKMFEWQAECLLLGQVLEGKNLVYSAPTSAGKTLVAELLILKRVLEMRKKALFILPFVSVAKEKKYYLQSLFQEVGIKVDGYMGSTSPSRHFSSLDIAVCTIERANGLINRLIEENKMDLLGMVVVDELHMLGDSHRGYLLELLLTKICYITRKSASCQADLASSLSNAVQIVGMSATLPNLELVASWLNAELYHTDFRPVPLLESVKVGNSIYDSSMKLVREFEPMLQVKGDEDHVVSLCYETICDNHSVLLFCPSKKWCEKLADIIAREFYNLHHQAEGLVKPSECPPVILEQKELLEVMDQLRRLPSGLDSVLQKTVPWGVAFHHAGLTFEERDIIEGAFRQGLIRVLAATSTLSSGVNLPARRVIIRTPIFGGRPLDILTYKQMVGRAGRKGVDTVGESILICKNSEKSKGIALLQGSLKPVRSCLQRREGEEVTGSMIRAILEIIVGGVASTSQDMHTYAACTFLAASMKEGKQGIQRNQESVQLGAIEACVMWLLENEFIQSTEASDGTEGKVYHPTHLGSATLSSSLSPADTLDIFADLQRAMKGFVLENDLHILYLVTPMFEDWTTIDWYRFFCLWEKLPTSMKRVAELVGVEEGFLARCVKGKVVARTERQHRQMAIHKRFFTSLVLLDLISEVPLREINQKYGCNRGQIQSLQQSAAVYAGMITVFSNRLGWHNMELLLSQFQKRLTFGIQRELCDLVRVSLLNAQRARVLYASGFHTVADLARANIVEVEVILKNAVPFKSARKAVDEEEEAVEERRNMRTIWVTGRKGLTEREAAALIVEEARMILQQDLVEMGVQWNPCALLHSSTCSLTHSESEVKEHTFISQTKSSYKKLTSKNKSNTIFSDSYIKHSPNIVQDLNKSREHTSSFNCNFQNGNQEHQTCSIFRARKRASLDINKEKPGASQNEGKTSDKKVVQTFSQKTKKAPLNFNSEKMSRSFRSWKRRKHLKRSRDSSPLKDSGACRIHLQGQTLSNPSLCEDPFTLDEKKTEFRNSGPFAKNVSLSGKEKDNKTSFPLQIKQNCSWNITLTNDNFVEHIVTGSQSKNVTCQATSVVSEKGRGVAVEAEKINEVLIQNGSKNQNVYMKHHDIHPINQYLRKQSHEQTSTITKQKNIIERQMPCEAVSSYINRDSNVTINCERIKLNTEENKPSHFQALGDDISRTVIPSEVLPSAGAFSKSEGQHENFLNISRLQEKTGTYTTNKTKNNHVSDLGLVLCDFEDSFYLDTQSEKIIQQMATENAKLGAKDTNLAAGIMQKSLVQQNSMNSFQKECHIPFPAEQHPLGATKIDHLDLKTVGTMKQSSDSHGVDILTPESPIFHSPILLEENGLFLKKNEVSVTDSQLNSFLQGYQTQETVKPVILLIPQKRTPTGVEGECLPVPETSLNMSDSLLFDSFSDDYLVKEQLPDMQMKEPLPSEVTSNHFSDSLCLQEDLIKKSNVNENQDTHQQLTCSNDESIIFSEMDSVQMVEALDNVDIFPVQEKNHTVVSPRALELSDPVLDEHHQGDQDGGDQDERAEKSKLTGTRQNHSFIWSGASFDLSPGLQRILDKVSSPLENEKLKSMTINFSSLNRKNTELNEEQEVISNLETKQVQGISFSSNNEVKSKIEMLENNANHDETSSLLPRKESNIVDDNGLIPPTPIPTSASKLTFPGILETPVNPWKTNNVLQPGESYLFGSPSDIKNHDLSPGSRNGFKDNSPISDTSFSLQLSQDGLQLTPASSSSESLSIIDVASDQNLFQTFIKEWRCKKRFSISLACEKIRSLTSSKTATIGSRFKQASSPQEIPIRDDGFPIKGCDDTLVVGLAVCWGGRDAYYFSLQKEQKHSEISASLVPPSLDPSLTLKDRMWYLQSCLRKESDKECSVVIYDFIQSYKILLLSCGISLEQSYEDPKVACWLLDPDSQEPTLHSIVTSFLPHELPLLEGMETSQGIQSLGLNAGSEHSGRYRASVESILIFNSMNQLNSLLQKENLQDVFRKVEMPSQYCLALLELNGIGFSTAECESQKHIMQAKLDAIETQAYQLAGHSFSFTSSDDIAEVLFLELKLPPNREMKNQGSKKTLGSTRRGIDNGRKLRLGRQFSTSKDVLNKLKALHPLPGLILEWRRITNAITKVVFPLQREKCLNPFLGMERIYPVSQSHTATGRITFTEPNIQNVPRDFEIKMPTLVGESPPSQAVGKGLLPMGRGKYKKGFSVNPRCQAQMEERAADRGMPFSISMRHAFVPFPGGSILAADYSQLELRILAHLSHDRRLIQVLNTGADVFRSIAAEWKMIEPESVGDDLRQQAKQICYGIIYGMGAKSLGEQMGIKENDAACYIDSFKSRYTGINQFMTETVKNCKRDGFVQTILGRRRYLPGIKDNNPYRKAHAERQAINTIVQGSAADIVKIATVNIQKQLETFHSTFKSHGHREGMLQSDQTGLSRKRKLQGMFCPIRGGFFILQLHDELLYEVAEEDVVQVAQIVKNEMESAVKLSVKLKVKVKIGASWGELKDFDV

SEQ ID NO: 1888 - protein, 420 aa, Homo sapiens
MSGRPRTTSFAESCKPVQQPSAFGSMKVSRDKDGSKVTTVVATPGQGPDRPQEVSYTDTKVIGNGSFGVVYQAKLCDSGELVAIKKVLQDKRFKNRELQIMRKLDHCNIVRLRYFFYSSGEKKDEVYLNLVLDYVPETVYRVARHYSRAKQTLPVIYVKLYMYQLFRSLAYIHSFGICHRDIKPQNLLLDPDTAVLKLCDFGSAKQLVRGEPNVSYICSRYYRAPELIFGATDYTSSIDVWSAGCVLAELLLGQPIFPGDSGVDQLVEIIKVLGTPTREQIREMNPNYTEFKFPQIKAHPWTKVFRPRTPPEAIALCSRLLEYTPTARLTPLEACAHSFFDELRDPNVKLPNGRDTPALFNFTTQELSSNPPLATILIPPHARIQAAASTPTNATAASDANTGDRGQTNNAASASASNST

SEQ ID NO: 1889 - protein, 1444 aa, Homo sapiens
MKNKGAKQKLKRKGAASAFGCDLTEYLESSGQDVPYVLKSCAEFIETHGIVDGIYRLSGVTSNIQRLRQEFGSDQCPDLTREVYLQDIHCVGSLCKLYFRELPNPLLTYELYEKFTEAVSHCPEEGQLARIQNVIQELPPSHYRTLEYLIRHLAHIASFSSKTNMHARNLALVWAPNLLRSKEIEATGCNGDAAFLAVRVQQVVIEFILNHVDQIFNNGAPGSLENDENRPIMKSLTLPALSLPMKLVSLEEAQARSLATNHPARKERRENSLPEIVPPMGTLFHTVLELPDNKRKLSSKSKKWKSIFNLGRSGSDSKSKLSRNGSVFVRGQRLSVEKATIRPAKSMDSLCSVPVEGKETKGNFNRTVTTGGFFIPATKMHSTGTGSSCDLTKQEGEWGQEGMPPGAEGGFDVSSDRSHLQGAQARPPPEQLKVFRPVEDPESEQTAPKMLGMFYTSNDSPSKSVFTSSLFQMEPSPRNQRKALNISEPFAVSVPLRVSAVISTNSTPCRTPPKELQSLSSLEEFSFHGSESGGWPEEEKPLGAETSAASVPKKAGLEDAKAVPEAPGTVECSKGLSQEPGAHLEEKKTPESSLSSQHLNELEKRPNPEKVVEEGREAGEMESSTLQESPRARAEAVLLHEMDEDDLANALIWPEIQQELKIIESEEELSSLPPPALKTSPIQPILESSLGPFIPSEPPGSLPCGSFPAPVSTPLEVWTRDPANQSTQGASTAASREKPEPEQGLHPDLASLAPLEIVPFEKASPQATVEVGGPGNLSPPLPPAPPPPTPLEESTPVLLSKGGPEREDSSRKLRTDLYIDQLKSQDSPEISSLCQGEEATPRHSDKQNSKNAASEGKGCGFPSPTREVEIVSQEEEDVTHSVQEPSDCDEDDTVTDIAQHGLEMVEPWEEPQWVTSPLHSPTLKDAHKAQVQGLQGHQLEKRLSHRPSLRQSHSLDSKPTVKSQWTLEVPSSSSCANLETERNSDPLQPQAPRREITGWDEKALRSFREFSGLKGAEAPPNQKGPSGVQPNPAETSPISLAEGKELGTHLGHSSPQIRQGGVPGPESSKESSPSVQDSTSPGEHPAKLQLKSTECGPPKGKNRPSSLNLDPAIPIADLFWFENVASFSSPGMQVSEPGDPKVTWMTSSYCKADPWRVYSQDPQDLDIVAHALTGRRNSAPVSVSAVRTSFMVKMCQARAVPVIPPKIQYTQIPQPLPSQSSGENGVQPLERSQEGPSSTSGTTQKPAKDDSPSSLESSKEEKPKQDPGAIKSSPVDATAPCMCEGPTLSPEPGSSNLLSTQDAVVQCRKRMSETEPSGDNLLSSKLERPSGGSKPFHRSRPGRPQSLILFSPPFPIMDHLPPSSTVTDSKVLLSPIRSPTQTVSPGLLCGELAENTWVTPEGVTLRNKMTIPKNGQRLETSTSCFYQPQRRSVILDGRSGRQIE

SEQ ID NO: 1890 - protein, 288 aa, Homo sapiens
MGHTRRQGTSPSKCPYLNFFQLLVLAGLSHFCSGVIHVTKEVKEVATLSCGHNVSVEELAQTRIYWQKEKKMVLTMMSGDMNIWPEYKNRTIFDITNNLSIVILALRPSDEGTYECVVLKYEKDAFKREHLAEVTLSVKADFPTPSISDFEIPTSNIRRIICSTSGGFPEPHLSWLENGEELNAINTTVSQDPETELYAVSSKLDFNMTTNHSFMCLIKYGHLRVNQTFNWNTTKQEHFPDNLLPSWAITLISVNGIFVICCLTYCFAPRCRERRRNERLRRESVRPV

SEQ ID NO: 1891 - protein, 356 aa, Homo sapiens
MHHQWLLLAACFWVIFMFMVASKFITLTFKDPDVYSAKQEFLFLTTMPEVRKLPEEKHIPEELKPTGKELPDSQLVQPLVYMERLELIRNVCRDDALKNLSHTPVSKFVLDRIFVCDKHKILFCQTPKVGNTQWKKVLIVLNGAFSSIEEIPENVVHDHEKNGLPRLSSFSDAEIQKRLKTYFKFFIVRDPFERLISAFKDKFVHNPRFEPWYRHEIAPGIIRKYRRNRTETRGIQFEDFVRYLGDPNHRWLDLQFGDHIIHWVTYVELCAPCEIMYSVIGHHETLEDDAPYILKEAGIDHLVSYPTIPPGITVYNRTKVEHYFLGISKRDIRRLYARFEGDFKLFGYQKPDFLLN

SEQ ID NO: 1892 - protein, 575 aa, Homo sapiens
MWSLLLCGLSIALPLSVTADGCKDIFMKNEILSASQPFAFNCTFPPITSGEVSVTWYKNSSKIPVSKIIQSRIHQDETWILFLPMEWGDSGVYQCVIKGRDSCHRIHVNLTVFEKHWCDTSIGGLPNLSDEYKQILHLGKDDSLTCHLHFPKSCVLGPIKWYKDCNEIKGERFTVLETRLLVSNVSAEDRGNYACQAILTHSGKQYEVLNGITVSITERAGYGGSVPKIIYPKNHSIEVQLGTTLIVDCNVTDTKDNTNLRCWRVNNTLVDDYYDESKRIREGVETHVSFREHNLYTVNITFLEVKMEDYGLPFMCHAGVSTAYIILQLPAPDFRAYLIGGLIALVAVAVSVVYIYNIFKIDIVLWYRSAFHSTETIVDGKLYDAYVLYPKPHKESQRHAVDALVLNILPEVLERQCGYKLFIFGRDEFPGQAVANVIDENVKLCRRLIVIVVPESLGFGLLKNLSEEQIAVYSALIQDGMKVILIELEKIEDYTVMPESIQYIKQKHGAIRWHGDFTEQSQCMKTKFWKTVRYHMPPRRCRPFPPVQLLQHTPCYRTAGPELGSRRKKCTLTTG

SEQ ID NO: 1893 - protein, 599 aa, Homo sapiens
MLCLGWIFLWLVAGERIKGFNISGCSTKKLLWTYSTRSEEEFVLFCDLPEPQKSHFCHRNRLSPKQVPEHLPFMGSNDLSDVQWYQQPSNGDPLEDIRKSYPHIIQDKCTLHFLTPGVNNSGSYICRPKMIKSPYDVACCVKMILEVKPQTNASCEYSASHKQDLLLGSTGSISCPSLSCQSDAQSPAVTWYKNGKLLSVERSNRIVVDEVYDYHQGTYVCDYTQSDTVSSWTVRAVVQVRTIVGDTKLKPDILDPVEDTLEVELGKPLTISCKARFGFERVFNPVIKWYIKDSDLEWEVSVPEAKSIKSTLKDEIIERNIILEKVTQRDLRRKFVCFVQNSIGNTTQSVQLKEKRGVVLLYILLGTIGTLVAVLAASALLYRHWIEIVLLYRTYQSKDQTLGDKKDFDAFVSYAKWSSFPSEATSSLSEEHLALSLFPDVLENKYGYSLCLLERDVAPGGVYAEDIVSIIKRSRRGIFILSPNYVNGPSIFELQAAVNLALDDQTLKLILIKFCYFQEPESLPHLVKKALRVLPTVTWRGLKSVPPNSRFWAKMRYHMPVKNSQGFTWNQLRITSRIFQWKGLSRTETTGRSSQPKEW

SEQ ID NO: 1894 - protein, 395 aa, Homo sapiens
MDFSRNLYDIGEQLDSEDLASLKFLSLDYIPQRKQEPIKDALMLFQRLQEKRMLEESNLSFLKELLFRINRLDLLITYLNTRKEEMERELQTPGRAQISAYRVMLYQISEEVSRSELRSFKFLLQEEISKCKLDDDMNLLDIFIEMEKRVILGEGKLDILKRVCAQINKSLLKIINDYEEFSKGALTTTFEELHFEIKPHDDCTVEQIYEILKIYQLMDHSNMDCFICCILSHGDKGIIYGTDGQEAPIYELTSQFTGLKCPSLAGKPKVFFIQACQGDNYQKGIPVETDSEEQPYLEMDLSSPQTRYIPDEADFLLGMATVNNCVSYRNPAEGTWYIQSLCQSLRERCPRGDDILTILTEVNYEVSNKDDKKNMGKQMPQPTFTLRKKLVFPSD

SEQ ID NO: 1895 - protein, 496 aa, Homo sapiens
MDFSRNLYDIGEQLDSEDLASLKFLSLDYIPQRKQEPIKDALMLFQRLQEKRMLEESNLSFLKELLFRINRLDLLITYLNTRKEEMERELQTPGRAQISAYRFHFCRMSWAEANSQCQTQSVPFWRRVDHLLIRVMLYQISEEVSRSELRSFKFLLQEEISKCKLDDDMNLLDIFIEMEKRVILGEGKLDILKRVCAQINKSLLKIINDYEEFSKGEELCGVMTISDSPREQDSESQTLDKVYQMKSKPRGYCLIINNHNFAKAREKVPKLHSIRDRNGTHLDAGALTTTFEELHFEIKPHDDCTVEQIYEILKIYQLMDHSNMDCFICCILSHGDKGIIYGTDGQEAPIYELTSQFTGLKCPSLAGKPKVFFIQACQGDNYQKGIPVETDSEEQPYLEMDLSSPQTRYIPDEADFLLGMATVNNCVSYRNPAEGTWYIQSLCQSLRERCPRGDDILTILTEVNYEVSNKDDKKNMGKQMPQPTFTLRKKLVFPSD

SEQ ID NO: 1896 - protein, 1657 aa, Homo sapiens
MDSKKRSSTEAEGSKERGLVHIWQAGSFPITPERLPGWGGKTVLQAALGVKHGVLLTEDGEVYSFGTLPWRSGPVEICPSSPILENALVGQYVITVATGSFHSGAVTDNGVAYMWGENSAGQCAVANQQYVPEPNPVSIADSEASPLLAVRILQLACGEEHTLALSISREIWAWGTGCQLGLITTAFPVTKPQKVEHLAGRVVLQVACGAFHSLALVQCLPSQDLKPVPERCNQCSQLLITMTDKEDHVIISDSHCCPLGVTLTESQAENHASTALSPSTETLDRQEEVFENTLVANDQSVATELNAVSAQITSSDAMSSQQNVMGTTEISSARNIPSYPDTQAVNEYLRKLSDHSVREDSEHGEKPVPSQPLLEEAIPNLHSPPTTSTSALNSLVVSCASAVGVRVAATYEAGALSLKKVMNFYSTTPCETGAQAGSSAIGPEGLKDSREEQVKQESMQGKKSSSLVDIREEETEGGSRRLSLPGLLSQVSPRLLRKAARVKTRTVVLTPTYSGEADALLPSLRTEVWTWGKGKEGQLGHGDVLPRLQPLCVKCLDGKEVIHLEAGGYHSLALTAKSQVYSWGSNTFGQLGHSDFPTTVPRLAKISSENGVWSIAAGRDYSLFLVDTEDFQPGLYYSGRQDPTEGDNLPENHSGSKTPVLLSCSKLGYISRVTAGKDSYLALVDKNIMGYIASLHELATTERRFYSKLSDIKSQILRPLLSLENLGTTTTVQLLQEVASRFSKLCYLIGQHGASLSSFLHGVKEARSLVILKHSSLFLDSYTEYCTSITNFLVMGGFQLLAKPAIDFLNKNQELLQDLSEVNDENTQLMEILNTLFFLPIRRLHNYAKVLLKLATCFEVASPEYQKLQDSSSCYECLALHLGRKRKEAEYTLGFWKTFPGKMTDSLRKPERRLLCESSNRALSLQHAGRFSVNWFILFNDALVHAQFSTHHVFPLATLWAEPLSEEAGGVNGLKITTPEEQFTLISSTPQEKTKWLRAISQAVDQALRGMSDLPPYGSGSSVQRQEPPISRSAKYTFYKDPRLKDATYDGRWLSGKPHGRGVLKWPDGKMYSGMFRNGLEDGYGEYRIPNKAMNKEDHYVGHWKEGKMCGQGVYSYASGEVFEGCFQDNMRHGHGLLRSGKLTSSSPSMFIGQWVMDKKAGYGVFDDITRGEKYMGMWQDDVCQGNGVVVTQFGLYYEGNFHLNKMMGNGVLLSEDDTIYEGEFSDDWTLSGKGTLTMPNGDYIEGYFSGEWGSGIKITGTYFKPSLYESDKDRPKVFRKLGNLAVPADEKWKAVFDECWRQLGCEGPGQGEVWKAWDNIAVALTTSRRQHRDSPEILSRSQTQTLESLEFIPQHVGAFSVEKYDDIRKYLIKACDTPLHPLGRLVETLVAVYRMTYVGVGANRRLLQEAVKEIKSYLKRIFQLVRFLFPELPEEGSTIPLSAPLPTERKSFCTGKSDSRSESPEPGYVVTSSGLLLPVLLPRLYPPLFMLYALDNDREEDIYWECVLRLNKQPDIALLGFLGVQRKFWPATLSILGESKKVLPTTKDACFASAVECLQQISTTFTPSDKLKVIQQTFEEISQSVLASLHEDFLWSMDDLFPVFLYVVLRARIRNLGSEVHLIEDLMDPYLQHGEQGIMFTTLKACYYQIQREKLN

SEQ ID NO: 1897 - protein, 529 aa, Homo sapiens
MLVLFETSVGYAIFKVLNEKKLQEVDSLWKEFETPEKANKIVKLKHFEKFQDTAEALAAFTALMEGKINKQLKKVLKKIVKEAHEPLAVADAKLGGVIKEKLNLSCIHSPVVNELMRGIRSQMDGLIPGVEPREMAAMCLGLAHSLSRYRLKFSADKVDTMIVQAISLLDDLDKELNNYIMRCREWYGWHFPELGKIISDNLTYCKCLQKVGDRKNYASAKLSELLPEEVEAEVKAAAEISMGTEVSEEDICNILHLCTQVIEISEYRTQLYEYLQNRMMAIAPNVTVMVGELVGARLIAHAGSLLNLAKHAASTVQILGAEKALFRALKSRRDTPKYGLIYHASLVGQTSPKHKGKISRMLAAKTVLAIRYDAFGEDSSSAMGVENRAKLEARLRTLEDRGIRKISGTGKALAKTEKYEHKSEVKTYDPSGDSTLPTCSKKRKIEQVDKEDEITEKKAKKAKIKVKVEEEEEEKVAEEEETSVKKKKKRGKKKHIKEEPLSEEEPCTSTAIASPEKKKKKKKKRENED

SEQ ID NO: 1898 - protein, 245 aa, Homo sapiens
MNGRADFREPNAEVPRPIPHIGPDYIPTEEERRVFAECNDESFWFRSVPLAATSMLITQGLISKGILSSHPKYGSIPKLILACIMGYFAGKLSYVKTCQEKFKKLENSPLGEALRSGQARRSSPPGHYYQKSKYDSSVSGQSSFVTSPAADNIEMLPHYEPIPFSSSMNESAPTGITDHIVQGPDPNLEESPKRKNITYEELRNKNRESYEVSLTQKTDPSVRPMHERVPKKEVKVNKYGDTWDE

SEQ ID NO: 1899 - protein, 581 aa, Homo sapiens [sequence omitted]

SEQ ID NO: 1900 - protein, 527 aa, Homo sapiens
MILSSYNTIQSVFCCCCCCSVQKRQMRTQISLSTDEELPEKYTQRRRPWLSQLSNKKQSNTGRVQPSKRKPLPPLPPSEVAEEKIQVKALYDFLPREPCNLALRRAEEYLILEKYNPHWWKARDRLGNEGLIPSNYVTENKITNLEIYEWYHRNITRNQAEHLLRQESKEGAFIVRDSRHLGSYTISVFMGARRSTEAAIKHYQIKKNDSGQWYVAERHAFQSIPELIWYHQHNAAGLMTRLRYPVGLMGSCLPATAGFSYEKWEIDPSELAFIKEIGSGQFGVVHLGEWRSHIQVAIKAINEGSMSEEDFIEEAKVMMKLSHSKLVQLYGVCIQRKPLYIVTEFMENGCLLNYLRENKGKLRKEMLLSVCQDICEGMEYLERNGYIHRDLAARNCLVSSTCIVKISDFGMTRYVLDDEYVSSFGAKFPIKWSPPEVFLFNKYSSKSDVWSFGVLMWEVFTEGKMPFENKSNLQVVEAISEGFRLYRPHLAPMSIYEVMYSCWHEKPEGRPTFAELLRAVTEIAETW

SEQ ID NO: 1901 - protein, 554 aa, Homo sapiens [sequence omitted]

SEQ ID NO: 1902 - protein, 1626 aa, Homo sapiens
MAKSGGCGAGAGVGGGNGALTWVTLFDQNNAAKKEESETANKNDSSKKLSVERVYQKKTQLEHILLRPDTYIGSVEPLTQFMWVYDEDVGMNCREVTFVPGLYKIFDEILVNAADNKQRDKNMTCIKVSIDPESNIISIWNNGKGIPVVEHKVEKVYVPALIFGQLLTSSNYDDDEKKVTGGRNGYGAKLCNIFSTKFTVETACKEYKHSFKQTWMNNMMKTSEAKIKHFDGEDYTCITFQPDLSKFKMEKLDKDIVALMTRRAYDLAGSCRGVKVMFNGKKLPVNGFRSYVDLYVKDKLDETGVALKVIHELANERWDVCLTLSEKGFQQISFVNSIATTKGGRHVDYVVDQVVGKLIEVVKKKNKAGVSVKPFQVKNHIWVFINCLIENPTFDSQTKENMTLQPKSFGSKCQLSEKFFKAASNCGIVESILNWVKFKAQTQLNKKCSSVKYSKIKGIPKLDDANDAGGKHSLECTLILTEGDSAKSLAVSGLGVIGRDRYGVFPLRGKILNVREASHKQIMENAEINNIIKIVGLQYKKSYDDAESLKTLRYGKIMIMTDQDQDGSHIKGLLINFIHHNWPSLLKHGFLEEFITPIVKASKNKQELSFYSIPEFDEWKKHIENQKAWKIKYYKGLGTSTAKEAKEYFADMERHRILFRYAGPEDDAAITLAFSKKKIDDRKEWLTNFMEDRRQRRLHGLPEQFLYGTATKHLTYNDFINKELILFSNSDNERSIPSLVDGFKPGQRKVLFTCFKRNDKREVKVAQLAGSVAEMSAYHHGEQALMMTIVNLAQNFVGSNNINLLQPIGQFGTRLHGGKDAASPRYIFTMLSTLARLLFPAVDDNLLKFLYDDNQRVEPEWYIPIIPMVLINGAEGIGTGWACKLPNYDAREIVNNVRRMLDGLDPHPMLPNYKNFKGTIQELGQNQYAVSGEIFVVDRNTVEITELPVRTWTQVYKEQVLEPMLNGTDKTPALISDYKEYHTDTTVKFVVKMTEEKLAQAEAAGLHKVFKLQTTLTCNSMVLFDHMGCLKKYETVQDILKEFFDLRLSYYGLRKEWLVGMLGAESTKLNNQARFILEKIQGKITIENRSKKDLIQMLVQRGYESDPVKAWKEAQEKAAEEDETQNQHDDSSSDSGTPSGPDFNYILNMSLWSLTKEKVEELIKQRDAKGREVNDLKRKSPSDLWKEDLAAFVEELDKVESQEREDVLAGMSGKAIKGKVGKPKVKKLQLEETMPSPYGRRIIPEITAMKADASKKLLKKKKGDLDTAAVKVEFDEEFSGAPVEGAGEEALTPSVPINKGPKPKREKKEPGTRVRKTPTSSGKPSAKKVKKRNPWSDDESKSESDLEETEPVVIPRDSLLRRAAAERPKYTFDFSEEEDDDADDDDDDNNDLEELKVKASPITNDGEDEFVPSDGLDKDEYTFSPGKSKATPEKSLHDKKSQDFGNLFSFPSYSQKSEDDSAKFDSNEEDSASVFSPSFGLKQTDKVPSKTVAAKKGKPSSDTVPKPKRAPKQKKVVEAVNSDSDSEFGIPKKTTTPKGKGRGAKKRKASGSENEGDYNPGRKTSKTTSKKPKKTSFDQDSDVDIFPSDFPTEPPSLPRTGRARKEVKYFAESDEEEDDVDFAMFN

SEQ ID NO: 1903 - protein, 655 aa, Homo sapiens
MPEDRNSGGCPAGALASTPFIPKTTYRRIKRCFSFRKGIFGQKLEDTVRYEKRYGNRLAPMLVEQCVDFIRQRGLKEEGLFRLPGQANLVKELQDAFDCGEKPSFDSNTDVHTVASLLKLYLRELPEPVIPYAKYEDFLSCAKLLSKEEEAGVKELAKQVKSLPVVNYNLLKYICRFLDEVQSYSGVNKMSVQNLATVFGPNILRPKVEDPLTIMEGTVVVQQLMSVMISKHDCLFPKDAELQSKPQDGVSNNNEIQKKATMGQLQNKENNNTKDSPSRQCSWDKSESPQRSSMNNGSPTALSGSKTNSPKNSVHKLDVSRSPPLMVKKNPAFNKGSGIVTNGSFSSSNAEGLEKTQTTPNGSLQARRSSSLKVSGTKMGTHSVQNGTVRMGILNSDTLGNPTNVRNMSWLPNGYVTLRDNKQKEQAGELGQHNRLSTYDNVHQQFSMMNLDDKQSIDSATWSTSSCEISLPENSNSCRSSTTTCPEQDFFGGNFEDPVLDGPPQDDLSHPRDYESKSDHRSVGGRSSRATSSSDNSETFVGNSSSNHSALHSLVSSLKQEMTKQKIEYESRIKSLEQRNLTLETEMMSLHDELDQERKKFTMIEIKMRNAERAKEDAEKRNDMLQKEMEQFFSTFGELTVEPRRTERGNTIWIQ

SEQ ID NO: 1904 - protein, 1023 aa, Homo sapiens
MGAGALAICQSKAAVRLKEDMKKIVAVPLNEQKDFTYQKLFGVSLQELERQGLTENGIPAVVWNIVEYLTQHGLTQEGLFRVNGNVKVVEQLRLKFESGVPVELGKDGDVCSAASLLKLFLRELPDSLITSALQPRFIQLFQDGRNDVQESSLRDLIKELPDTHYCLLKYLCQFLTKVAKHHVQNRMNVHNLATVFGPNCFHVPPGLEGMKEQDLCNKIMAKILENYNTLFEVEYTENDHLRCENLARLIIVKEVYYKNSLPILLTRGLERDMPKPPPKTKIPKSRSEGSIQAHRVLQPELSDGIPQLSLRLSYRKACLEDMNSAEGAISAKLVPSSQEDERPLSPFYLSAHVPQVSNVSATGELLERTIRSAVEQHLFDVNNSGGQSSEDSESGTLSASSATSARQRRRQSKEQDEVRHGRDKGLINKENTPSGFNHLDDCILNTQEVEKVHKNTFGCAGERSKPKRQKSSTKLSELHDNQDGLVNMESLNSTRSHERTGPDDFEWMSDERKGNEKDGGHTQHFESPTMKIQEHPSLSDTKQQRNQDAGDQEESFVSEVPQSDLTALCDEKNWEEPIPAFSSWQRENSDSDEAHLSPQAGRLIRQLLDEDSDPMLSPRFYAYGQSRQYLDDTEVPPSPPNSHSFMRRRSSSLGSYDDEQEDLTPAQLTRRIQSLKKKIRKFEDRFEEEKKYRPSHSDKAANPEVLKWTNDLAKFRRQLKESKLKISEEDLTPRMRQRSNTLPKSFGSQLEKEDEKKQELVDKAIKPSVEATLESIQRKLQEKRAESSRPEDIKDMTKDQIANEKVALQKALLYYESIHGRPVTKNERQVMKPLYDRYRLVKQILSRANTIPIIGSPSSKRRSPLLQPIIEGETASFFKEIKEEEEGSEDDSNVKPDFMVTLKTDFSARCFLDQFEDDADGFISPMDDKIPSKCSQDTGLSNLHAASIPELLEHLQEMREEKKRIRKKLRDFEDNFFRQNGRNVQKEDRTPMAEEYSEYKHIKAKLRLLEVLISKRDTDSKSM

SEQ ID NO: 1905 - protein, 1050 aa, Homo sapiens
MLCWGYWSLGQPGISTNLQGIVAEPQVCGFISDRSVKEVACGGNHSVFLLEDGEVYTCGLNTKGQLGHEREGNKPEQIGALADQHIIHVACGESHSLALSDRGQLFSWGAGSDGQLGLMTTEDSVAVPRLIQKLNQQTILQVSCGNWHCLALAADGQFFTWGKNSHGQLGLGKEFPSQASPQRVRSLEGIPLAQVAAGGAHSFALSLSGAVFGWGMNNAGQLGLSDEKDRESPCHVKLLRTQKVVYISCGEEHTAVLTKSGGVFTFGAGSCGQLGHDSMNDEVNPRRVLELMGSEVTQIACGRQHTLAFVPSSGLIYAFGCGARGQLGTGHTCNVKCPSPVKGYWAAHSGQLSARADRFKYHIVKQIFSGGDQTFVLCSKYENYSPAVDFRTMNQAHYTSLINDETIAVWRQKLSEHNNANTINGVVQILSSAACWNGSFLEKKIDEHFKTSPKIPGIDLNSTRVLFEKLMNSQHSMILEQILNSFESCLIPQLSSSPPDVEAMRIYLILPEFPLLQDSKYYITLTIPLAMAILRLDTNPSKVLDNWWSQVCPKYFMKLVNLYKGAVLYLLRGRKTFLIPVLFNNYITAALKLLEKLYKVNLKVKHVEYDTFYIPEISNLVDIQEDYLMWFLHQAGMKARPSIIQDTVTLCSYPFIFDAQAKTKMLQTDAELQMQVAVNGANLQNVFMLLTLEPLLARSPFLVLHVRRNNLVGDALRELSIHSDIDLKKPLKVIFDGEEAVDAGGVTKEFFLLLLKELLNPIYGMFTYYQDSNLLWFSDTCFVEHNWFHLIGITCGLAIYNSTVVDLHFPLALYKKLLNVKPGLEDLKELSPTEGRSLQELLDYPGEDVEETFCLNFTICRESYGVIEQKKLIPGGDNVTVCKDNRQEFVDAYVNYVFQISVHEWYTAFSSGFLKVCGGKVLELFQPSELRAMMVGNSNYNWEELEETAIYKGDYSATHPTVKLFWETFHEFPLEKKKKFLLFLTGSDRIPIYGMASLQIVIQSTASGEEYLPVAHTCYNLLDLPKYSSKEILSARLTQALDNYEGFSLA

SEQ ID NO: 1906 - protein, 1022 aa, Homo sapiens
MYFCWGADSRELQRRRTAGSPGAELLQAASGERHSLLLLTNHRVLSCGDNSRGQLGRRGAQRGELPEPIQALETLIVDLVSCGKEHSLAVCHKGRVFAWGAGSEGQLGIGEFKEISFTPKKIMTLNDIKIIQVSCGHYHSLALSKDSQVFSWGKNSHGQLGLGKEFPSQASPQRVRSLEGIPLAQVAAGGAHSFALSLCGTSFGWGSNSAGQLALSGRNVPVQSNKPLSVGALKNLGVVYISCGDAHTAVLTQDGKVFTFGDNRSGQLGYSPTPEKRGPQLVERIDGLVSQIDCGSYHTLAYVHTTGQVVSFGHGPSDTSKPTHPEALTENFDISCLISAEDFVDVQVKHIFAGTYANFVTTHQDTSSTRAPGKTLPEISRISQSMAEKWIAVKRRSTEHEMAKSEIRMIFSSPACLTASFLKKRGTGETTSIDVDLEMARDTFKKLTKKEWISSMITTCLEDDLLRALPCHSPHQEALSVFLLLPECPVMHDSKNWKNLVVPFAKAVCEMSKQSLQVLKKCWAFLQESSLNPLIQMLKAAIISQLLHQTKTEQDHCNVKALLGMMKELHKVNKANCRLPENTFNINELSNLLNFYIDRGRQLFRDNHLIPAETPSPVIFSDFPFIFNSLSKIKLLQADSHIKMQMSEKKAYMLMHETILQKKDEFPPSPRFILRVRRSRLVKDALRQLSQAEATDFCKVLVVEFINEICPESGGVSSEFFHCMFEEMTKPEYGMFMYPEMGSCMWFPAKPKPEKKRYFLFGMLCGLSLFNLNVANLPFPLALYKKLLDQKPSLEDLKELSPRLGKSLQEVLDDAADDIGDALCIRFSIHWDQNDVDLIPNGISIPVDQTNKRDYVSKYIDYIFNVSVKAVYEEFQRGFYRVCEKEILRHFYPEELMTAIIGNTDYDWKQFEQNSKYEQGYQKSHPTIQLFWKAFHKLTLDEKKKFLFFLTGRDRLHARGIQKMEIVFRCPETFSERDHPTSITCHNILSLPKYSTMERMEEALQVAINNNRGFVSPMLTQS

SEQ ID NO: 1907 - protein, 1024 aa, Homo sapiens
MERRSRRKSRRNGRSTAGKAAATQPAKSPGAQLWLFPSAAGLHRALLRRVEVTRQLCCSPGRLAVLERGGAGVQVHQLLAGSGGARTPKCIKLGKNMKIHSVDQGAEHMLILSSDGKPFEYDNYSMKHLRFESILQEKKIIQITCGDYHSLALSKGGELFAWGQNLHGQLGVGRKFPSTTTPQIVEHLAGVPLAQISAGEAHSMALSMSGNIYSWGKNECGQLGLGHTESKDDPSLIEGLDNQKVEFVACGGSHSALLTQDGLLFTFGAGKHGQLGHNSTQNELRPCLVAELVGYRVTQIACGRWHTLAYVSDLGKVFSFGSGKDGQLGNGGTRDQLMPLPVKVSSSEELKLESHTSEKELIMIAGGNQSILLWIKKENSYVNLKRTIPTLNEGTVKRWIADVETKRWQSTKREIQEIFSSPACLTGSFLRKRRTTEMMPVYLDLNKARNIFKELTQKDWITNMITTCLKDNLLKRLPFHSPPQEALEIFFLLPECPMMHISNNWESLVVPFAKVVCKMSDQSSLVLEEYWATLQESTFSKLVQMFKTAVICQLDYWDESAEENGNVQALLEMLKKLHRVNQVKCQLPESIFQVDELLHRLNFFVEVCRRYLWKMTVDASENVQCCVIFSHFPFIFNNLSKIKLLHTDTLLKIESKKHKAYLRSAAIEEERESEFALRPTFDLTVRRNHLIEDVLNQLSQFENEDLRKELWVSFSGEIGYDLGGVKKEFFYCLFAEMIQPEYGMFMYPEGASCMWFPVKPKFEKKRYFFFGVLCGLSLFNCNVANLPFPLALFKKLLDQMPSLEDLKELSPDLGKNLQTLLDDEGDNFEEVFYIHFNVHWDRNDTNLIPNGSSITVNQTNKRDYVSKYINYIFNDSVKAVYEEFRRGFYKMCDEDIIKLFHPEELKDVIVGNTDYDWKTFEKNARYEPGYNSSHPTIVMFWKAFHKLTLEEKKKFLVFLTGTDRLQMKDLNNMKITFCCPESWNERDPIRALTCFSVLFLPKYSTMETVEEALQEAINNNRGFG

SEQ ID NO: 1908 - protein, 1040 aa, Homo sapiens
MIVLLLFALLWMVEGVFSQLHYTVQEEQEHGTFVGNIAEDLGLDITKLSARGFQTVPNSRTPYLDLNLETGVLYVNEKIDREQICKQSPSCVLHLEVFLENPLELFQVEIEVLDINDNPPSFPEPDLTVEISESATPGTRFPLESAFDPDVGTNSLRDYEITPNSYFSLDVQTQGDGNRFAELVLEKPLDREQQAVHRYVLTAVDGGGGGGVGEGGGGGGGAGLPPQQQRTGTALLTIRVLDSNDNVPAFDQPVYTVSLPENSPPGTLVIQLNATDPDEGQNGEVVYSFSSHISPRARELFGLSPRTGRLEVSGELDYEESPVYQVYVQAKDLGPNAVPAHCKVLVRVLDANDNAPEISFSTVKEAVSEGAAPGTVVALFSVTDRDSEENGQVQCELLGDVPFRLKSSFKNYYTIVTEAPLDREAGDSYTLTVVARDRGEPALSTSKSIQVQVSDVNDNAPRFSQPVYDVYVTENNVPGAYIYAVSATDRDEGANAQLAYSILECQIQGMSVFTYVSINSENGYLYALRSFDYEQLKDFSFQVEARDAGSPQALAGNATVNILIVDQNDNAPAIVAPLPGRNGTPAREVLPRSAEPGYLLTRVAAVDADDGENARLTYSIVRGNEMNLFRMDWRTGELRTARRVPAKRDPQRPYELVIEVRDHGQPPLSSTATLVVQLVDGAVEPQGGGGSGGGGSGEHQRPSRSGGGETSLDLTLILIIALGSVSFIFLLAMIVLAVRCQKEKKLNIYTCLASDCCLCCCCCGGGGSTCCGRQARARKKKLSKSDIMLVQSSNVPSNPAQVPIEESGGFGSHHHNQNYCYQVCLTPESAKTDLMFLKPCSPSRSTDTEHNPCGAIVTGYTDQQPDIISNGSILSNETKHQRAELSYLVDRPRRVNSSAFQEADIVSSKDSGHGDSEQGDSDHDATNRAQSAGMDLFSNCTEECKALGHSDRCWMPSFVPSDGRQAADYRSNLHVPGMDSVPDTEVFETPEAQPGAERSFSTFGKEKALHSTLERKELDGLLTNTRAPYKPPYLTRKRIC

SEQ ID NO: 1909 - protein, 872 aa, Homo sapiens
MNLIVKLRRSFRTLIVLLATFCLVSIVISAYFLYSGYKQEMTLIETTAEAECTDIKILPYRSMELKTVKPIDTSKTDPTVLLFVESQYSQLGQDIIAILESSRFQYHMVIAPGKGDIPPLTDNGKGKYTLVIYENILKYVSMDSWNRELLEKYCVEYSVSIIGFHKANENSLPSTQLKGFPLNLFNNLALKDCFVNPQSPLLHITKAPKVEKGPLPGEDWTIFQYNHSTYQPVLLTELQTEKSLSSLSSKTLFATVIQDLGLHDGIQRVLFGNNLNFWLHKLIFIDAISFLSGKRLTLSLDRYILVDIDDIFVGKEGTRMNVKDVKALLETQNLLRTQVANFTFNLGFSGKFYHTGTEEEDEGDDLLLRSVDEFWWFPHMWSHMQPHLFHNESSLVEQMILNKEFALEHGIPINMGYAVAPHHSGVYPVHIQLYAAWKKVWGIQVTSTEEYPHLKPARYRKGFIHNSIMVLPRQTCGLFTHTIFYKEYPGGPQELDKSIRGGELFLTILLNPISIFMTHLSNYGNDRLGLYTFVNLVNFVQSWTNLKLQTLPPVQLAHQYFELFPEQKDPLWQNPCDDKRHKDIWSREKTCDHLPKFLVIGPQKTGTTALYLFLLMHPSIISNLPSPKTFEEVQFFNGNNYHKGIDWYMDFFPTPSNTTSDFLFEKSANYFHSEEAPRRAASLVPKAKIITILIDPSDRAYSWYQHQRSHEDPAALRFNFYEVISTGHWAPSDLKTLQRRCLVPGWYAVHIERWLTYFATSQLLIIDGQQLRSDPATVMDEVQKFLGVTPRYNYSEALTFDPQKGFWCQLLEGGKTKCLGKSKGRKYPPMDPESRTFLSNYYRDHNVELSKLLHRLGQPLPSWLRQELQKVR

SEQ ID NO: 1910 - protein, 3924 aa, Homo sapiens
MMNEDAAQKSDSGEKFNGSSQRRKRPKKSDSNASFLRAARAGNLDKVVEYLKGGIDINTCNQNGLNALHLAAKEGHVGLVQELLGRGSSVDSATKKGNTALHIASLAGQAEVVKVLVKEGANINAQSQNGFTPLYMAAQENHIDVVKYLLENGANQSTATEDGFTPLAVALQQGHNQAVAILLENDTKGKVRLPALHIAARKDDTKSAALLLQNDHNADVQSKMMVNRTTESGFTPLHIAAHYGNVNVATLLLNRGAAVDFTARNGITPLHVASKRGNTNMVKLLLDRGGQIDAKTRDGLTPLHCAARSGHDQVVELLLERGAPLLARTKNGLSPLHMAAQGDHVECVKHLLQHKAPVDDVTLDYLTALHVAAHCGHYRVTKLLLDKRANPNARALNGFTPLHIACKKNRIKVMELLVKYGASIQAITESGLTPIHVAAFMGHLNIVLLLLQNGASPDVTNIRGETALHMAARAGQVEVVRCLLRNGALVDARAREEQTPLHIASRLGKTEIVQLLLQHMAHPDAATTNGYTPLHISAREGQVDVASVLLEAGAAHSLATKKGFTPLHVAAKYGSLDVAKLLLQRRAAADSAGKNGLTPLHVAAHYDNQKVALLLLEKGASPHATAKNGYTPLHIAAKKNQMQIASTLLNYGAETNIVTKQGVTPLHLASQEGHTDMVTLLLDKGANIHMSTKSGLTSLHLAAQEDKVNVADILTKHGADQDAHTKLGYTPLIVACHYGNVKMVNFLLKQGANVNAKTKNGYTPLHQAAQQGHTHIINVLLQHGAKPNATTANGNTALAIAKRLGYISVVDTLKVVTEEVTTTTTTITEKHKLNVPETMTEVLDVSDEEGDDTMTGDGGEYLRPEDLKELGDDSLPSSQFLDGMNYLRYSLEGGRSDSLRSFSSDRSHTLSHASYLRDSAVMDDSVVIPSHQVSTLAKEAERNSYRLSWGTENLDNVALSSSPIHSGFLVSFMVDARGGAMRGCRHNGLRIIIPPRKCTAPTRVTCRLVKRHRLATMPPMVEGEGLASRLIEVGPSGAQFLGPVIVEIPHFAALRGKERELVVLRSENGDSWKEHFCDYTEDELNEILNGMDEVLDSPEDLEKKRICRIITRDFPQYFAVVSRIKQDSNLIGPEGGVLSSTVVPQVQAVFPEGALTKRIRVGLQAQPMHSELVKKILGNKATFSPIVTLEPRRRKFHKPITMTIPVPKASSDVMLNGFGGDAPTLRLLCSITGGTTPAQWEDITGTTPLTFVNECVSFTTNVSARFWLIDCRQIQESVTFASQVYREIICVPYMAKFVVFAKSHDPIEARLRCFCMTDDKVDKTLEQQENFAEVARSRDVEVLEGKPIYVDCFGNLVPLTKSGQHHIFSFFAFKENRLPLFVKVRDTTQEPCGRLSFMKEPKSTRGLVHQAICNLNITLPIYTKESESDQEQEEEIDMTSEKNDETESTETSVLKSHLVNEVPVLASPDLLSEVSEMKQDLIKMTAILTTDVSDKAGSIKVKELVKAAEEEPGEPFEIVERVKEDLEKVNEILRSGTCTRDESSVQSSRSERGLVEEEWVIVSDEEIEEARQKAPLEITEYPCVEVRIDKEIKGKVEKDSTGLVNYLTDDLNTCVPLPKEQLQTVQDKAGKKCEALAVGRSSEKEGKDIPPDETQSTQKQHKPSLGIKKPVRRKLKEKQKQKEEGLQASAEKAELKKGSSEESLGEDPGLAPEPLPTVKATSPLIEETPIGSIKDKVKALQKRVEDEQKGRSKLPIRVKGKEDVPKKTTHRPHPAASPSLKSERHAPGSPSPKTERHSTLSSSAKTERHPPVSPSSKTEKHSPVSPSAKTERHSPASSSSKTEKHSPVSPSTKTERHSPVSSTKTERHPPVSPSGKTDKRPPVSPSGRTEKHPPVSPGRTEKRLPVSPSGRTDKHQPVSTAGKTEKHLPVSPSGKTEKQPPVSPTSKTERIEETMSVRELMKAFQSGQDPSKHKTGLFEHKSAKQKQPQEKGKVRVEKEKGPILTQREAQKTENQTIKRGQRLPVTGTAESKRGVRVSSIGVKKEDAAGGKEKVLSHKIPEPVQSVPEEESHRESEVPKEKMADEQGDMDLQISPDRKTSTDFSEVIKQELEDNDKYQQFRLSEETEKAQLHLDQVLTSPFNTTFPLDYMKDEFLPALSLQSGALDGSSESLKNEGVAGSPCGSLMEGTPQISSEESYKHEGLAETPETSPESLSFSPKKSEEQTGETKESTKTETTTEIRSEKEHPTTKDITGGSEERGATVTEDSETSTESFQKEATLGSPKDTSPKRQDDCTGSCSVALAKETPTGLTEEAACDEGQRTFGSSAHKTQTDSEVQESTATSDETKALPLPEASVKTDTGTESKPQGVIRSPQGLELALPSRDSEVLSAVADDSLAVSHKDSLEASPVLEDNSSHKTPDSLEPSPLKESPCRDSLESSPVEPKMKAGIFPSHFPLPAAVAKTELLTEVASVRSRLLRDPDGSAEDDSLEQTSLMESSGKSPLSPDTPSSEEVSYEVTPKTTDVSTPKPAVIHECAEEDDSENGEKKRFTPEEEMFKMVTKIKMFDELEQEAKQKRDYKKEPKQEESSSSSDPDADCSVDVDEPKHTGSGEDESGVPVLVTSESRKVSSSSESEPELAQLKKGADSGLLPEPVIRVQPPSPLPSSMDSNSSPEEVQFQPVVSKQYTFKMNEDTQEEPGKSEEEKDSESHLAEDRHAVSTEAEDRSYDKLNRDTDQPKICDGHGCEAMSPSSSAAPVSSGLQSPTGDDVDEQPVIYKESLALQGTHEKDTEGEELDVSRAESPQADCPSESFSSSSSLPHCLVSEGKELDEDISATSSIQKTEVTKTDETFENLPKDCPSQDSSITTQTDRFSMDVPVSDLAENDEIYDPQITSPYENVPSQSFFSSEESKTQTDANHTTSFHSSEVYSVTITSPVEDVVVASSSSGTVLSKESNFEGQDIKMESQQESTLWEMQSDSVSSSFEPTMSATTTVVGEQISKVIITKTDVDSDSWSEIREDDEAFEARVKEEEQKIFGLMVDRQSQGTTPDTTPARTPTEEGTPTSEQNPFLFQEGKLFEMTRSGAIDMTKRSYADESFHFFQIGQESREETLSEDVKEGATGADPLPLETSAESLALSESKETVDDEADLLPDDVSEEVEEIPASDAQLNSQMGISASTETPTKEAVSVGTKDLPTVQTGDIPPLSGVKQISCPDSSEPAVQVQLDFSTLTRSVYSDRGDDSPDSSPEEQKSVIEIPTAPMENVPFTESKSKIPVRTMPTSTPAPPSAEYESSVSEDFLSSVDEENKADEAKPKSKLPVKVPLQRVEQQLSDLDTSVQKTVAPQGQDMASIAPDNRSKSESDASSLDSKTKCPVKTRSYTETETESRERAEELELESEEGATRPKILTSRLPVKSRSTTSSCRGGTSPTKESKEHFFDLYRNSIEFFEEISDEASKLVDRLTQSEREQEIVSDDESSSALEVSVIENLPPVETEHSVPEDIFDTRPIWDESIETLIERIPDENGHDHAEDPQDEQERIEERLAYIADHLGFSWTELARELDFTEEQIHQIRIENPNSLQDQSHALLKYWLERDGKHATDTNLVECLTKINRMDIVHLMETNTEPLQERISHSYAEIEQTITLDHSEGFSVLQEELCTAQHKQKEEQAVSKESETCDHPPIVSEEDISVGYSTFQDGVPKTEGDSSATALFPQTHKEQVQQDFSGKMQDLPEESSLEYQQEYFVTTPGTETSETQKAMIVPSSPSKTPEEVSTPAEEEKLYLQTPTSSERGGSPIIQEPEEPSEHREESSPRKTSLVIVESADNQPETCERLDEDAAFEKGDDMPEIPPETVTEEEYIDEHGHTVVKKVTRKIIRRYVSSEGTEKEEIMVQGMPQEPVNIEEGDGYSKVIKRVVLKSDTEQSEDNNE

SEQ ID NO: 1911 - protein, 832 aa, Homo sapiens
MKPPGSSSRQPPLAGCSLAGASCGPQRGPAGSVPASAPARTPPCRLLLVLLLLPPLAASSRPRAWGAAAPSAPHWNETAEKNLGVLADEDNTLQQNSSSNISYSNAMQKEITLPSRLIYYINQDSESPYHVLDTKARHQQKHNKAVHLAQASFQIEAFGSKFILDLILNNGLLSSDYVEIHYENGKPQYSKGGEHCYYHGSIRGVKDSKVALSTCNGLHGMFEDDTFVYMIEPLELVHDEKSTGRPHIIQKTLAGQYSKQMKNLTMERGDQWPFLSELQWLKRRKRAVNPSRGIFEEMKYLELMIVNDHKTYKKHRSSHAHTNNFAKSVVNLVDSIYKEQLNTRVVLVAVETWTEKDQIDITTNPVQMLHEFSKYRQRIKQHADAVHLISRVTFHYKRSSLSYFGGVCSRTRGVGVNEYGLPMAVAQVLSQSLAQNLGIQWEPSSRKPKCDCTESWGGCIMEETGVSHSRKFSKCSILEYRDFLQRGGGACLFNRPTKLFEPTECGNGYVEAGEECDCGFHVECYGLCCKKCSLSNGAHCSDGPCCNNTSCLFQPRGYECRDAVNECDITEYCTGDSGQCPPNLHKQDGYACNQNQGRCYNGECKTRDNQCQYIWGTKAAGSDKFCYEKLNTEGTEKGNCGKDGDRWIQCSKHDVFCGFLLCTNLTRAPRIGQLQGEIIPTSFYHQGRVIDCSGAHVVLDDDTDVGYVEDGTPCGPSMMCLDRKCLQIQALNMSSCPLDSKGKVCSGHGVCSNEATCICDFTWAGTDCSIRDPVRNLHPPKDEGPKGPSATNLIIGSIAGAILVAAIVLGGTGWGFKNVKKRRFDPTQQGPI

SEQ ID NO: 1912 - protein, 2098 aa, Homo sapiens
MATDDKTSPTLDSANDLPRSPTSPSHLTHFKPLTPDQDEPPFKSAYSSFVNLFRFNKERAEGGQGEQQPLSGSWTSPQLPSRTQSVRSPTPYKKQLNEELQRRSSALDTRRKAEPTFGGHDPRTAVQLRSLSTVLKRLKEIMEGKSQDSDLKQYWMPDSQCKECYDCSEKFTTFRRRHHCRLCGQIFCSRCCNQEIPGKFMGYTGDLRACTYCRKIALSYAHSTDSNSIGEDLNALSDSACSVSVLDPSEPRTPVGSRKASRNIFLEDDLAWQSLIHPDSSNTPLSTRLVSVQEDAGKSPARNRSASITNLSLDRSGSPMVPSYETSVSPQANRTYVRTETTEDERKILLDSVQLKDLWKKICHHSSGMEFQDHRYWLRTHPNCIVGKELVNWLIRNGHIATRAQAIAIGQAMVDGRWLDCVSHHDQLFRDEYALYRPLQSTEFSETPSPDSDSVNSVEGHSEPSWFKDIKFDDSDTEQIAEEGDDNLANSASPSKRTSVSSFQSTVDSDSAASISLNVELDNVNFHIKKPSKYPHVPPHPADQKEYLISDTGGQQLSISDAFIKESLFNRRVEEKSKELPFTPLGWHHNNLELLREENGEKQAMERLLSANHNHMMALLQQLLHSDSLSSSWRDIIVSLVCQVVQTVRPDVKNQDDDMDIRQFVHIKKIPGGKKFDSVVVNGFVCTKNIAHKKMSSCIKNPKILLLKCSIEYLYREETKFTCIDPIVLQEREFLKNYVQRIVDVRPTLVLVEKTVSRIAQDMLLEHGITLVINVKSQVLERISRMTQGDLVMSMDQLLTKPHLGTCHKFYMQIFQLPNEQTKTLMFFEGCPQHLGCTIKLRGGSDYELARVKEILIFMICVAYHSQLEISFLMDEFAMPPTLMQNPSFHSLIEGRGHEGAVQEQYGGGSIPWDPDIPPESLPCDDSSLLELRIVFEKGEQENKNLPQAVASVKHQEHSTTACPAGLPCAFFAPVPESLLPLPVDDQQDALGSEQPETLQQTVVLQDPKSQIRAFRDPLQDDTGLYVTEEVTSSEDKRKTYSLAFKQELKDVILCISPVITFREPFLLTEKGMRCSTRDYFAEQVYWSPLLNKEFKEMENRRKKQLLRDLSGLQGMNGSIQAKSIQVLPSHELVSTRIAEHLGDSQSLGRMLADYRARGGRIQPKNSDPFAHSKDASSTSSGQSGSKNEGDEERGLILSDAVWSTKVDCLNPINHQRLCVLFSSSSAQSSNAPSACVSPWIVTMEFYGKNDLTLGIFLERYCFRPSYQCPSMFCDTPMVHHIRRFVHGQGCVQIILKELDSPVPGYQHTILTYSWCRICKQVTPVVALSNESWSMSFAKYLELRFYGHQYTRRANAEPCGHSIHHDYHQYFSYNQMVASFSYSPIRLLEVCVPLPKIFIKRQAPLKVSLLQDLKDFFQKVSQVYVAIDERLASLKTDTFSKTREEKMEDIFAQKEMEEGEFKNWIEKMQARLMSSSVDTPQQLQSVFESLIAKKQSLCEVLQAWNNRLQDLFQQEKGRKRPSVPPSPGRLRQGEESKISAMDASPRNISPGLQNGEKEDRFLTTLSSQSSTSSTHLQLPTPPEVMSEQSVGGPPELDTASSSEDVFDGHLLGSTDSQVKEKSTMKAIFANLLPGNSYNPIPFPFDPDKHYLMYEHERVPIAVCEKEPSSIIAFALSCKEYRNALEELSKATQWNSAEEGLPTNSTSDSRPKSSSPIRLPEMSGGQTNRTTETEPQPTKKASGMLSFFRGTAGKSPDLSSQKRETLRGADSAYYQVGQTGKEGTENQGVEPQDEVDGGDTQKKQLINPHVELQFSDANAKFYCRLYYAGEFHKMREVILDSSEEDFIRSLSHSSPWQARGGKSGAAFYATEDDRFILKQMPRLEVQSFLDFAPHYFNYITNAVQQKRPTALAKILGVYRIGYKNSQNNTEKKLDLLVMENLFYGRKMAQVFDLKGSLRNRNVKTDTGKESCDVVLLDENLLKMVRDNPLYIRSHSKAVLRTSIHSDSHFLSSHLIIDYSLLVGRDDTSNELVVGIIDYIRTFTWDKKLEMVVKSTGILGGQGKMPTVVSPELYRTRFCEAMDKYFLMVPDHWTGLGLNC

SEQ ID NO: 1913 - protein, 602 aa, Homo sapiens
MHSKVTIICIRFLFWFLLLCMLIGKSHTEDDIIIATKNGKVRGMNLTVFGGTVTAFLGIPYAQPPLGRLRFKKPQSLTKWSDIWNATKYANSCCQNIDQSFPGFHGSEMWNPNTDLSEDCLYLNVWIPAPKPKNATVLIWIYGGGFQTGTSSLHVYDGKFLARVERVIVVSMNYRVGALGFLALPGNPEAPGNMGLFDQQLALQWVQKNIAAFGGNPKSVTLFGESAGAASVSLHLLSPGSHSLFTRAILQSGSFNAPWAVTSLYEARNRTLNLAKLTGCSRENETEIIKCLRNKDPQEILLNEAFVVPYGTPLSVNFGPTVDGDFLTDMPDILLELGQFKKTQILVGVNKDEGTAFLVYGAPGFSKDNNSIITRKEFQEGLKIFFPGVSEFGKESILFHYTDWVDDQRPENYREALGDVVGDYNFICPALEFTKKFSEWGNNAFFYYFEHRSSKLPWPEWMGVMHGYEIEFVFGLPLERRDNYTKAEEILSRSIVKRWANFAKYGNPNETQNNSTSWPVFKSTEQKYLTLNTESTRIMTKLRAQQCRFWTSFFPKVLEMTGNIDEAEWEWKAGFHRWNNYMMDWKNQFNDYTSKKESCVGL

SEQ ID NO: 1914 - protein, 1827 aa, Homo sapiens
MARKKFSGLEISLIVLFVIVTIIAIALIVVLATKTPAVDEISDSTSTPATTRVTTNPSDSGKCPNVLNDPVNVRINCIPEQFPTEGICAQRGCCWRPWNDSLIPWCFFVDNHGYNVQDMTTTSIGVEAKLNRIPSPTLFGNDINSVLFTTQNQTPNRFRFKITDPNNRRYEVPHQYVKEFTGPTVSDTLYDVKVAQNPFSIQVIRKSNGKTLFDTSIGPLVYSDQYLQISTRLPSDYIYGIGEQVHKRFRHDLSWKTWPIFTRDQLPGDNNNNLYGHQTFFMCIEDTSGKSFGVFLMNSNAMEIFIQPTPIVTYRVTGGILDFYILLGDTPEQVVQQYQQLVGLPAMPAYWNLGFQLSRWNYKSLDVVKEVVRRNREAGIPFDTQVTDIDYMEDKKDFTYDQVAFNGLPQFVQDLHDHGQKYVIILDPAISIGRRANGTTYATYERGNTQHVWINESDGSTPIIGEVWPGLTVYPDFTNPNCIDWWANECSIFHQEVQYDGLWIDMNEVSSFIQGSTKGCNVNKLNYPPFTPDILDKLMYSKTICMDAVQNWGKQYDVHSLYGYSMAIATEQAVQKVFPNKRSFILTRSTFAGSGRHAAHWLGDNTASWEQMEWSITGMLEFSLFGIPLVGADICGFVAETTEELCRRWMQLGAFYPFSRNHNSDGYEHQDPAFFGQNSLLVKSSRQYLTIRYTLLPFLYTLFYKAHVFGETVARPVLHEFYEDTNSWIEDTEFLWGPALLITPVLKQGADTVSAYIPDAIWYDYESGAKRPWRKQRVDMYLPADKIGLHLRGGYIIPIQEPDVTTTASRKNPLGLIVALGENNTAKGDFFWDDGETKDTIQNGNYILYTFSVSNNTLDIVCTHSSYQEGTTLAFQTVKILGLTDSVTEVRVAENNQPMNAHSNFTYDASNQVLLIADLKLNLGRNFSVQWNQIFSENERFNCYPDADLATEQKCTQRGCVWRTGSSLSKAPECYFPRQDNSYSVNSARYSSMGITADLQLNTANARIKLPSDPISTLRVEVKYHKNDMLQFKIYDPQKKRYEVPVPLNIPTTPISTYEDRLYDVEIKENPFGIQIRRRSSGRVIWDSWLPGFAFNDQFIQISTRLPSEYIYGFGEVEHTAFKRDLNWNTWGMFTRDQPPGYKLNSYGFHPYYMALEEEGNAHGVFLLNSNAMDVTFQPTPALTYRTVGGILDFYMFLGPTPEVATKQYHEVIGHPVMPAYWALGFQLCRYGYANTSEVRELYDAMVAANIPYDVQYTDIDYMERQLDFTIGEAFQDLPQFVDKIRGEGMRYIIILDPAISGNETKTYPAFERGQQNDVFVKWPNTNDICWAKVWPDLPNITIDKTLTEDEAVNASRAHVAFPDFFRTSTAEWWAREIVDFYNEKMKFDGLWIDMNEPSSFVNGTTTNQCRNDELNYPPYFPELTKRTDGLHFRTICMEAEQILSDGTSVLHYDVHNLYGWSQMKPTHDALQKTTGKRGIVISRSTYPTSGRWGGHWLGDNYARWDNMDKSIIGMMEFSLFGMSYTGADICGFFNNSEYHLCTRWMQLGAFYPYSRNHNIANTRRQDPASWNETFAEMSRNILNIRYTLLPYFYTQMHEIHANGGTVIRPLLHEFFDEKPTWDIFKQFLWGPAFMVTPVLEPYVQTVNAYVPNARWFDYHTGKDIGVRGQFQTFNASYDTINLHVRGGHILPCQEPAQNTFYSRQKHMKLIVAADDNQMAQGSLFWDDGESIDTYERDLYLSVQFNLNQTTLTSTILKRGYINKSETRLGSLHVWGKGTTPVNAVTLTYNGNKNSLPFNEDTTNMILRIDLTTHNVTLEEPIEINWS

SEQ ID NO: 1915 - protein, 406 aa, Homo sapiens
MAAAVRQDLAQLMNSSGSHKDLAGKYRQILEKAIQLSGAEQLEALKAFVEAMVNENVSLVISRQLLTDFCTHLPNLPDSTAKEIYHFTLEKIQPRVISFEEQVASIRQHLASIYEKEEDWRNAAQVLVGIPLETGQKQYNVDYKLETYLKIARLYLEDDDPVQAEAYINRASLLQNESTNEQLQIHYKVCYARVLDYRRKFIEAAQRYNELSYKTIVHESERLEALKHALHCTILASAGQQRSRMLATLFKDERCQQLAAYGILEKMYLDRIIRGNQLQEFAAMLMPHQKATTADGSSILDRAVIEHNLLSASKLYNNITFEELGALLEIPAAKAEKIASQMITEGRMNGFIDQIDGIVHFETREALPTWDKQIQSLCFQVNNLLEKISQTAPEWTAQAMEAQMAQ

SEQ ID NO: 1916 - protein, 762 aa, Homo sapiens
MGNGSVKPKHSKHPDGHSGNLTTDALRNKVTELERELRRKDAEIQEREYHLKELREQLSKQTVAIAELTEELQNKCIQLNKLQDVVHMQGGSPLQASPDKVPLEVHRKTSGLVSLHSRRGAKAGVSAEPTTRTYDLNKPPEFSFEKARVRKDSSEKKLITDALNKNQFLKRLDPQQIKDMVECMYGRNYQQGSYIIKQGEPGNHIFVLAEGRLEVFQGEKLLSSIPMWTTFGELAILYNCTRTASVKAITNVKTWALDREVFQNIMRRTAQARDEQYRNFLRSVSLLKNLPEDKLTKIIDCLEVEYYDKGDYIIREGEEGSTFFILAKGKVKVTQSTEGHDQPQLIKTLQKGEYFGEKALISDDVRSANIIAEENDVACLVIDRETFNQTVGTFEELQKYLEGYVANLNRDDEKRHAKRSMSNWKLSKALSLEMIQLKEKVARFSSSSPFQNLEIIATLGVGGFGRVELVKVKNENVAFAMKCIRKKHIVDTKQQEHVYSEKRILEELCSPFIVKLYRTFKDNKYVYMLLEACLGGELWSILRDRGSFDEPTSKFCVACVTEAFDYLHRLGIIYRDLKPENLILDAEGYLKLVDFGFAKKIGSGQKTWTFCGTPEYVAPEVILNKGHDFSVDFWSLGILVYELLTGNPPFSGVDQMMTYNLILKGIEKMDFPRKITRRPEDLIRRLCRQNPTERLGNLKNGINDIKKHRWLNGFNWEGLKARSLPSPLQRELKGPIDHSYFDKYPPEKGMPPDELSGWDKDF

SEQ ID NO: 1917 - protein, 473 aa, Homo sapiens
MPQTPPFSAMFDSSGYNRNLYQSAEDSCGGLYYHDNNLLSGSLEALIQHLVPNVDYYPDRTYIFTFLLSSRLFMHPYELMAKVCHLCVEHQRLSDPDSDKNQMRKIAPKILQLLTEWTETFPYDFRDERMMRNLKDLAHRIASGEEQTYRKNVQQMMQCLIRKLAALSQYEEVLAKISSTSTDRLTVLKTKPQSIQRDIITVCNDPYTLAQQLTHIELERLNYIGPEEFVQAFVQKDPLDNDKSCYSERKKTRNLEAYVEWFNRLSYLVATEICMPVKKKHRARMIEYFIDVARECFNIGNFNSLMAIISGMNMSPVSRLKKTWAKVKTAKFDILEHQMDPSSNFYNYRTALRGAAQRSLTAHSSREKIVIPFFSLLIKDIYFLNEGCANRLPNGHVNFEKFWELAKQVSEFMTWKQVECPFERDRKILQYLLTVPVFSEDALYLASYESEGPENHIEKDRWKSLRSSLLGRV

SEQ ID NO: 1918 - protein, 969 aa, Homo sapiens
MVKLVLLSIVLLKVTVPKLSNDLLQLDFMPIHRGILAIAWSMADPELLLSCGKDAKILCSNPNTGEVLYELPTNTQWCFDIQWCPRNPAVLSAASFDGRISVYSIMGGSTDGLRQKQVDKLSSSFGNLDPFGTGQPLPPLQIPQQTAQHSIVLPLKKPPKWIRRPVGASFSFGGKLVTFENVRMPSHQGAEQQQQQHHVFISQVVTEKEFLSRSDQLQQAVQSQGFINYCQKKIDASQTEFEKNVWSFLKVNFEDDSRGKYLELLGYRKEDLGKKHIKEEKEESEFLPSSGGTFNISVSGDIDGLITQALLTGNFESAVDLCLHDNRMADAIILAIAGGQELLARTQKKYFAKSQSKITRLITAVVMKNWKEIVESCDLKNWREALAAVLTYAKPDEFSALCDLLGTRLENEGDSLLQTQACLCYICAGNVEKLVACWTKAQDGSHPLSLQDLIEKVVILRKAVQLTQAMDTSTVGVLLAAKMSQYANLLAAQGSIAAALAFLPDNTNQPNIMQLRDRLCRAQGEPVAGHESPKIPYEKQQLPKGRPGPVAGHHQMPRVQTQQYYPHVRIAPTVTTWSNKTPTALPSHPPAASPSDTQGENPPPPGFIMHGNVNPNAAGQLPTSPGHMHTQVPPYPQPQPYQPAQPYPFGTGGSAMYRPQQPVAPPTSNAYPNTPYISSASSYTGQSQLYAAQHQASSPTSSPATSFPPPPSSGASFQHGGPGAPPSSSAYALPPGTTGPQNGWNDPPALNRVPKKKKMPENFMPPVPITSPIMNPLGDPQSQMLQQQPSAPVPLSSQSSFPQPHLPGGQPFHGVQQPLGQTGMPPSFSKPNIEGAPGAPIGNTFQHVQSLPTKKITKKPIPDEHLILKTTFEDLIQRCLSSATDPQTKRKLDDASKRLEFLYDKLREQTLSPTITSGLHNIARSIETRNYSEGLTMHTHIVSTSNFSETSAFMPVLKVVLTQANKLGV

SEQ ID NO: 1919 - protein, 434 aa, Homo sapiens
MEGAELAGKILSTWLTLVLGFILLPSVFGVSLGISEIYMKILVKTLEWATIRIEKGTPKESILKNSASVGIIQRDESPMEKGLSGLRGRDFELSDVFYFSKKGLEAIVEDEVTQRFSSEELVSWNLLTRTNVNFQYISLRLTMVWVLGVIVRYCVLLPLRVTLAFIGISLLVIGTTLVGQLPDSSLKNWLSELVHLTCCRICVRALSGTIHYHNKQYRPQKGGICVANHTSPIDVLILTTDGCYAMVGQVHGGLMGIIQRAMVKACPHVWFERSEMKDRHLVTKRLKEHIADKKKLPILIFPEGTCINNTSVMMFKKGSFEIGGTIHPVAIKYNPQFGDAFWNSSKYNMVSYLLRMMTSWAIVCDVWYMPPMTREEGEDAVQFANRVKSAIAIQGGLTELPWDGGLKRAKVKDIFKEEQQKNYSKMIVGNGSLS

SEQ ID NO: 1920 - protein, 768 aa, Homo sapiens
MSNLSKGTGSRKDTKMRIRAFPMTMDEKYVNSIWDLLKNAIQEIQRKNNSGLSFEELYRNAYTMVLHKHGEKLYTGLREVVTEHLINKVREDVLNSLNNNFLQTLNQAWNDHQTAMVMIRDILMYMDRVYVQQNNVENVYNLGLIIFRDQVVRYGCIRDHLRQTLLDMIARERKGEVVDRGAIRNACQMLMILGLEGRSVYEEDFEAPFLEMSAEFFQMESQKFLAENSASVYIKKVEARINEEIERVMHCLDKSTEEPIVKVVERELISKHMKTIVEMENSGLVHMLKNGKTEDLGCMYKLFSRVPNGLKTMCECMSSYLREQGKALVSEEGEGKNPVDYIQGLLDLKSRFDRFLLESFNNDRLFKQTIAGDFEYFLNLNSRSPEYLSLFIDDKLKKGVKGLTEQEVETILDKAMVLFRFMQEKDVFERYYKQHLARRLLTNKSVSDDSEKNMISKLKTECGCQFTSKLEGMFRDMSISNTTMDEFRQHLQATGVSLGGVDLTVRVLTTGYWPTQSATPKCNIPPAPRHAFEIFRRFYLAKHSGRQLTLQHHMGSADLNATFYGPVKKEDGSEVGVGGAQVTGSNTRKHILQVSTFQMTILMLFNNREKYTFEEIQQETDIPERELVRALQSLACGKPTQRVLTKEPKSKEIENGHIFTVNDQFTSKLHRVKIQTVAAKQGESDPERKETRQKVDDDRKHEIEAAIVRIMKSRKKMQHNVLVAEVTQQLKARFLPSPVVIKKRIEGLIEREYLARTPEDRKVYTYVA

SEQ ID NO: 1921 - protein, 619 aa, Homo sapiens
MYGFVNHALELLVIRNYGPEVWEDIKKEAQLDEEGQFLVRIIYDDSKTYDLVAAASKVLNLNAGEILQMFGKMFFVFCQESGYDTILRVLGSNVREFLQNLDALHDHLATIYPGMRAPSFRCTDAEKGKGLILHYYSEREGLQDIVIGIIKTVAQQIHGTEIDMKVIQQRNEECDHTQFLIEEKESKEEDFYEDLDRFEENGTQESRISPYTFCKAFPFHIIFDRDLVVTQCGNAIYRVLPQLQPGNCSLLSVFSLVRPHIDISFHGILSHINTVFVLRSKEGLLDVEKLECEDELTGTEISCLRLKGQMIYLPEADSILFLCSPSVMNLDDLTRRGLYLSDIPLHDATRDLVLLGEQFREEYKLTQELEILTDRLQLTLRALEDEKKKTDTLLYSVLPPSVANELRHKRPVPAKRYDNVTILFSGIVGFNAFCSKHASGEGAMKIVNLLNDLYTRFDTLTDSRKNPFVYKVETVGDKYMTVSGLPEPCIHHARSICHLALDMMEIAGQVQVDGESVQITIGIHTGEVVTGVIGQRMPRYCLFGNTVNLTSRTETTGEKGKINVSEYTYRCLMSPENSDPQFHLEHRGPVSMKGKKEPMQVWFLSRKNTGTEETKQDDD

SEQ ID NO: 1922 - protein, 883 aa, Homo sapiens
MQKIMHISVLLSPVLWGLIFGVSSNSIQIGGLFPRGADQEYSAFRVGMVQFSTSEFRLTPHIDNLEVANSFAVTNAFCSQFSRGVYAIFGFYDKKSVNTITSFCGTLHVSFITPSFPTDGTHPFVIQMRPDLKGALLSLIEYYQWDKFAYLYDSDRGLSTLQAVLDSAAEKKWQVTAINVGNINNDKKDEMYRSLFQDLELKKERRVILDCERDKVNDIVDQVITIGKHVKGYHYIIANLGFTDGDLLKIQFGGANVSGFQIVDYDDSLVSKFIERWSTLEEKEYPGAHTTTIKYTSALTYDAVQVMTEAFRNLRKQRIEISRRGNAGDCLANPAVPWGQGVEIERALKQVQVEGLSGNIKFDQNGKRINYTINIMELKTNGPRKIGYWSEVDKMVVTLTELPSGNDTSGLENKTVVVTTILESPYVMMKKNHEMLEGNERYEGYCVDLAAEIAKHCGFKYKLTIVGDGKYGARDADTKIWNGMVGELVYGKADIAIAPLTITLVREEVIDFSKPFMSLGISIMIKKPQKSKPGVFSFLDPLAYEIWMCIVFAYIGVSVVLFLVSRFSPYEWHTEEFEDGRETQSSESTNEFGIFNSLWFSLGAFMQQGCDISPRSLSGRIVGGVWWFFTLIIISSYTANLAAFLTVERMVSPIESAEDLSKQTEIAYGTLDSGSTKEFFRRSKIAVFDKMWTYMRSAEPSVFVRTTAEGVARVRKSKGKYAYLLESTMNEYIEQRKPCDTMKVGGNLDSKGYGIATPKGSSLRNAVNLAVLKLNEQGLLDKLKNKWWYDKGECGSGGGDSKEKTSALSLSNVAGVFYILVGGLGLAMLVALIEFCYKSRAEAKRMKVAKNAQNINPSSSQNSQNFATYKEGYNVYGIESVKI

SEQ ID NO: 1923 - protein, 497 aa, Homo sapiens
MKFLLTTAFLILISLWVEEAYSKEKSSKKGKGKKKQYLCPSQQSAEDLARVPANSTSNILNRLLVSYDPRIRPNFKGIPVDVVVNIFINSFGSIQETTMDYRVNIFLRQKWNDPRLKLPSDFRGSDALTVDPTMYKCLWKPDLFFANEKSANFHDVTQENILLFIFRDGDVLVSMRLSITLSCPLDLTLFPMDTQRCKMQLESFGYTTDDLRFIWQSGDPVQLEKIALPQFDIKKEDIEYGNCTKYYKGTGYYTCVEVIFTLRRQVGFYMMGVYAPTLLIVVLSWLSFWINPDASAARVPLGIFSVLSLASECTTLAAELPKVSYVKALDVWLIACLLFGFASLVEYAVVQVMLNNPKRVEAEKARIAKAEQADGKGGNVAKKNTVNGTGTPVHISTLQVGETRCKKVCTSKSDLRSNDFSIVGSLPRDFELSNYDCYGKPIEVNNGLGKSQAKNNKKPPPAKPVIPTAAKRIDLYARALFPFCFLFFNVIYWSIYL

SEQ ID NO: 1924 - protein, 1499 aa, Homo sapiens
MKPLAIPANHGVMGQQEKHSLPADFTKLHLTDSLHPQVTHVSSSHSGCSITSDSGSSSLSDIYQATESEAGDMDLSGLPETAVDSEDDDDEEDIERASDPLMSRDIVRDCLEKDPIDRTDDDIEQLLEFMHQLPAFANMTMSVRRELCAVMVFAVVERAGTIVLNDGEELDSWSVILNGSVEVTYPDGKAEILCMGNSFGVSPTMDKEYMKGVMRTKVDDCQFVCIAQQDYCRILNQVEKNMQKVEEEGEIVMVKEHRELDRTGTRKGHIVIKGTSERLTMHLVEEHSVVDPTFIEDFLLTYRTFLSSPMEVGKKLLEWFNDPSLRDKVTRVVLLWVNNHFNDFEGDPAMTRFLEEFENNLEREKMGGHLRLLNIACAAKAKRRLMTLTKPSREAPLPFILLGGSEKGFGIFVDSVDSGSKATEAGLKRGDQILEVNGQNFENIQLSKAMEILRNNTHLSITVKTNLFVFKELLTRLSEEKRNGAPHLPKIGDIKKASRYSIPDLAVDVEQVIGLEKVNKKSKANTVGGRNKLKKILDKTRISILPQKPYNDIGIGQSQDDSIVGLRQTKHIPTALPVSGTLSSSNPDLLQSHHRILDFSATPDLPDQVLRVFKADQQSRYIMISKDTTAKEVVIQAIREFAVTATPDQYSLCEVSVTPEGVIKQRRLPDQLSKLADRIQLSGRYYLKNNMETETLCSDEDAQELLRESQISLLQLSTVEVATQLSMRNFELFRNIEPTEYIDDLFKLRSKTSCANLKRFEEVINQETFWVASEILRETNQLKRMKIIKHFIKIALHCRECKNFNSMFAIISGLNLAPVARLRTTWEKLPNKYEKLFQDLQDLFDPSRNMAKYRNVLNSQNLQPPIIPLFPVIKKDLTFLHEGNDSKVDGLVNFEKLRMIAKEIRHVGRMASVNMDPALMFRTRKKKWRSLGSLSQGSTNATVLDVAQTGGHKKRVRRSSFLNAKKLYEDAQMARKVKQYLSNLELEMDEESLQTLSLQCEPATNTLPKNPGDKKPVKSETSPVAPRAGSQQKAQSLPQPQQQPPPAHKINQGLQVPAVSLYPSRKKVPVKDLPPFGINSPQALKKILSLSEEGSLERHKKQAEDTISNASSQLSSPPTSPQSSPRKGYTLAPSGTVDNFSDSGHSEISSRSSIVSNSSFDSVPVSLHDERRQRHSVSIVETNLGMGRMERRTMIEPDQYSLGSYAPMSEGRGLYATATVISSPSTEELSQDQGDRASLDAADSGRGSWTSCSSGSHDNIQTIQHQRSWETLPFGHTHFDYSGDPAGLWASSSHMDQIMFSDHSTKYNRQNQSRESLEQAQSRASWASSTGYWGEDSEGDTGTIKRRGGKDVSIEAESSSLTSVTTEETKPVPMPAHIAVASSTTKGLIARKEGRYREPPPTPPGYIGIPITDFPEGHSHPARKPPDYNVALQRSRMVARSSDTAGPSSVQQPHGHPTSSRPVNKPQWHKPNESDPRLAPYQSQGFSTEEDEDEQVSAV

SEQ ID NO: 1925 - protein, 574 aa, Homo sapiens
MEPNSLRTKVPAFLSDLGKATLRGIRKCPRCGTYNGTRGLSCKNKTCGTIFRYGARKQPSVEAVKIITGSDLQVYSVRQRDRGPDYRCFVELGVSETTIQTVDGTIITQLSSGRCYVPSCLKAATQGVVENQCQHIKLAVNCQAEATPLTLKSSVLNAMQASPETKQTIWQLATEPTGPLVQRITKNILVVKCKASQKHSLGYLHTSFVQKVSGKSLPERRFFCSCQTLKSHKSNASKDETAQRCIHFFACICAFASDETLAQEFSDFLNFDSSGLKEIIVPQLGCHSESTVSACESTASKSKKRRKDEVSGAQMNSSLLPQDAVSSNLRKSGLKKPVVASSLKRQACGQLLDEAQVTLSFQDWLASVTERIHQTMHYQFDGKPEPLVFHIPQSFFDALQQRISIGSAKKRLPNSTTAFVRKDALPLGTFSKYTWHITNILQVKQILDTPEMPLEITRSFIQNRDGTYELFKCPKVEVESIAETYGRIEKQPVLRPLELKTFLKVGNTSPDQKEPTPFIIEWIPDILPQSKIGELRIKFEYGHHRNGHVAEYQDQRPPLDQPLELAPLTTITFP

SEQ ID NO: 1926 - protein, 726 aa, Homo sapiens
MSEETVPEAASPPPPQGQPYFDRFSEDDPEYMRLRNRAADLRQDFNLMEQKKRVTMILQSPSFREELEGLIQEQMKKGNNSSNIWALRQIADFMASTSHAVFPTSSMNVSMMTPINDLHTADSLNLAKGERLMRCKISSVYRLLDLYGWAQLSDTYVTLRVSKEQDHFLISPKGVSCSEVTASSLIKVNILGEVVEKGSSCFPVDTTGFCLHSAIYAARPDVRCIIHLHTPATAAVSAMKWGLLPVSHNALLVGDMAYYDFNGEMEQEADRINLQKCLGPTCKILVLRNHGVVALGDTVEEAFYKIFHLQAACEIQVSALSSAGGVENLILLEQEKHRPHEVGSVQWAGSTFGPMQKSRLGEHEFEALMRMLDNLGYRTGYTYRHPFVQEKTKHKSEVEIPATVTAFVFEEDGAPVPALRQHAQKQQKEKTRWLNTPNTYLRVNVADEVQRSMGSPRPKTTWMKADEVEKSSSGMPIRIENPNQFVPLYTDPQEVLEMRNKIREQNRQDVKSAGPQSQLLASVIAEKSRSPSTESQLMSKGDEDTKDDSEETVPNPFSQLTDQELEEYKKEVERKKLELDGEKETAPEEPGSPAKSAPASPVQSPAKEAETKSPLVSPSKSLEEGTKKTETSKAATTEPETTQPEGVVVNGREEEQTAEEILSKGLSQMTTSADTDVDTSKDKTESVTSGPMSPEGSPSKSPSKKKKKFRTPSFLKKSKKKEKVES

SEQ ID NO: 1927 - protein, 293 aa, Homo sapiens
MGRVVAELVSSLLGLWLLLCSCGCPEGAELRAPPDKIAIIGAGIGGTSAAYYLRQKFGKDVKIDLFEREEVGGRLATMMVQGQEYEAGGSVIHPLNLHMKRFVKDLGLSAVQASGGLLGIYNGETLVFEESNWFIINVIKLVWRYGFQSLRMHMWVEDVLDKFMRIYRYQSHDYAFSSVEKLLHALGGDDFLGMLNRTLLETLQKAGFSEKFLNEMIAPVMRVNYGQSTDINAFVGAVSLSCSDSGLWAVEGGNKLVCSGLLQASKSNLISGSVMYIEEKTKTKYTVLGLCPL

SEQ ID NO: 1928 - protein, 221 aa, Homo sapiens
MAAAVRMNIQMLLEAADYLERREREAEHGYASMLPYNNKDRDALKRRNKSKKNNSSSRSTHNEMEKNRRAHLRLCLEKLKGLVPLGPESSRHTTLSLLTKAKLHIKKLEDCDRKAVHQIDQLQREQRHLKRQLEKLGIERIRMDSIGSTVSSERSDSDREEIDVDVESTDYLTGDLDWSSSSVSDSDERGSMQSLGSDEGYSSTSIKRIKLQDSHKACLGL

SEQ ID NO: 1929 - protein, 1978 aa, Homo sapiens
MSRPRFNPRGDFPLQRPRAPNPSGMRPPGPFMRPGSMGLPRFYPAGRARGIPHRFAGHESYQNMGPQRMNVQVTQHRTDPRLTKEKLDFHEAQQKKGKPHGSRWDDEPHISASVAVKQSSVTQVTEQSPKVQSRYTKESASSILASFGLSNEDLEELSRYPDEQLTPENMPLILRDIRMRKMGRRLPNLPSQSRNKETLGSEAVSSNVIDYGHASKYGYTEDPLEVRIYDPEIPTDEVENEFQSQQNISASVPNPNVICNSMFPVEDVFRQMDFPGESSNNRSFFSVESGTKMSGLHISGGQSVLEPIKSVNQSINQTVSQTMSQSLIPPSMNQQPFSSELISSVSQQERIPHEPVINSSNVHVGSRGSKKNYQSQADIPIRSPFGIVKASWLPKFSHADAQKMKRLPTPSMMNDYYAASPRIFPHLCSLCNVECSHLKDWIQHQNTSTHIESCRQLRQQYPDWNPEILPSRRNEGNRKENETPRRRSHSPSPRRSRRSSSSHRFRRSRSPMHYMYRPRSRSPRICHRFISRYRSRSRSRSPYRIRNPFRGSPKCFRSVSPERMSRRSVRSSDRKKALEDVVQRSGHGTEFNKQKHLEAADKGHSPAQKPKTSSGTKPSVKPTSATKSDSNLGGHSIRCKSKNLEDDTLSECKQVSDKAVSLQRKLRKEQSLHYGSVLLITELPEDGCTEEDVRKLFQPFGKVNDVLIVPYRKEAYLEMEFKEAITAIMKYIETTPLTIKGKSVKICVPGKKKAQNKEVKKKTLESKKVSASTLKRDADASKAVEIVTSTSAAKTGQAKASVAKVNKSTGKSASSVKSVVTVAVKGNKASIKTAKSGGKKSLEAKKTGNVKNKDSNKPVTIPENSEIKTSIEVKATENCAKEAISDAALEATENEPLNKETEEMCVMLVSNLPNKGYSVEEVYDLAKPFGGLKDILILSSHKKAYIEINRKAAESMVKFYTCFPVLMDGNQLSISMAPENMNIKDEEAIFITLVKENDPEANIDTIYDRFVHLDNLPEDGLQCVLCVGLQFGKVDHHVFISNRNKAILQLDSPESAQSMYSFLKQNPQNIGDHMLTCSLSPKIDLPEVQIEHDPELEKESPGLKNSPIDESEVQTATDSPSVKPNELEEESTPSIQTETLVQQEEPCEEEAEKATCDSDFAVETLELETQGEEVKEEIPLVASASVSIEQFTENAEECALNQQMFNSDLEKKGAEIINPKTALLPSDSVFAEERNLKGILEESPSEAEDFISGITQTMVEAVAEVEKNETVSEILPSTCIVTLVPGIPTGDEKTVDKKNISEKKGNMDEKEEKEFNTKETRMDLQIGTEKAEKNEGRMDAEKVEKMAAMKEKPAENTLFKAYPNKGVGQANKPDETSKTSILAVSDVSSSKPSIKAVIVSSPKAKATVSKTENQKSFPKSVPRDQINAEKKLSAKEFGLLKPTSARSGLAESSSKFKPTQSSLTRGGSGRISALQGKLSKLDYRDITKQSQETEARPSIMKRDDSNNKTLAEQNTKNPKSTTGRSSKSKEEPLFPFNLDEFVTVDEVIEEVNPSQAKQNPLKGKRKETLKNVPFSELNLKKKKGKTSTPRGVEGELSFVTLDEIGEEEDAAAHLAQALVTVDEVIDEEELNMEEMVKNSNSLFTLDELIDQDDCISHSEPKDVTVLSVAEEQDLLKQERLVTVDEIGEVEELPLNESADITFATLNTKGNEGDTVRDSIGFISSQVPEDPSTLVTVDEIQDDSSDLHLVTLDEVTEEDEDSLADFNNLKEELNFVTVDEVGEEEDGDNDLKVELAQSKNDHPTDKKGNRKKRAVDTKKTKLESLSQVGPVNENVMEEDLKTMIERHLTAKTPTKRVRIGKTLPSEKAVVTEPAKGEEAFQMSEVDEESGLKDSEPERKRKKTEDSSSGKSVASDVPEELDFLVPKAGFFCPICSLFYSGEKAMTNHCKSTRHKQNTEKFMAKQRKEKEQNEAEERSSR

SEQ ID NO: 1930 - protein, 1149 aa, Homo sapiens
MPTMRRTVSEIRSRAEGYEKTDDVSEKTSLADQEEVRTIFINQPQLTKFCNNHVSTAKYNIITFLPRFLYSQFRRAANSFFLFIALLQQIPDVSPTGRYTTLVPLLFILAVAAIKEIIEDIKRHKADNAVNKKQTQVLRNGAWEIVHWEKVNVGDIVIIKGKEYIPADTVLLSSSEPQAMCYIETSNLDGETNLKIRQGLPATSDIKDVDSLMRISGRIECESPNRHLYDFVGNIRLDGHGTVPLGADQILLRGAQLRNTQWVHGIVVYTGHDTKLMQNSTSPPLKLSNVERITNVQILILFCILIAMSLVCSVGSAIWNRRHSGKDWYLNLNYGGASNFGLNFLTFIILFNNLIPISLLVTLEVVKFTQAYFINWDLDMHYEPTDTAAMARTSNLNEELGQVKYIFSDKTGTLTCNVMQFKKCTIAGVAYGQNSQFGDEKTFSDSSLLENLQNNHPTAPIICEFLTMMAVCHTAVPEREGDKIIYQAASPDEGALVRAAKQLNFVFTGRTPDSVIIDSLGQEERYELLNVLEFTSARKRMSVIVRTPSGKLRLYCKGADTVIYDRLAETSKYKEITLKHLEQFATEGLRTLCFAVAEISESDFQEWRAVYQRASTSVQNRLLKLEESYELIEKNLQLLGATAIEDKLQDQVPETIETLMKADIKIWILTGDKQETAINIGHSCKLLKKNMGMIVINEGSLDGTRETLSRHCTTLGDALRKENDFALIIDGKTLKYALTFGVRQYFLDLALSCKAVICCRVSPLQKSEVVEMVKKQVKVVTLAIGDGANDVSMIQTAHVGVGISGNEGLQAANSSDYSIAQFKYLKNLLMIHGAWNYNRVSKCILYCFYKNIVLYIIEIWFAFVNGFSGQILFERWCIGLYNVMFTAMPPLTLGIFERSCRKENMLKYPELYKTSQNALDFNTKVFWVHCLNGLFHSVILFWFPLKALQYGTAFGNGKTSDYLLLGNFVYTFVVITVCLKAGLETSYWTWFSHIAIWGSIALWVVFFGIYSSLWPAIPMAPDMSGEAAMLFSSGVFWMGLLFIPVASLLLDVVYKVIKRTAFKTLVDEVQELEAKSQDPGAVVLGKSLTERAQLLKNVFKKNHVNLYRSESLQQNLLHGYAFSQDENGIVSQSEVIRAYDTTKQRPDEW

SEQ ID NO: 1931 - protein, 568 aa, Homo sapiens
MLPGLAAAAAHRCSWSSLCRLRLRCRAAACNPSDRQEWQNLVTFGSFSNMVPCSHPYIGTLSQVKLYSTNVQKEGQGSQTLRVEKVPSFETAEGIGTELKAPLKQEPLQVRVKAVLKKREYGSKYTQNNFITGVRAINEFCLKSSDLEQLRKIRRRSPHEDTESFTVYLRSDVEAKSLEVWGSPEALAREKKLRKEAEIEYRERLFRNQKILREYRDFLGNTKPRSRTASVFFKGPGKVVMVAICINGLNCFFKFLAWIYTGSASMFSEAIHSLSDTCNQGLLALGISKSVQTPDPSHPYGFSNMRYISSLISGVGIFMMGAGLSWYHGVMGLLHPQPIESLLWAYCILAGSLVSEGATLLVAVNELRRNARAKGMSFYKYVMESRDPSTNVILLEDTAAVLGVIIAATCMGLTSITGNPLYDSLGSLGVGTLLGMVSAFLIYTNTEALLGRSIQPEQVQRLTELLENDPSVRAIHDVKATDLGLGKVRFKAEVDFDGRVVTRSYLEKQDFDQMLQEIQEVKTPEELETFMLKHGENIIDTLGAEVDRLEKELKKRNPEVRHVDLEIL

SEQ ID NO: 1932 - protein, 788 aa, Homo sapiens
MTIHQFLLLFLFWVCLPHFCSPEIMFRRTPVPQQRILSSRVPRSDGKILHRQKRGWMWNQFFLLEEYTGSDYQYVGKLHSDQDKGDGSLKYILSGDGAGTLFIIDEKTGDIHATRRIDREEKAFYTLRAQAINRRTLRPVEPESEFVIKIHDINDNEPTFPEEIYTASVPEMSVVGTSVVQVTATDADDPSYGNSARVIYSILQGQPYFSVEPETGIIRTALPNMNRENREQYQVVIQAKDMGGQMGGLSGTTTVNITLTDVNDNPPRFPQNTIHLRVLESSPVGTAIGSVKATDADTGKNAEVEYRIIDGDGTDMFDIVTEKDTQEGIITVKKPLDYESRRLYTLKVEAENTHVDPRFYYLGPFKDTTIVKISIEDVDEPPVFSRSSYLFEVHEDIEVGTIIGTVMARDPDSISSPIRFSLDRHTDLDRIFNIHSGNGSLYTSKPLDRELSQWHNLTVIAAEINNPKETTRVAVFVRILDVNDNAPQFAVFYDTFVCENARPGQLIQTISAVDKDDPLGGQKFFFSLAAVNPNFTVQDNEDNTARILTRKNGFNRHEISTYLLPVVISDNDYPIQSSTGTLTIRVCACDSQGNMQSCSAEALLLPAGLSTGALIAILLCIIILLVIVVLFAALKRQRKKEPLILSKEDIRDNIVSYNDEGGGEEDTQAFDIGTLRNPAAIEEKKLRRDIIPETLFIPRRTPTAPDNTDVRDFINERLKEHDLDPTAPPYDSLATYAYEGNDSIAESLSSLESGTTEGDQNYDYLREWGPRFNKLAEMYGGGESDKDS

SEQ ID NO: 1933 - protein, 275 aa, Homo sapiens
MGLSNILFVMAFLLSGAAPLKIQAYFNETADLPCQFANSQNQSLSELVVFWQDQENLVLNEVYLGKEKFDSVHSKYMGRTSFDSDSWTLRLHNLQIKDKGLYQCIIHHKKPTGMIRIHQMNSELSVLANFSQPEIVPISNITENVYINLTCSSIHGYPEPKKMSVLLRTKNSTIEYDGVMQKSQDNVTELYDVSISLSVSFPDVTSNMTIFCILETDKTRLLSSPFSIGTNTMEREESEQTKKREKIHIPERSDEAQRVFKSSKTSSCDKSDTCF

SEQ ID NO: 1934 - protein, 471 aa, Homo sapiens
MDGTETRQRRLDSCGKPGELGLPHPLSTGGLPVASEDGALRAPESQSVTPKPLETEPSRETTWSIGLQVTVPFMFAGLGLSWAGMLLDYFQANTGQIDDPQEQHRVISSNLALIQVQATVVGLLAAVAALLLGVVSREEVDVAKVELLCASSVLTAFLAAFALGVLMVCIVIGARKLGVNPDNIATPIAASLGDLITLSILALVSSFFYRHKDSRYLTPLVCLSFAALTPVWVLIAKQSPPIVKILKFGWFPIILAMVISSFGGLILSKTVSKQQYKGMAIFTPVICGVGGNLVAIQTSRISTYLHMWSAPGVLPLQMKKFWPNPCSTFCTSEINSMSARVLLLLVVPGHLIFFYIIYLVEGQSVINSQTFVVLYLLAGLIQVTILLYLAEVMVRLTWHQALDPDNHCIPYLTGLGDLLGSSSVGHTAAVPRRCTASPGWGLIQPFICTQHLIVSLLSFYFPFCLLAKTSI

SEQ ID NO: 1935 - protein, 1079 aa, Homo sapiens
MEDEAVLDRGASFLKHVCDEEEVEGHHTIYIGVHVPKSYRRRRRHKRKTGHKEKKEKERISENYSDKSDIENADESSSSILKPLISPAAERIRFILGEEDDSPAPPQLFTELDELLAVDGQEMEWKETARWIKFEEKVEQGGERWSKPHVATLSLHSLFELRTCMEKGSIMLDREASSLPQLVEMIVDHQIETGLLKPELKDKVTYTLLRKHRHQTKKSNLRSLADIGKTVSSASRMFTNPDNGSPAMTHRNLTSSSLNDISDKPEKDQLKNKFMKKLPRDAEASNVLVGEVDFLDTPFIAFVRLQQAVMLGALTEVPVPTRFLFILLGPKGKAKSYHEIGRAIATLMSDEVFHDIAYKAKDRHDLIAGIDEFLDEVIVLPPGEWDPAIRIEPPKSLPSSDKRKNMYSGGENVQMNGDTPHDGGHGGGGHGDCEELQRTGRFCGGLIKDIKRKAPFFASDFYDALNIQALSAILFIYLATVTNAITFGGLLGDATDNMQGVLESFLGTAVSGAIFCLFAGQPLTILSSTGPVLVFERLLFNFSKDNNFDYLEFRLWIGLWSAFLCLILVATDASFLVQYFTRFTEEGFSSLISFIFIYDAFKKMIKLADYYPINSNFKVGYNTLFSCTCVPPDPANISISNDTTLAPEYLPTMSSTDMYHNTTFDWAFLSKKECSKYGGNLVGNNCNFVPDITLMSFILFLGTYTSSMALKKFKTSPYFPTTARKLISDFAIILSILIFCVIDALVGVDTPKLIVPSEFKPTSPNRGWFVPPFGENPWWVCLAAAIPALLVTILIFMDQQITAVIVNRKEHKLKKGAGYHLDLFWVAILMVICSLMALPWYVAATVISIAHIDSLKMETETSAPGEQPKFLGVREQRVTGTLVFILTGLSVFMAPILKFIPMPVLYGVFLYMGVASLNGVQFMDRLKLLLMPLKHQPDFIYLRHVPLRRVHLFTFLQVLCLALLWILKSTVAAIIFPVMILALVAVRKGMDYLFSQHDLSFLDDVIPEKDKKKKEDEKKKKKKKGSLDSDNDDSDCPYSEKVPSIKIPMDIMEQQPFLSDSKPSDRERSPTFLERHTSC

SEQ ID NO: 1936 - protein, 288 aa, Homo sapiens
LVGVGGGDVEDVTPRPGGCQISGRGARGCNGIPGAAAWEAALPRRRPRRHPSVNPRSRAAGSPRTRGRRTEERPSGSRLGDRGRGRALPGGRLGGRGRGRAPERVGGRGRGRGTAAPRAAPAARGSRPGPAGTMAAGSITTLPALPEDGGSGAFPPGHFKDPKRLYCKNGGFFLRIHPDGRVDGVREKSDPHIKLQLQAEERGVVSIKGVCANRYLAMKEDGRLLASKCVTDECFFFERLESNNYNTYRSRKYTSWYVALKRTGQYKLGSKTGPGQKAILFLPMSAKS

SEQ ID NO: 1937 - protein, 715 aa, Homo sapiens
MDLILNRMDYLQVGVTSQKTMKLIPASRHRATQKVVIGDHDGVVMCFGMKKGEAAAVFKTLPGPKIARLELGGVINTPQEKIFIAAASEIRGFTKRGKQFLSFETNLTESIKAMHISGSDLFLSASYIYNHYCDCKDQHYYLSGDKINDVICLPVERLSRITPVLACQDRVLRVLQGSDVMYAVEVPGPPTVLALHNGNGGDSGEDLLFGTSDGKLALIQITTSKPVRKWEIQNEKKRGGILCIDSFDIVGDGVKDLLVGRDDGMVEVYSFDNANEPVLRFDQMLSESVTSIQGGCVGKDSYDEIVVSTYSGWVTGLTTEPIHKESGPGEELKINQEMQNKISSLRNELEHLQYKVLQERENYQQSSQSSKAKSAVPSFGINDKFTLNKDDASYSLILEVQTAIDNVLIQSDVPIDLLDVDKNSAVVSFSSCDSESNDNFLLATYRCQADTTRLELKIRSIEGQYGTLQAYVTPRIQPKTCQVRQYHIKPLSLHQRTHFIDHDRPMNTLTLTGQFSFAEVHSWVVFCLPEVPEKPPAGECVTFYFQNTFLDTQLESTYRKGEGVFKSDNISTISILKDVLSKEATKRKINLNISYEINEVSVKHTLKLIHPKLEYQLLLAKKVQLIDALKELQIHEGNTNFLIPEYHCILEEADHLQEEYKKQPAHLERLYGMITDLFIDKFKFKGTNVKTKVPLLLEILDSYDQNALISFFDAA

SEQ ID NO: 1938 - protein, 5005 aa, Homo sapiens
MDQRKNESIVPSITQLEDFLTEHNSNVVWLLVATILSCGWIIYLTYYNSRNVGLILTLVLNRLYKHGYIHIGSFSFSVLSGKVMVREIYYITEDMSIRIQDGFIIFRWWKMYNPKQKQHDPKAETRLYITVNDFEFHVYNRSDLYGRLQELFGLEPTIIPPKKDDDKTREIGRTRTQSKIERVKVKTESQDPTSSWRSLIPVIKVNVSTGRLAFGNHYQPQTLCINFDDAFLTYTTKPPSSHLDQFMHIVKGKLENVRVMLVPSPRYVGLQNDEPPRLMGEGFVVMQSNDVDIYYYMDEPGLVPEETEENIEGEMSSEDCKLQDLPPCWGLDIVCGKGTDFNYGPWADRQRDCLWKFFFPPDYQVLKVSEIAQPGRPRQILAFELRMNIIADATIDLLFTKNRETNAVHVNVGAGSYLEINIPMTVEENGYTPAIKGQLLHVDATTSMQYRTLLEAEMLAFHINASYPRIWNMPQTWQCELEVYKATYHFIFAQKNFFTDLIQDWSSDSPPDIFSFVPYTWNFKIMFHQFEMIWAANQHNWIDCSTKQQENVYLAACGETLNIDFSLPFTDFVPATCNTKFSLRGEDVDLHLFLPDCHPSKYSLFMLVKNCHPNKMIHDTGIPAECQSGQKTVKPKWRNVTQEKSGWVECWTVPSVMLTIDYTWHPIYPQKADEQLKQSLSEMEETMLSVLRPSQKTSDRVVSSPSTSSRPPIDPSELPPDKLHVEMELSPDSQITLYGPLLNAFLCIKENYFGEDDMYMDFEEVISSPVLSLSTSSSSGWTAVGMENDKKENEGSAKSIHPLALRPWDITVLVNLYKVHGRLPVHGTTDGPECPTAFLERLCFEMKKGFRETMLQLILSPLNVFVSDNYQQRPPVDEVLREGHINLSGLQLRAHAMFSAEGLPLGSDSLEYAWLIDVQAGSLTAKVTAPQLACLLEWGQTFVFHVVCREYELERPKSVIICQHGIDRRFCESKLSCIPGPCPTSDDLKYTMIRLAVDGADIYIVEHGCATNIKMGAIRVANCNLHNQSVGEGISAAIQDFQVRQYIEQLNNCRIGLQPAVLRRAYWLEAGSANLGLITVDIALAADHHSKHEAQRHFLETHDARTKRLWFLWPDDILKNKRCRNKCGCLGGCRFFGGTVTGLDFFKLEELTPSSSSAFSSTSAESDMYYGQSLLQPGEWIITKEIPKIIDGNVNGMKRKEWENKSVGIEVERKTQHLSLQVPLRSHSSSSSSEENSSSSAAQPLLAGEKESPSSVADDHLVQKEFLHGTKRDDGQASIPTEISGNSPVSPNTQDKSVGQSPLRSPLKRQASVCSTRLGSTKSLTAAFYGDKQPVTVGVQFSSDVSRSDENVLDSPKQRRSFGSFPYTPSADSNSFHQYRSMDSSMSMADSEAYFSAAEEFEPISSDEGPGTYPGRKKKKKQTQQIDYSRGSIYHSVEGPLTGHGESIQDSRTLPFKTHPSQASFVSALGGEDDVIEHLYIVEGEKTVESEQITPQQPVMNCYQTYLTQFQVINWSVKHPTNKRTSKSSLHRPLDLDTPTSEESSSSFEQLSVPTFKVIKQGLTANSLLDRGMQLSGSTSNTPYTPLEKKLADNTDDETLTEEWTLDQPVSQTRTTAIVEVKGTVDIVLTPLVAEALDRYIEAMVHCASTRHPAAIVDDLHAKVLREAVQNSKTTFSENLSSKQDIRGTKTEQSTIGTTNQGQAQTNLTMKQDNVTIKGLQTNVSIPKVNLCLLQASVEESPTTAPSRSVTHVSLVALCFDRIATQVRMNRGVVEETSNNAEPGRTSNFDRYVHATKMQPQSSGSLRSNAGAEKGKEIAAKLNIHRVHGQLRGLDTTDIGTCAITAIPFEKSKVLFTLEELDEFTFVDETDQQAVPDVTRIGPSQEKWGWIMFECGLENLTIKGGRQSGAVLYNSFGIMGKASDTERGGVLTSNNSSDSPTGSGYNTDVSDDNLPCDRTSPSSDLNGNSVSDEQDEGVESDDLKKDLPLMPPPPDSCSMKLTIKEIWFSFAAPTNVRSHTHAFSRQLNLLSTATPAVGAWLVPIDQLKSSLNKLETEGTLRICAVMGCIMTEALENKSVHFPLRSKYNRLTKVARFLQENPSCLLCNILHHYLHQANYSIIDDATMSDGLPALVTLKKGLVALARQWMKFIVVTPAFKGVSLHRPAQPLKPQIAMDHEHEDGLGLDNGGGLQSDTSADGAEFEFDAATVSEHTMLLEGTANRPPPGSSGPVTGAEIMRKLSKTHTHSDSALKIKGIHPYHSLSYTSGDTATDSPVHVGRAGMPVKDSPRKESLLSYLTGSFPSLHNLLEGTPQRSSAAVKSSSLTRTGNTVATDMLSEHPLLSEPSSVSFYNWMSNAVGNRGSVLQESPVTKSGHNSLPTGVAPNLPTIPSASDFNTVLSSDQNTLDGTHSQHSTSQDDVAGVEEANQGFPAVQLADAQVVFKPLLSHTGIQSQDTMPFCYRMYFGEHLSFSGTLDCLRADIVDSDTAKERKGKRARRQGHVNLPPLEFKPALMLGTFSISAVVMEKSVCTPQNSTSALSFHDLSKRYYNTFHCNFTISCQSISQHVDMALVRLIHQFSTMIDDIKATQTDIKLSRYTAGSASPTPTFKTRKHRDFRSSDFSRSSRGSLNGGNRVNNAKNKRTNNENNKKESRNKNSLGRSERRTSKVSRKGSKDVVDHMTIHMDDSDSITVSEQSEPSAECWQNMYKLLNFYSLISDPTGILEKSSETFGPAGVRSPTEPTCKVVFENEQDNSSLTKTQRKRSLVTSEPQHVTLIVFGIGMVNRTHLEADIGGLTMESELKRIHGSFTLKEKMKDVLHQKMTETCATAHIGGVNIVLLEGITPNIQLEDFPTSPTSTAKQEFLTVVKCSIAKSQALYSAQRGLKTNNAAVFKVGAISINIPQHPATLHSMMVRSSHQLSKQISDLIRQPSTAPQPVKEDIATPLPSEKTPTSVNQTPVETNEFPQLPEGLEKKPIVLKFSAMLDGIAIGAALLPSLKAEYKMGRMRSHGMTGAQTRFTFELPNHRLRFTSKVSATDMSTIPPSASLNLPPVTMSGKYIMEEHDSYSDQVWSIDELPSKQGYYLQGNYLRCVAEVGSFEHNLTTDLLNHLVFVQKVFMKEVNEVIQKVSGGEQPIPLWNEHDGTADGDKPKILLYSLNLQFKGIQVTATTPSMRAVRFETGLIELELSNRLQTKASPGSSSYLKLFGKCQVDLNLALGQIVKHQVYEEAGSDFHQVAYFKTRIGLRNALREEISGSSDREAVLITLNRPIVYAQPVAFDRAVLFWLNYKAAYDNWNEQRMALHKDIHMATKEVVDMLPGIQQTSAQAFGTLFLQLTVNDLGICLPITNTAQSNHTGDLDTGSALVLTIESTLITACSSESLVSKGHFKNFCIRFADGFETSWDDWKPEIHGDLVMNACVVPDGTYEVCSRTTGQAAAESSSAGTWTLNVLWKMCGIDVHMDPNIGKRLNALGNTLTTLTGEEDIDDIADLNSVNIADLSDEDEVDTMSPTIHTEATDYRRQAASASQPGELRGRKIMKRIVDIRELNEQAKVIDDLKKLGASEGTINQEIQRYQQLESVAVNDIRRDVRKKLRRSSMRAASLKDKWGLSYKPSYSRSKSISASGRPPLKRMERASSRVGETEELPEIRVDAASPGPRVTFNIQDTFPEETELDLLSVTIEGPSHYSSNSEGSCSVFSSPKTPGGFSPGIPFQTEEGRRDDSLSSTSEDSEKDEKDEDHERERFYIYRKPSHTSRKKATGFAAVHQLFTERWPTTPVNRSLSGTATERNIDFELDIRVEIDSGKCVLHPTTLLQEHDDISLRRSYDRSSRSLDQDSPSKKKKFQTNYASTTHLMTGKKVPSSLQTKPSDLETTVFYIPGVDVKLHYNSKTLKTESPNASRGSSLPRTLSKESKLYGMKDSATSPPSPPLPSTVQSKTNTLLPPQPPPIPAAKGKGSGGVKTAKLYAWVALQSLPEEMVISPCLLDFLEKALETIPITPVERNYTAVSSQDEDMGHFEIPDPMEESTTSLVSSSTSAYSSFPVDVVVYVRVQPSQIKFSCLPVSRVECMLKLPSLDLVFSSNRGELETLGTTYPAETLSPGGNATQSGTKTSASKTGIPGSSGLGSPLGRSRHSSSQSDLTSSSSSSSGLSFTACMSDFSLYVFHPYGAGKQKTAVSGLTPGSGGLGNVDEEPTSVTGRKDSLSINLEFVKVSLSRIRRSGGASFFESQSVSKSASKMDTTLINISAVCDIGSASFKYDMRRLSEILAFPRAWYRRSIARRLFLGDQTINLPTSGPGTPDSIEGVSQHLSPESSRKAYCKTWEQPSQSASFTHMPQSPNVFNEHMTNSTMSPGTVGQSLKSPASIRSRSVSDSSVPRRDSLSKTSTPFNKSNKAASQQGTPWETLVVFAINLKQLNVQMNMSNVMGNTTWTTSGLKSQGRLSVGSNRDREISMSVGLGRSQLDSKGGVVGGTIDVNALEMVAHISEHPNQQPSHKIQITMGSTEARVDYMGSSILMGIFSNADLKLQDEWKVNLYNTLDSSITDKSEIFVHGDLKWDIFQVMISRSTTPDLIKIGMKLQEFFTQQFDTSKRALSTWGPVPYLPPKTMTSNLEKSSQEQLLDAAHHRHWPGVLKVVSGCHISLFQIPLPEDGMQFGGSMSLHGNHMTLACFHGPNFRSKSWALFHLEEPNIAFWTEAQKIWEDGSSDHSTYIVQTLDFHLGHNTMVTKPCGALESPMATITKITRRRHENPPHGVASVKEWFNYVTATRNEELNLLRNVDANNTENSTTVKNSSLLSGFRGGSSYNHETETIFALPRMQLDFKSIHVQEPQEPSLQDASLKPKVECSVVTEFTDHICVTMDAELIMFLHDLVSAYLKEKEKAIFPPRILSTRPGQKSPIIIHDDNSSDKDREDSITYTTVDWRDFMCNTWHLEPTLRLISWTGRKIDPVGVDYILQKLGFHHARTTIPKWLQRGVMDPLDKVLSVLIKKLGTALQDEKEKKGKDKEEH

SEQ ID NO: 1939 - protein, 538 aa, Homo sapiens
MNLELLESFGQNYPEEADGTLDCISMALTCTFNRWGTLLAVGCNDGRIVIWDFLTRGIAKIISAHIHPVCSLCWSRDGHKLVSASTDNIVSQWDVLSGDCDQRFRFPSPILKVQYHPRDQNKVLVCPMKSAPVMLTLSDSKHVVLPVDDDSDLNVVASFDRRGEYIYTGNAKGKILVLKTDSQDLVASFRVTTGTSNTTAIKSIEFARKGSCFLINTADRIIRVYDGREILTCGRDGEPEPMQKLQDLVNRTPWKKCCFSGDGEYIVAGSARQHALYIWEKSIGNLVKILHGTRGELLLDVAWHPVRPIIASISSGVVSIWAQNQVENWSAFAPDFKELDENVEYEERESEFDIEDEDKSEPEQTGADAAEDEEVDVTSVDPIAAFCSSDEELEDSKALLYLPIAPEVEDPEENPYGPPPDAVQTSLMDEGASSEKKRQSSADGSQPPKKKPKTTNIELQGVPNDEVHPLLGVKGDGKSKKKQAGRPKGSKGKEKDSPFKPKLYKGDRGLPLEGSAKGKVQAELSQPLTAGGAISELL

SEQ ID NO: 1940 - protein, 525 aa, Homo sapiens
MAAGLLGSEDPPWSWNLTCRALRTCQVRNIRVLQLLLKPWCISRAVYQMTEGRRCQVHLLDDRKLELLVQPKLLAKELLDLVASHFNLKEKEYFGIAFTDETGHLNWLQLDRRVLEHDFPKKSGPVVLYFCVRFYIESISYLKDNATIELFFLNAKSCIYKELIDVDSEVVFELASYILQEAKGDFSSNEVVRSDLKKLPALPTQALKEHPSLAYCEDRVIEHYKKLNGQTRGQAIVNYMSIVESLPTYGVHYYAVKDKQGIPWWLGLSYKGIFQYDYHDKVKPRKIFQWRQLENLYFREKKFSVEVHDPRRASVTRRTFGHSGIAVHTWYACPALIKSIWAMAISQHQFYLDRKQSKSKIHAARSLSEIAIDLTETGTLKTSKLANMGSKGKIISGSSGSLLSSGSQESDSSQSAKKDMLAALKSRQEALEETLRQRLEELKKLCLREAELTGKLPVEYPLDPGEEPPIVRRRIGTAFKLDEQKILPKGEEAELERLEREFAIQSQITEAARRLASDPNVSKKL

SEQ ID NO: 1941 - protein, 1649 aa, Homo sapiens
MDDDSLDELVARSPGPDGHPQVGPADPAGDFEESSVGSSGDSGDDSDSEHGDGTDGEDEGASEEEDLEDRSGSEDSEDDGETLLEVAGTQGKLEAAGSFNSDDDAESCPICLNAFRDQAVGTPENCAHYFCLDCIVEWSKNANSCPVDRTLFKCICIRAQFGGKILRKIPVENTKASEEEEDPTFCEVCGRSDREDRLLLCDGCDAGYHMECLDPPLQEVPVDEWFCPECAAPGVVLAADAGPVSEEEVSLLLADVVPTTSRLRPRAGRTRAIARTRQSERVRATVNRNRISTARRVQHTPGRLGSSLLDEAIEAVATGLSTAVYQRPLTPRTPARRKRKTRRRKKVPGRKKTPSGPSAKSKSSATRSKKRQHRVKKRRGKKVKSEATTRSRIARTLGLRRPVHSSCIPSVLKPVEPSLGLLRADIGAASLSLFGDPYELDPFDSSEELSANPLSPLSAKRRALSRSALQSHQPVARPVSVGLSRRRLPAAVPEPDLEEEPVPDLLGSILSGQSLLMLGSSDVIIHRDGSLSAKRAAPVSFQRNSGSLSRGEEGFKGCLQPRALPSGSPAQGPSGNRPQSTGLSCQGRSRTPARTAGAPVRLDLPAAPGAVQARNLSNGSVPGFRQSHSPWFNGTNKHTLPLASAASKISSRDSKPPCRSVVPGPPLKPAPRRTDISELPRIPKIRRDDGGGRRDAAPAHGQSIEIPSACISRLTGREGTGQPGRGTRAESEASSRVPREPGVHTGSSRPPAPSSHGSLAPLGPSRGKGVGSTFESFRINIPGNMAHSSQLSSPGFCNTFRPVDDKEQRKENPSPLFSIKKTKQLRSEVYDPSDPTGSDSSAPGSSPERSGPGLLPSEITRTISINSPKAQTVQAVRCVTSYTVESIFGTEPEPPLGPSSAMSKLRGAVAAEGASDTEREEPTESQGLAARLRRPSPPEPWDEEDGASCSTFFGSEERTVTCVTVVEPEAPPSPDVLQAATHRVVELRPPSRSRSTSSSRSRKKAKRKRVSREHGRTRSGTRSESRDRSSRSASPSVGEERPRRQRSKAKSRRSSSDRSSSRERAKRKKAKDKSREHRRGPWGHSRRTSRSRSGSPGSSSYEHYESRKKKKRRSASRPRGRECSPTSSLERLCRHKHQRERSHERPDRKESVAWPRDRRKRRSRSPSSEHRAREHRRPRSREKWPQTRSHSPERKGAVREASPAPLAQGEPGREDLPTRLPALGEAHVSPEVATADKAPLQAPPVLEVAAECEPDDLDLDYGDSVEAGHVFDDFSSDAVFIQLDDMSSPPSPESTDSSPERDFPLKPALPPASLAVAAIQREVSLMHDEDPSQPPPLPEGTQEPHLLRPDAAEKAEAPSSPDVAPAGKEDSPSASGRVQEAARPEEVVSQTPLLRSRALVKRVTWNLQESESSAPAEDRAPRAPLHRPQKPREGAWDMEDVAPTGVRQVFSELPFPSHVLPEPGFPDTDPSQVYSPGLPPAPAQPSSIPPCALVSQPTVQFILQGSLPLVGCGAAQTLAPVPAALTPASEPASQATAASNSEEKTPAPRLAAEKTKKEEYMKKLHMQERAVEEVKLAIKPFYQKREVTKEEYKDILRKAVQKICHSKSGEINPVKVANLVKAYVDKYRHMRRHKKPEAGEEPPTQGAEG

SEQ ID NO: 1942 - protein, 199 aa, Homo sapiens
MNCVCRLVLVVLSLWPDTAVAPGPPPGPPRVSPDPRAELDSTVLLTRSLLADTRQLAAQLRDKFPADGDHNLDSLPTLAMSAGALGALQLPGVLTRLRADLLSYLRHVQWLRRAGGSSLKTLEPELGTLQARLDRLLRRLQLLMSRLALPQPPPDPPAPPLAPPSSAWGGIRAAHAILGGLHLTLDWAVRGLLLLKTRL

SEQ ID NO: 1943 - protein, 600 aa, Homo sapiens
MGKKLDLSKLTDEEAQHVLEVVQRDFDLRRKEEERLEALKGKIKKESSKRELLSDTAHLNETHCARCLQPYQLLVNSKRQCLECGLFTCKSCGRVHPEEQGWICDPCHLARVVKIGSLEWYYEHVKARFKRFGSAKVIRSLHGRLQGGAGPELISEERSGDSDQTDEDGEPGSEAQAQAQPFGSKKKRLLSVHDFDFEGDSDDSTQPQGHSLHLSSVPEARDSPQSLTDESCSEKAAPHKAEGLEEADTGASGCHSHPEEQPTSISPSRHGALAELCPPGGSHRMALGTAAALGSNVIRNEQLPLQYLADVDTSDEESIRAHVMASHHSKRRGRASSESQIFELNKHISAVECLLTYLENTVVPPLAKGLGAGVRTEADVEEEALRRKLEELTSNVSDQETSSEEEEAKDEKAEPNRDKSVGPLPQADPEVGTAAHQTNRQEKSPQDPGDPVQYNRTTDEELSELEDRVAVTASEVQQAESEVSDIESRIAALRAAGLTVKPSGKPRRKSNLPIFLPRVAGKLGKRPEDPNADPSSEAKAMAVPYLLRRKFSNSLKSQGKDDDSFDRKSVYRGSLTQRNPNARKGMASHTFAKPVVAHQS

SEQ ID NO: 1944 - protein, 1084 aa, Homo sapiens
MSSQSHPDGLSGRDQPVELLNPARVNHMPSTVDVATALPLQVAPSAVPMDLRLDHQFSLPVAEPALREQQLQQELLALKQKQQIQRQILIAEFQRQHEQLSRQHEAQLHEHIKQQQEMLAMKHQQELLEHQRKLERHRQEQELEKQHREQKLQQLKNKEKGKESAVASTEVKMKLQEFVLNKKKALAHRNLNHCISSDPRYWYGKTQHSSLDQSSPPQSGVSTSYNHPVLGMYDAKDDFPLRKTASEPNLKLRSRLKQKVAERRSSPLLRRKDGPVVTALKKRPLDVTDSACSSAPGSGPSSPNNSSGSVSAENGIAPAVPSIPAETSLAHRLVAREGSAAPLPLYTSPSLPNITLGLPATGPSAGTAGQQDAERLTLPALQQRLSLFPGTHLTPYLSTSPLERDGGAAHSPLLQHMVLLEQPPAQAPLVTGLGALPLHAQSLVGADRVSPSIHKLRQHRPLGRTQSAPLPQNAQALQHLVIQQQHQQFLEKHKQQFQQQQLQMNKIIPKPSEPARQPESHPEETEEELREHQALLDEPYLDRLPGQKEAHAQAGVQVKQEPIESDEEEAEPPREVEPGQRQPSEQELLFRQQALLLEQQRIHQLRNYQASMEAAGIPVSFGGHRPLSRAQSSPASATFPVSVQEPPTKPRFTTGLVYDTLMLKHQCTCGSSSSHPEHAGRIQSIWSRLQETGLRGKCECIRGRKATLEELQTVHSEAHTLLYGTNPLNRQKLDSKKLLGSLASVFVRLPCGGVGVDSDTIWNEVHSAGAARLAVGCVVELVFKVATGELKNGFAVVRPPGHHAEESTPMGFCYFNSVAVAAKLLQQRLSVSKILIVDWDVHHGNGTQQAFYSDPSVLYMSLHRYDDGNFFPGSGAPDEVGTGPGVGFNVNMAFTGGLDPPMGDAEYLAAFRTVVMPIASEFAPDVVLVSSGFDAVEGHPTPLGGYNLSARCFGYLTKQLMGLAGGRIVLALEGGHDLTAICDASEACVSALLGNELDPLPEKVLQQRPNANAVRSMEKVMEIHSKYWRCLQRTTSTAGRSLIEAQTCENEEAETVTAMASLSVGVKPAEKRPDEEPMEEEPPL

SEQ ID NO: 1945 - protein, 1065 aa, Homo sapiens
MKILILGIFLFLCSTPAWAKEKHYYIGIIETTWDYASDHGEKKLISVDTEHSNIYLQNGPDRIGRLYKKALYLQYTDETFRTTIEKPVWLGFLGPIIKAETGDKVYVHLKNLASRPYTFHSHGITYYKEHEGAIYPDNTTDFQRADDKVYPGEQYTYMLLATEEQSPGEGDGNCVTRIYHSHIDAPKDIASGLIGPLIICKKDSLDKEKEKHIDREFVVMFSVVDENFSWYLEDNIKTYCSEPEKVDKDNEDFQESNRMYSVNGYTFGSLPGLSMCAEDRVKWYLFGMGNEVDVHAAFFHGQALTNKNYRIDTINLFPATLFDAYMVAQNPGEWMLSCQNLNHLKAGLQAFFQVQECNKSSSKDNIRGKHVRHYYIAAEEIIWNYAPSGIDIFTKENLTAPGSDSAVFFEQGTTRIGGSYKKLVYREYTDASFTNRKERGPEEEHLGILGPVIWAEVGDTIRVTFHNKGAYPLSIEPIGVRFNKNNEGTYYSPNYNPQSRSVPPSASHVAPTETFTYEWTVPKEVGPTNADPVCLAKMYYSAVEPTKDIFTGLIGPMKICKKGSLHANGRQKDVDKEFYLFPTVFDENESLLLEDNIRMFTTAPDQVDKEDEDFQESNKMHSMNGFMYGNQPGLTMCKGDSVVWYLFSAGNEADVHGIYFSGNTYLWRGERRDTANLFPQTSLTLHMWPDTEGTFNVECLTTDHYTGGMKQKYTVNQCRRQSEDSTFYLGERTYYIAAVEVEWDYSPQREWEKELHHLQEQNVSNAFLDKGEFYIGSKYKKVVYRQYTDSTFRVPVERKAEEEHLGILGPQLHADVGDKVKIIFKNMATRPYSIHAHGVQTESSTVTPTLPGETLTYVWKIPERSGAGTEDSACIPWAYYSTVDQVKDLYSGLIGPLIVCRRPYLKVFNPRRKLEFALLFLVFDENESWYLDDNIKTYSDHPEKVNKDDEEFIESNKMHAINGRMFGNLQGLTMHVGDEVNWYLMGMGNEIDLHTVHFHGHSFQYKHRGVYSSDVFDIFPGTYQTLEMFPRTPGIWLLHCHVTDHIHAGMETTYTVLQNEDTKSG

SEQ ID NO: 1946 - protein, 380 aa, Homo sapiens
MKKSIGILSPGVALGMAGSAMSSKFFLVALAIFFSFAQVVIEANSWWSLGMNNPVQMSEVYIIGAQPLCSQLAGLSQGQKKLCHLYQDHMQYIGEGAKTGIKECQYQFRHRRWNCSTVDNTSVFGRVMQIGSRETAFTYAVSAAGVVNAMSRACREGELSTCGCSRAARPKDLPRDWLWGGCGDNIDYGYRFAKEFVDARERERIHAKGSYESARILMNLHNNEAGRRTVYNLADVACKCHGVSGSCSLKTCWLQLADFRKVGDALKEKYDSAAAMRLNSRGKLVQVNSRFNSPTTQDLVYIDPSPDYCVRNESTGSLGTQGRLCNKTSEGMDGCELMCCGRGYDQFKTVQTERCHCKFHWCCYVKCKKCTEIVDQFVCK

SEQ ID NO: 1947 - protein, 1384 aa, Homo sapiens
MMHLRLFCILLAAVSGAEGWGYYGCDEELVGPLYARSLGASSYYSLLTAPRFARLHGISGWSPRIGDPNPWLQIDLMKKHRIRAVATQGSFNSWDWVTRYMLLYGDRVDSWTPFYQRGHNSTFFGNVNESAVVRHDLHFHFTARYIRIVPLAWNPRGKIGLRLGLYGCPYKADILYFDGDDAISYRFPRGVSRSLWDVFAFSFKTEEKDGLLLHAEGAQGDYVTLELEGAHLLLHMSLGSSPIQPRPGHTTVSAGGVLNDQHWHYVRVDRFGRDVNFTLDGYVQRFILNGDFERLNLDTEMFIGGLVGAARKNLAYRHNFRGCIENVIFNRVNIADLAVRRHSRITFEGKVAFRCLDPVPHPINFGGPHNFVQVPGFPRRGRLAVSFRFRTWDLTGLLLFSRLGDGLGHVELTLSEGQVNVSIAQSGRKKLQFAAGYRLNDGFWHEVNFVAQENHAVISIDDVEGAEVRVSYPLLIRTGTSYFFGGCPKPASRWDCHSNQTAFHGCMELLKVDGQLVNLTLVEGRRLGFYAEVLFDTCGITDRCSPNMCEHDGRCYQSWDDFICYCELTGYKGETCHTPLYKESCEAYRLSGKTSGNFTIDPDGSGPLKPFVVYCDIRENRAWTVVRHDRLWTTRVTGSSMERPFLGAIQYWNASWEEVSALANASQHCEQWIEFSCYNSRLLNTAGGYPYSFWIGRNEEQHFYWGGSQPGIQRCACGLDRSCVDPALYCNCDADQPQWRTDKGLLTFVDHLPVTQVVIGDTNRSTSEAQFFLRPLRCYGDRNSWNTISFHTGAALRFPPIRANHSLDVSFYFRTSAPSGVFLENMGGPYCQWRRPYVRVELNTSRDVVFAFDVGNGDENLTVHSDDFEFNDDEWHLVRAEINVKQARLRVDHRPWVLRPMPLQTYIWMEYDQPLYVGSAELKRRPFVGCLRAMRLNGVTLNLEGRANASEGTSPNCTGHCAHPRLPCFHGGRCVERYSYYTCDCDLTAFDGPYCNHDIGGFFEPGTWMRYNLQSALRSAAREFSHMLSRPVPGYEPGYIPGYDTPGYVPGYHGPGYRLPDYPRPGRPVPGYRGPVYNVTGEEVSFSFSTSSAPAVLLYVSSFVRDYMAVLIKDDGTLQLRYQLGTSPYVYQLTTRPVTDGQPHSINITRVYRNLFIQVDYFPLTEQKFSLLVDSQLDSPKALYLGRVMETGVIDPEIQRYNTPGFSGCLSGVRFNNVAPLKTHFRTPRPMTAELAEALRVQGELSESNCGAMPRLVSEVPPELDPWYLPPDFPYYHDEGWVAILLGFLVAFLLLGLVGMLVLFYLQNHRYKGSYHTNEPKAAHEYHPGSKPPLPTSGPAQVPTPTAAPNQAPASAPAPAPTPAPAPGPRDQNLPQILEESRSE

SEQ ID NO: 1948 - protein, 534 aa, Homo sapiens
MKQEGSARRRGADKAKPPPGGGEQEPPPPPAPQDVEMKEEAATGGGSTGEADGKTAAAAAEHSQRELDTVTLEDIKEHVKQLEKAVSGKEPRFVLRALRMLPSTSRRLNHYVLYKAVQGFFTSNNATRDFLLPFLEEPMDTEADLQFRPRTGKAASTPLLPEVEAYLQLLVVIFMMNSKRYKEAQKISDDLMQKISTQNRRALDLVAAKCYYYHARVYEFLDKLDVVRSFLHARLRTATLRHDADGQATLLNLLLRNYLHYSLYDQAEKLVSKSVFPEQANNNEWARYLYYTGRIKAIQLEYSEARRTMTNALRKAPQHTAVGFKQTVHKLLIVVELLLGEIPDRLQFRQPSLKRSLMPYFLLTQAVRTGNLAKFNQVLDQFGEKFQADGTYTLIIRLRHNVIKTGVRMISLSYSRISLADIAQKLQLDSPEDAEFIVAKAIRDGVIEASINHEKGYVQSKEMIDIYSTREPQLAFHQRISFCLDIHNMSVKAMRFPPKSYNKDLESAEERREREQQDLEFAKEMAEDDDDSFP

SEQ ID NO: 1949 - protein, 838 aa, Homo sapiens
MGELFRSEEMTLAQLFLQSEAAYCCVSELGELGKVQFRDLNPDVNVFQRKFVNEVRRCEEMDRKLRFVEKEIRKANIPIMDTGENPEVPFPRDMIDLEANFEKIENELKEINTNQEALKRNFLELTELKFILRKTQQFFDEAELHHQQMADPDLLEESSSLLEPSEMGRGTPLRLGFVAGVINRERIPTFERMLWRVCRGNVFLRQAEIENPLEDPVTGDYVHKSVFIIFFQGDQLKNRVKKICEGFRASLYPCPETPQERKEMASGVNTRIDDLQMVLNQTEDHRQRVLQAAAKNIRVWFIKVRKMKAIYHTLNLCNIDVTQKCLIAEVWCPVTDLDSIQFALRRGTEHSGSTVPSILNRMQTNQTPPTYNKTNKFTYGFQNIVDAYGIGTYREINPAPYTIITFPFLFAVMFGDFGHGILMTLFAVWMVLRESRILSQKNENEMFSTVFSGRYIILLMGVFSMYTGLIYNDCFSKSLNIFGSSWSVRPMFTYNWTEETLRGNPVLQLNPALPGVFGGPYPFGIDPIWNIATNKLTFLNSFKMKMSVILGIIHMLFGVSLSLFNHIYFKKPLNIYFGFIPEIIFMTSLFGYLVILIFYKWTAYDAHTSENAPSLLIHFINMFLFSYPESGYSMLYSGQKGIQCFLVVVALLCVPWMLLFKPLVLRRQYLRRKHLGTLNFGGIRVGNGPTEEDAEIIQHDQLSTHSEDADEFDFGDTMVHQAIHTIEYCLGCISNTASYLRLWALSLAHAQLSEVLWTMVIHIGLSVKSLAGGLVLFFFFTAFATLTVAILLIMEGLSAFLHALRLHWVEFQNKFYSGTGFKFLPFSFEHIREGKFEE

SEQ ID NO: 1950 - protein, 525 aa, Homo sapiens
MSCSSRASSSRAGGSSSARVSAGGSSFSSGSRCGLGGSSAQGFRGGASSCSLSGGSSGAFGGSFGGGFGSCSVGGGFGGASGSGTGFGGGSSFGGVSGFGRGSGFCGSSRFSSGATGGFYSYGGGMGGGVGDGGLFSGGEKQTMQNLNDRLANYLDKVRALEEANTDLENKIKEWYDKYGPGSGDGGSGRDYSKYYSIIEDLRNQIIAATVENAGIILHIDNARLAADDFRLKYENELCLRQSVEADINGLRKVLDDLTMTRSDLEMQIESFTEELAYLRKNHEEEMKNMQGSSGGEVTVEMNAAPGTDLTKLLNDMRAQYEELAEQNRREAEERFNKQSASLQAQISTDAGAATSAKNEITELKRTLQALEIELQSQLAMKSSLEGTLADTEAGYVAQLSEIQTQISALEEEICQIWGETKCQNAEYKQLLDIKTRLEVEIETYRRLLDGEGGGSSFAEFGGRNSGSVNMGSRDLVSGDSRSGSCSGQGRDSSKTRVTKTIVEELVDGKVVSSQVSSISEVKVK

SEQ ID NO: 1951 - protein, 770 aa, Homo sapiens
MAQWNQLQQLDTRYLEQLHQLYSDSFPMELRQFLAPWIESQDWAYAASKESHATLVFHNLLGEIDQQYSRFLQESNVLYQHNLRRIKQFLQSRYLEKPMEIARIVARCLWEESRLLQTAATAAQQGGQANHPTAAVVTEKQQMLEQHLQDVRKRVQDLEQKMKVVENLQDDFDFNYKTLKSQGDMQDLNGNNQSVTRQKMQQLEQMLTALDQMRRSIVSELAGLLSAMEYVQKTLTDEELADWKRRQQIACIGGPPNICLDRLENWITSLAESQLQTRQQIKKLEELQQKVSYKGDPIVQHRPMLEERIVELFRNLMKSAFVVERQPCMPMHPDRPLVIKTGVQFTTKVRLLVKFPELNYQLKIKVCIDKDSGDVAALRGSRKFNILGTNTKVMNMEESNNGSLSAEFKHLTLREQRCGNGGRANCDASLIVTEELHLITFETEVYHQGLKIDLETHSLPVVVISNICQMPNAWASILWYNMLTNNPKNVNFFTKPPIGTWDQVAEVLSWQFSSTTKRGLSIEQLTTLAEKLLGPGVNYSGCQITWAKFCKENMAGKGFSFWVWLDNIIDLVKKYILALWNEGYIMGFISKERERAILSTKPPGTFLLRFSESSKEGGVTFTWVEKDISGKTQIQSVEPYTKQQLNNMSFAEIIMGYKIMDATNILVSPLVYLYPDIPKEEAFGKYCRPESQEHPEADPGSAAPYLKTKFICVTPTTCSNTIDLPMSPRTLDSLMQFGNNGEGAEPSAGGQFESLTFDMELTSECATSPM

SEQ ID NO: 1952 - protein, 436 aa, Homo sapiens
MRRDVNGVTKSRFEMFSNSDEAVINKKLPKELLLRIFSFLDVVTLCRCAQVSRAWNVLALDGSNWQRIDLFDFQRDIEGRVVENISKRCGGFLRKLSLRGCLGVGDNALRTFAQNCRNIEVLNLNGCTKTTDATCTSLSKFCSKLRHLDLASCTSITNMSLKALSEGCPLLEQLNISWCDQVTKDGIQALVRGCGGLKALFLKGCTQLEDEALKYIGAHCPELVTLNLQTCLQITDEGLITICRGCHKLQSLCASGCSNITDAILNALGQNCPRLRILEVARCSQLTDVGFTTLARNCHELEKMDLEECVQITDSTLIQLSIHCPRLQVLSLSHCELITDDGIRHLGNGACAHDQLEVIELDNCPLITDASLEHLKSCHSLERIELYDCQQITRAGIKRLRTHLPNIKVHAYFAPVTPPPSVGGSRQRFCRCCIIL

SEQ ID NO: 1953 - protein, 1017 aa, Homo sapiens
MPVMKGLLAPQNTFLDTIATRFDGTHSNFLLANAQGTRGFPIVYCSDGFCELTGYGRTEVMQKTCSCRFLYGPETSEPALQRLHKALEGHQEHRAEICFYRKDGSAFWCLLDMMPIKNEMGEVVLFLFSFKDITQSGSPGLGPQGGRGDSNHENSLGRRGATWKFRSARRRSRTVLHRLTGHFGRRGQGGMKANNNVFEPKPSVPEYKVASVGGSRCLLLHYSVSKAIWDGLILLATFYVAVTVPYNVCFSGDDDTPITSRHTLVSDIAVEMLFILDIILNFRTTYVSQSGQVISAPRSIGLHYLATWFFIDLIAALPFDLLYIFNITVTSLVHLLKTVRLLRLLRLLQKLERYSQCSAVVLTLLMSVFALLAHWMACIWYVIGRREMEANDPLLWDIGWLHELGKRLEVPYVNGSVGGPSRRSAYIAALYFTLSSLTSVGFGNVCANTDAEKIFSICTMLIGALMHAVVFGNVTAIIQRMYSRRSLYHSRMKDLKDFIRVHRLPRPLKQRMLEYFQTTWAVNSGIDANELLRDFPDELRADIAMHLNREILQLPLFGAASRGCLRALSLHIKTSFCAPGEYLLRRGDALQAHYYVCSGSLEVLRDNMVLAILGKGDLIGADIPEPGQEPGLGADPNFVLKTSADVKALTYCGLQQLSSRGLAEVLRLYPEYGAAFRAGLPRDLTFNLRQGSDTSGLSRFSRSPRLSQPRSESLGSSSDKTLPSITEAESGAEPGGGPRPRRPLLLPNLSPARPRGSLVSLLGEELPPFSALVSSPSLSPSLSPALAGQGHSASPHGPPRCSAAWKPPQLLIPPLGTFGPPDLSPRIVDGIEDSGSTAEAPSFRFSRRPELPRPRSQAPPTGTRPSPELASEAEEVKEKVCRLNQEISRLNQEVSQLSRELRHIMGLLQARLGPPGHPAGSAWTPDPPCPQLRPPCLSPCASRPPPSLQDTTLAEVHCPASVGTMETGTALLDLRPSILPPYPSEPDPLGPSPVPEASPPTPSLLRHSFQSRSDTFH

SEQ ID NO: 1954 - protein, 1086 aa, Homo sapiens
MANLLKTVVTGCSCPLLSNLGSCKGLRVKKDFLRTFYTHQELWCKAPVKPGIPYKQLTVGVPKEIFQNEKRVALSPAGVQNLVKQGFNVVVESGAGEASKFSDDHYRVAGAQIQGAKEVLASDLVVKVRAPMVNPTLGVHEADLLKTSGTLISFIYPAQNPELLNKLSQRKTTVLAMDQVPRVTIAQGYDALSSMANIAGYKAVVLAANHFGRFFTGQITAAGKVPPAKILIVGGGVAGLASAGAAKSMGAIVRGFDTRAAALEQFKSLGAEPLEVDLKESGEGQGGYAKEMSKEFIEAEMKLFAQQCKEVDILISTALIPGKKAPVLFNKEMIESMKEGSVVVDLAAEAGGNFETTKPGELYIHKGITHIGYTDLPSRMATQASTLYSNNITKLLKAISPDKDNFYFDVKDDFDFGTMGHVIRGTVVMKDGKVIFPAPTPKNIPQGAPVKQKTVAELEAEKAATITPFRKTMSTASAYTAGLTGILGLGIAAPNLAFSQMVTTFGLAGIVGYHTVWGVTPALHSPLMSVTNAISGLTAVGGLALMGGHLYPSTTSQGLAALAAFISSVNIAGGFLVTQRMLDMFKRPTDPPEYNYLYLLPAGTFVGGYLAALYSGYNIEQIMYLGSGLCCVGALAGLSTQGTARLGNALGMIGVAGGLAATLGVLKPGPELLAQMSGAMALGGTIGLTIAKRIQISDLPQLVAAFHSLVGLAAVLTCIAEYIIEYPHFATDAAANLTKIVAYLGTYIGGVTFSGSLIAYGKLQGLLKSAPLLLPGRHLLNAGLLAASVGGIIPFMVDPSFTTGITCLGSVSALSAVMGVTLTAAIGGADMPVVITVLNSYSGWALCAEGFLLNNNLLTIVGALIGSSGAILSYIMCVAMNRSLANVILGGYGTTSTAGGKPMEISGTHTEINLDNAIDMIREANSIIITPGYGLCAAKAQYPIADLVKMLTEQGKKVRFGIHPVAGRMPGQLNVLLAEAGVPYDIVLEMDEINHDFPDTDLVLVIGANDTVNSAAQEDPNSIIAGMPVLEVWKSKQVIVMKRSLGVGYAAVDNPIFYKPNTAMLLGDAKKTCDALQAKVRESYQK

SEQ ID NO: 1955 - protein, 208 aa, Homo sapiens
MWKWILTHCASAFPHLPGCCCCCFLLLFLVSSVPVTCQALGQDMVSPEATNSSSSSFSSPSSAGRHVRSYNHLQGDVRWRKLFSFTKYFLKIEKNGKVSGTKKENCPYSILEITSVEIGVVAVKAINSNYYLAMNKKGKLYGSKEFNNDCKLKERIEENGYNTYASFNWQHNGRQMYVALNGKGAPRRGQKTRRKNTSAHFLPMVVHS

SEQ ID NO: 1956 - protein, 662 aa, Homo sapiens
MALITLRKNLYRLSDFQMHRALAALKNKPLNHVHKVVKERLCPWLCSRQPEPFGVKFHHAHCKKFHSKNGNDLHPLGGPVFSQVSDCDRLEQNVKNEESQMFYRRLSNLTSSEEVLSFISTMETLPDTMAAGALQRICEVEKKDGDQGLPKEILENSIFQALCFQFEKEPSQLSNTSLVTALQALILLHVDPQSSLLLNLVAECQNRLRKGGMEVRNLCILGESLITLHSSGCVTLELIINQLQGEKLETFTPEDIVALYRILQACTEKVDEHQTFLNKINNFSLSIVSNLSPKLISQMLTALVVLDQSQAFPLIIKLGKYVVRHVPHFTNEELRRVLEAFIYFGHHDTFFTKALEHRVAAVCLTLDPEVVCRVMEYCSRELILSKPILNAVAETFVCQTEKFSPRQISALMEPFGKLNYLPPNASALFRKLENVLFTHFNYFPPKSLLKLLHSCSLNECHPVNFLAKIFKPLFLQRLQGKESHLDTLSRAQLTQLFLASVLECPFYKGPKLLPKYQVKSFLTPCCSLETPVDSQLYRYVKIGLTNLLGARLYFAPKVLTPYCYTIDVEIKLDEEGFVLPSTANEDIHKRIALCIDGPKRFCSNSKHLLGKEAIKQRHLQLLGYQVVQIPYHEIGMLKSRRELVEYLQRKLFSQNTVHWLQE

SEQ ID NO: 1957 - protein, 767 aa, Homo sapiens
MGRRSRGRRLQQQQRPEDAEDGAEGGGKRGEAGWEGGYPEIVKENKLFEHYYQELKIVPEGEWGQFMDALREPLPATLRITGYKSHAKEILHCLKNKYFKELEDLEVDGQKVEVPQPLSWYPEELAWHTNLSRKILRKSPHLEKFHQFLVSETESGNISRQEAVSMIPPLLLNVRPHHKILDMCAAPGSKTTQLIEMLHADMNVPFPEGFVIANDVDNKRCYLLVHQAKRLSSPCIMVVNHDASSIPRLQIDVDGRKEILFYDRILCDVPCSGDGTMRKNIDVWKKWTTLNSLQLHGLQLRIATRGAEQLAEGGRMVYSTCSLNPIEDEAVIASLLEKSEGALELADVSNELPGLKWMPGITQWKVMTKDGQWFTDWDAVPHSRHTQIRPTMFPPKDPEKLQAMHLERCLRILPHHQNTGGFFVAVLVKKSSMPWNKRQPKLQGKSAETRESTQLSPADLTEGKPTDPSKLESPSFTGTGDTEIAHATEDLENNGSKKDGVCGPPPSKKMKLFGFKEDPFVFIPEDDPLFPPIEKFYALDPSFPRMNLLTRTTEGKKRQLYMVSKELRNVLLNNSEKMKVINTGIKVWCRNNSGEEFDCAFRLAQEGIYTLYPFINSRIITVSMEDVKILLTQENPFFRKLSSETYSQAKDLAKGSIVLKYEPDSANPDALQCPIVLCGWRGKASIRTFVPKNERLHYLRMMGLEVLGEKKKEGVILTNESAASTGQPDNDVTEGQRAGEPNSPDAEEANSPDVTAGCDPAGVHPPR

SEQ ID NO: 1958 - protein, 1116 aa, Homo sapiens
MILDEFYNVKFCIDASQPDVGSWLKYIRFAGCYDQHNLVACQINDQIFYRVVADIAPGEELLLFMKSEDYPHETMAPDIHEERQYRCEDCDQLFESKAELADHQKFPCSTPHSAFSMVEEDFQQKLESENDLQEIHTIQECKECDQVFPDLQSLEKHMLSHTEEREYKCDQCPKAFNWKSNLIRHQMSHDSGKHYECENCAKQVFTDPSNLQRHIRSQHVGARAHACPECGKTFATSSGLKQHKHIHSSVKPFICEVCHKSYTQFSNLCRHKRMHADCRTQIKCKDCGQMFSTTSSLNKHRRFCEGKNHFAAGGFFGQGISLPGTPAMDKTSMVNMSHANPGLADYFGANRHPAGLTFPTAPGFSFSFPGLFPSGLYHRPPLIPASSPVKGLSSTEQTNKSQSPLMTHPQILPATQDILKALSKHPSVGDNKPVELQPERSSEERPFEKISDQSESSDLDDVSTPSGSDLETTSGSDLESDIESDKEKFKENGKMFKDKVSPLQNLASINNKKEYSNHSIFSPSLEEQTAVSGAVNDSIKAIASIAEKYFGSTGLVGLQDKKVGALPYPSMFPLPFFPAFSQSMYPFPDRDLRSLPLKMEPQSPGEVKKLQKGSSESPFDLTTKRKDEKPLTPVPSKPPVTPATSQDQPLDLSMGSRSRASGTKLTEPRKNHVFGGKKGSNVESRPASDGSLQHARPTPFFMDPIYRVEKRKLTDPLEALKEKYLRPSPGFLFHPQFQLPDQRTWMSAIENMAEKLESFSALKPEASELLQSVPSMFNFRAPPNALPENLLRKGKERYTCRYCGKIFPRSANLTRHLRTHTGEQPYRCKYCDRSFSISSNLQRHVRNIHNKEKPFKCHLCDRCFGQQTNLDRHLKKHENGNMSGTATSSPHSELESTGAILDDKEDAYFTEIRNFIGNSNHGSQSPRNVEERMNGSHFKDEKALVTSQNSDLLDDEEVEDEVLLDEEDEDNDITGKTGKEPVTSNLHEGNPEDDYEETSALEMSCKTSPVRYKEEEYKSGLSALDHIRHFTDSLKMRKMEDNQYSEAELSSFSTSHVPEELKQPLHRKSKSQAYAMMLSLSDKESLHSTSHSSSNVWHSMARAAAESSAIQSISHV

SEQ ID NO: 1959 - protein, 405 aa, Homo sapiens
MDTIFLWSLLLLFFGSQASRCSAQKNTEFAVDLYQEVSLSHKDNIIFSPLGITLVLEMVQLGAKGKAQQQIRQTLKQQETSAGEEFFVLKSFFSAISEKKQEFTFNLANALYLQEGFTVKEQYLHGNKEFFQSAIKLVDFQDAKACAEMISTWVERKTDGKIKDMFSGEEFGPLTRLVLVNAIYFKGDWKQKFRKEDTQLINFTKKNGSTVKIPMMKALLRTKYGYFSESSLNYQVLELSYKGDEFSLIIILPAEGMDIEEVEKLITAQQILKWLSEMQEEEVEISLPRFKVEQKVDFKDVLYSLNITEIFSGGCDLSGITDSSEVYVSQVTQKVFFEINEDGSEAATSTGIHIPVIMSLAQSQFIANHPFLFIMKHNPTESILFMGRVTNPDTQEIKGRDLDSL

SEQ ID NO: 1960 - protein, 638 aa, Homo sapiens
MILFKQATYFISLFATVSCGCLTQLYENAFFRGGDVASMYTPNAQYCQMRCTFHPRCLLFSFLPASSINDMEKRFGCFLKDSVTGTLPKVHRTGAVSGHSLKQCGHQISACHRDIYKGVDMRGVNFNVSKVSSVEECQKRCTSNIRCQFFSYATQTFHKAEYRNNCLLKYSPGGTPTAIKVLSNVESGFSLKPCALSEIGCHMNIFQHLAFSDVDVARVLTPDAFVCRTICTYHPNCLFFTFYTNVWKIESQRNVCLLKTSESGTPSSSTPQENTISGYSLLTCKRTLPEPCHSKIYPGVDFGGEELNVTFVKGVNVCQETCTKMIRCQFFTYSLLPEDCKEEKCKCFLRLSMDGSPTRIAYGTQGSSGYSLRLCNTGDNSVCTTKTSTRIVGGTNSSWGEWPWQVSLQVKLTAQRHLCGGSLIGHQWVLTAAHCFDGLPLQDVWRIYSGILNLSDITKDTPFSQIKEIIIHQNYKVSEGNHDIALIKLQAPLNYTEFQKPICLPSKGDTSTIYTNCWVTGWGFSKEKGEIQNILQKVNIPLVTNEECQKRYQDYKITQRMVCAGYKEGGKDACKGDSGGPLVCKHNGMWRLVGITSWGEGCARREQPGVYTKVAEYMDWILEKTQSSDGKAQMQSPA

SEQ ID NO: 1961 - protein, 571 aa, Homo sapiens
MIFLYQVVHFILFTSVSGECVTQLLKDTCFEGGDITTVFTPSAKYCQVVCTYHPRCLLFTFTAESPSEDPTRWFTCVLKDSVTETLPRVNRTAAISGYSFKQCSHQISNICLLKHTQTGTPTRITKLDKVVSGFSLKSCALSNLACIRDIFPNTVFADSNIDSVMAPDAFVCGRICTHHPGCLFFTFFSQEWPKESQRNLCLLKTSESGLPSTRIKKSKALSGFSLQSCRHSIPVFCHSSFYHDTDFLGEELDIVAAKSHEACQKLCTNAVRCQFFTYTPAQASCNEGKGKCYLKLSSNGSPTKILHGRGGISGYTLRLCKMDNECTTKIKPRIVGGTASVRGEWPWQVTLHTTSPTQRHLCGGSIIGNQWILTAAHCFYGVESPKILRVYSGILNQSEIKEDTSFFGVQEIIIHDQYKMAESGYDIALLKLETTVNYTDSQRPICLPSKGDRNVIYTDCWVTGWGYRKLRDKIQNTLQKAKIPLVTNEECQKRYRGHKITHKMICAGYREGGKDACKGDSGGPLSCKHNEVWHLVGITSWGEGCAQRERPGVYTNVVEYVDWILEKTQAV

SEQ ID NO: 1962 - protein, 840 aa, Homo sapiens
MDKALKEVFDYSYRDYILSWYGNLSRDEGQLYHLLLEDFWEIARQLHHRLSHVDVVKVVCNDVVRTLLTHFCDLKAANARHEEQPRPFVLHACLRNSDDEVRFLQTCSRVLVFCLLPSKDVQSLSLRIMLAEILTTKVLKPVVELLSNPDYINQMLLAQLAYREQMNEHHKRAYTYAPSYEDFIKLINSNSDVEFLKQLRYQIVVEIIQATTISSFPQLKRHKGKETAAMKADLLRARNMKRYINQLTVAKKQCEKRIRILGGPAYDQQEDGALDEGEGPQSQKILQFEDILANTFYREHFGMYMERMDKRALISFWESVEHLKNANKNEIPQLVGEIYQNFFVESKEISVEKSLYKEIQQCLVGNKGIEVFYKIQEDVYETLKDRYYPSFIVSDLYEKLLIKEEEKHASQMISNKDEMGPRDEAGEEAVDDGTNQINEQASFAVNKLRELNEKLEYKRQALNSIQNAPKPDKKIVSKLKDEIILIEKERTDLQLHMARTDWWCENLGMWKASITSGEVTEENGEQLPCYFVMVSLQEVGGVETKNWTVPRRLSEFQNLHRKLSECVPSLKKVQLPSLSKLPFKSIDQKFMEKSKNQLNKFLQNLLSDERLCQSEALYAFLSPSPDYLKVIDVQGKKNSFSLSSFLERLPRDFFSHQEEETEEDSDLSDYGDDVDGRKDALAEPCFMLIGEIFELRGMFKWVRRTLIALVQVTFGRTINKQIRDTVSWIFSEQMLVYYINIFRDAFWPNGKLAPPTTIRSKEQSQETKQRAQQKLLENIPDMLQSLVGQQNARHGIIKIFNALQETRANKHLLYALMELLLIELCPELRVHLDQLKAGQV

SEQ ID NO: 1963 - protein, 2225 aa, Homo sapiens
MAALVLEDGSVLRGQPFGAAVSTAGEVVFQTGMVGYPEALTDPSYKAQILVLTYPLIGNYGIPPDEMDEFGLCKWFESSGIHVAALVVGECCPTPSHWSATRTLHEWLQQHGIPGLQGVDTRELTKKLREQGSLLGKLVQNGTEPSSLPFLDPNARPLVPEVSIKTPRVFNTGGAPRILALDCGLKYNQIRCLCQRGAEVTVVPWDHALDSQEYEGLFLSNGPGDPASYPSVVSTLSRVLSEPNPRPVFGICLGHQLLALAIGAKTYKMRYGNRGHNQPCLLVGSGRCFLTSQNHGFAVETDSLPADWAPLFTNANDGSNEGIVHNSLPFFSVQFHPEHQAGPSDMELLFDIFLETVKEATAGNPGGQTVRERLTERLCPPGIPTPGSGLPPPRKVLILGSGGLSIGQAGEFDYSGSQAIKALKEENIQTLLINPNIATVQTSQGLADKVYFLPITPHYVTQVIRNERPDGVLLTFGGQTALNCGVELTKAGVLARYGVRVLGTPVETIELTEDRRAFAARMAEIGEHVAPSEAANSLEQAQAAAERLGYPVLVRAAFALGGLGSGFASNREELSALVAPAFAHTSQVLVDKSLKGWKEIEYEVVRDAYGNCVTVCNMENLDPLGIHTGESIVVAPSQTLNDREYQLLRQTAIKVTQHLGIVGECNVQYALNPESEQYYIIEVNARLSRSSALASKATGYPLAYVAAKLALGIPLPELRNSVTGGTAAFEPSVDYCVVKIPRWDLSKFLRVSTKIGSCMKSVGEVMGIGRSFEEAFQKALRMVDENCVGFDHTVKPVSDMELETPTDKRIFVVAAALWAGYSVDRLYELTRIDRWFLHRMKRIIAHAQLLEQHRGQPLPPDLLQQAKCLGFSDKQIALAVLSTELAVRKLRQELGICPAVKQIDTVAAEWPAQTNYLYLTYWGTTHDLTFRTPHVLVLGSGVYRIGSSVEFDWCAVGCIQQLRKMGYKTIMVNYNPETVSTDYDMCDRLYFDEISFEVVMDIYELENPEGVILSMGGQLPNNMAMALHRQQCRVLGTSPEAIDSAENRFKFSRLLDTIGISQPQWRELSDLESARQFCQTVGYPCVVRPSYVLSGAAMNVAYTDGDLERFLSSAAAVSKEHPVVISKFIQEAKEIDVDAVASDGVVAAIAISEHVENAGVHSGDATLVTPPQDITAKTLERIKAIVHAVGQELQVTGPFNLQLIAKDDQLKVIECNVRVSRSFPFVSKTLGVDLVALATRVIMGEEVEPVGLMTGSGVVGVKVPQFSFSRLAGADVVLGVEMTSTGEVAGFGESRCEAYLKAMLSTGFKIPKKNILLTIGSYKNKSELLPTVRLLESLGYSLYASLGTADFYTEHGVKVTAVDWHFEEAVDGECPPQRSILEQLAEKNFELVINLSMRGAGGRRLSSFVTKGYRTRRLAADFSVPLIIDIKCTKLFVEALGQIGPAPPLKVHVDCMTSQKLVRLPGLIDVHVHLREPGGTHKEDFASGTAAALAGGITMVCAMPNTRPPIIDAPALALAQKLAEAGARCDFALFLGASSENAGTLGTVAGSAAGLKLYLNETFSELRLDSVVQWMEHFETWPSHLPIVAHAEQQTVAAVLMVAQLTQRSVHICHVARKEEILLIKAAKARGLPVTCEVAPHHLFLSHDDLERLGPGKGEVRPELGSRQDVEALWENMAVIDCFASDHAPHTLEEKCGSRPPPGFPGLETMLPLLLTAVSEGRLSLDDLLQRLHHNPRRIFHLPPQEDTYVEVDLEHEWTIPSHMPFSKAHWTPFEGQKVKGTVRRVVLRGEVAYIDGQVLVPPGYGQDVRKWPQGAVPQLPPSAPATSEMTTTPERPRRGIPGLPDGRFHLPPRIHRASDPGLPAEEPKEKSSRKVAEPELMGTPDGTCYPPPPVPRQASPQNLGTPGLLHPQTSPLLHSLVGQHILSVQQFTKDQMSHLFNVAHTLRMMVQKERSLDILKGKVMASMFYEVSTRTSSSFAAAMARLGGAVLSFSEATSSVQKGESLADSVQTMSCYADVVVLRHPQPGAVELAAKHCRRPVINAGDGVGEHPTQALLDIFTIREELGTVNGMTITMVGDLKHGRTVHSLACLLTQYRVSLRYVAPPSLRMPPTVRAFVASRGTKQEEFESIEEALPDTDVLYMTRIQKERFGSTQEYEACFGQFILTPHIMTRAKKKMVVMHPMPRVNEISVEVDSDPRAAYFRQAENGMYIRMALLATVLGRF

SEQ ID NO: 1964 - protein, 267 aa, Homo sapiens
MPRSCCSRSGALLLALLLQASMEVRGWCLESSQCQDLTTESNLLECIRACKPDLSAETPMFPGNGDEQPLTENPRKYVMGHFRWDRFGRRNSSSSGSSGAGQKREDVSAGEDCGPLPEGGPEPRSDGAKPGPREGKRSYSMEHFRWGKPVGKKRRPVKVYPNGAEDESAEAFPLEFKRELTGQRLREGDGPDGPADDGAGAQADLEHSLLVAAEKKDEGPYRMEHFRWGSPPKDKRYGGFMTSEKSQTPLVTLFKNAIIKNAYKKGE

SEQ ID NO: 1965 - protein, 912 aa, Homo sapiens
MPAMPSSGPGDTSSSAAEREEDRKDGEEQEEPRGKEERQEPSTTARKVGRPGRKRKHPPVESGDTPKDPAVISKSPSMAQDSGASELLPNGDLEKRSEPQPEEGSPAGGQKGGAPAEGEGAAETLPEASRAVENGCCTPKEGRGAPAEAGKEQKETNIESMKMEGSRGRLRGGLGWESSLRQRPMPRLTFQAGDPYYISKRKRDEWLARWKREAEKKAKVIAGMNAVEENQGPGESQKVEEASPPAVQQPTDPASPTVATTPEPVGSDAGDKNATKAGDDEPEYEDGRGFGIGELVWGKLRGFSWWPGRIVSWWMTGRSRAAEGTRWVMWFGDGKFSVVCVEKLMPLSSFCSAFHQATYNKQPMYRKAIYEVLQVASSRAGKLFPVCHDSDESDTAKAVEVQNKPMIEWALGGFQPSGPKGLEPPEEEKNPYKEVYTDMWVEPEAAAYAPPPPAKKPRKSTAEKPKVKEIIDERTRERLVYEVRQKCRNIEDICISCGSLNVTLEHPLFVGGMCQNCKNCFLECAYQYDDDGYQSYCTICCGGREVLMCGNNNCCRCFCVECVDLLVGPGAAQAAIKEDPWNCYMCGHKGTYGLLRRREDWPSRLQMFFANNHDQEFDPPKVYPPVPAEKRKPIRVLSLFDGIATGLLVLKDLGIQVDRYIASEVCEDSITVGMVRHQGKIMYVGDVRSVTQKHIQEWGPFDLVIGGSPCNDLSIVNPARKGLYEGTGRLFFEFYRLLHDARPKEGDDRPFFWLFENVVAMGVSDKRDISRFLESNPVMIDAKEVSAAHRARYFWGNLPGMNRPLASTVNDKLELQECLEHGRIAKFSKVRTITTRSNSIKQGKDQHFPVFMNEKEDILWCTEMERVFGFPVHYTDVSNMSRLARQRLLGRSWSVPVIRHLFAPLKEYFACV

SEQ ID NO: 1966 - protein, 793 aa, Homo sapiens
MASKTKASEALKVVARCRPLSRKEEAAGHEQILTMDVKLGQVTLRNPRAAPGELPKTFTFDAVYDASSKQADLYDETVRPLIDSVLQGFNGTVFAYGQTGTGKTYTMQGTWVEPELRGVIPNAFEHIFTHISRSQNQQYLVRASYLEIYQEEIRDLLSKEPGKRLELKENPETGVYIKDLSSFVTKNVKEIEHVMNLGNQTRAVGSTHMNEVSSRSHAIFIITVECSERGSDGQDHIRVGKLNLVDLAGSERQNKAGPNTAGGAATPSSGGGGGGGGSGGGAGGERPKEASKINLSLSALGNVIAALAGNRSTHIPYRDSKLTRLLQDSLGGNAKTIMVATLGPASHSYDESLSTLRFANRAKNIKNKPRVNEDPKDTLLREFQEEIARLKAQLEKRGMLGKRPRRKSSRRKKAVSAPPGYPEGPVIEAWVAEEEDDNNNNHRPPQPILESALEKNMENYLQEQKERLEEEKAAIQDDRSLVSEEKQKLLEEKEKMLEDLRREQQATELLAAKYKAMESKLLIGGRNIMDHTNEQQKMLELKRQEIAEQKRREREMQQEMMLRDEETMELRGTYTSLQQEVEVKTKKLKKLYAKLQAVKAEIQDQHDEYIRVRQDLEEAQNEQTRELKLKYLIIENFIPPEEKNKIMNRLFLDCEEEQWKFQPLVPAGVSSSQMKKRPTSAVGYKRPISQYARVAMAMGSHPRYRAENIMFLELDVSPPAVFEMEFSHDQEQDPRALHMERLMRLDSFLERPSTSKVRKSRSWCQSPQRPPPSTTHASLASASLRPATVADHE

SEQ ID NO: 1967 - protein, 625 aa, Homo sapiens
MPGTKRFQHVIETPEPGKWELSGYEAAVPITEKSNPLTQDLDKADAENIVRLLGQCDAEIFQEEGQALSTYQRLYSESILTTMVQVAGKVQEVLKEPDGGLVVLSGGGTSGRMAFLMSVSFNQLMKGLGQKPLYTYLIAGGDRSVVASREGTEDSALHGIEELKKVAAGKKRVIVIGISVGLSAPFVAGQMDCCMNNTAVFLPVLVGFNPVSMARNDPIEDWSSTFRQVAERMQKMQEKQKAFVLNPAIGPEGLSGSSRMKGGSATKILLETLLLAAHKTVDQGIAASQRCLLEILRTFERAHQVTYSQSPKIATLMKSVSTSLEKKGHVYLVGWQTLGIIAIMDGVECIHTFGADFRDVRGFLIGDHSDMFNQKAELTNQGPQFTFSQEDFLTSILPSLTEIDTVVFIFTLDDNLTEVQTIVEQVKEKTNHIQALAHSTVGQTLLIPLKKLFPSIISITWPLLFFEYEGNFIQKFQRELSTKWVLNTVSTGAHVLLGKILQNHMLDLRISNSKLFWRALAMLQRFSGQSKARCIESLLRAIHFPQPLSDDIRAAPISCHVQVAHEKEQVIPIALLSLLFRCSITEAQAHLAAAPSVCEAVRSALAGPGQKRTADPLEILEPDVQ

SEQ ID NO: 1968 - protein, 388 aa, Homo sapiens
MRCLYGRVGGARRKMAASAAAAELQASGGPRHPVCLLVLGMAGSGKTTFVQRLTGHLHAQGTPPYVINLDPAVHEVPFPANIDIRDTVKYKEVMKQYGLGPNGGIVTSLNLFATRFDQVMKFIEKAQNMSKYVLIDTPGQIEVFTWSASGTIITEALASSFPTVVIYVMDTSRSTNPVTFMSNMLYACSILYKTKLPFIVVMNKTDIIDHSFAVEWMQDFEAFQDALNQETTYVSNLTRSMSLVLDEFYSSLRVVGVSAVLGTGLDELFVQVTSAAEEYEREYRPEYERLKKSLANAESQQQREQLERLRKDMGSVALDAGTAKDSLSPVLHPSDLILTRGTLDEEDEEADSDTDDIDHRVTEESHEEPAFQNFMQESMAQYWKRNNK

SEQ ID NO: 1969 - protein, 652 aa, Homo sapiens
FVKFANIEEDTPSYHRSYDFFVSRFSEMCHSSHDDLEIKTKIRMSGIKGLQGVVRKTVNDELQANIWDPQHMDKIVPSLLFNLQHVEEAESRSPSPLQAPEKEKESPAELAERCLRELLGRAAFGNIKNAIKPVLIHLDNHSLWEPKVFAIRCFKIIMYSIQPQHSHLVIQQLLGHLDANSRSAATVRAGIVEVLSEAAVIAATGSVGPTVLEMFNTLLRQLRLSIDYALTGSYDGAVSLGTKIIKEHEERMFQEAVIKTVGSFASTLPTYQRSEVILFIMSKVPRPSLHQAVDTGRTGENRNRLTQIMLLKSLLQVSTGFQCNNMMSALPSNFLDRLLSTALMEDAEIRLFVLEILISFIDRHGNRHKFSTISTLSDISVLKLKVDKCSRQDTVFMKKHSQQLYRHIYLSCKEETNVQKHYEALYGLLALISIELANEEVVVDLIRLVLAVQVIETRKKEAPYMLPEDVFVERPRLSQNLDGVVIELLFRQSKISEVLGGSGYNSDRLCLPYIPQLTDEDRLSKRRSIGETISLQVEVESRNSPEKEERVPAEEITYETLKKAIVDSVAVEEQERERRRQVVEKFQKAPFEEIAAHCGARASLLQSKLNQIFEITIRPPPSPSGTITAAYGQPQNHSIPVYEMKFPDLCVY

SEQ ID NO: 1970 - protein, 539 aa, Homo sapiens
MGRAGGGGPGRGPPPLLLFLGAALVLASGAVPAREAGSAVEAEELVKGSPAWEPPANDTREEAGPPAAGEDEASWTAPGGELAGPEEVLQESAAVTGTAWLEADSPGLGGVTAEAGSGDAQALPATLQAPHEVLGQSIMPPAIPEATEASGPPSPTPGDKLSPASELPKESPLEVWLNLGGSTPDPQGPELTYPFQGTLEPQPASDIIDIDYFEGLDGEGRGADLGSFPGSPGTSENHPDTEGETPSWSLLDLYDDFTPFDESDFYPTTSFYDDLDEEEEEEEDDKDAVGGGDLEDENELLVPTGKPGLGPGTGQPTSRWHAVPPQHTLGSVPGSSIALRPRPGEPGRDLASSENGTECRSGFVRHNGSCRSVCDLFPSYCHNGGQCYLVENIGAFCRCNTQDYIWHKGMRCESIITDFQVMCVAVGSAALVLLLLFMMTVFFAKKLYLLKTENTKLRRTNKFRTPSELHNDNFSLSTIAEGSHPNDDPSAPHKIQEVLKSCLKEEESFNIQNSMSPKLEGGKGDQADLDVNCLQNNLT

SEQ ID NO: 1971 - protein, 680 aa, Homo sapiens
MNFETSRCATLQYCPDPYIQRFVETPAHFSWKESYYRSTMSQSTQTNEFLSPEVFQHIWDFLEQPICSVQPIDLNFVDEPSEDGATNKIEISMDCIRMQDSDLSDPMWPQYTNLGLLNSMDQQIQNGSSSTSPYNTDHAQNSVTAPSPYAQPSSTFDALSPSPAIPSNTDYPGPHSFDVSFQQSSTAKSATWTYSTELKKLYCQIAKTCPIQIKVMTPPPQGAVIRAMPVYKKAEHVTEVVKRCPNHELSREFNEGQIAPPSHLIRVEGNSHAQYVEDPITGRQSVLVPYEPPQVGTEFTTVLYNFMCNSSCVGGMNRRPILIIVTLETRDGQVLGRRCFEARICACPGRDRKADEDSIRKQQVSDSTKNGDGTKRPFRQNTHGIQMTSIKKRRSPDDELLYLPVRGRETYEMLLKIKESLELMQYLPQHTIETYRQQQQQQHQHLLQKQTSIQSPSSYGNSSPPLNKMNSMNKLPSVSQLINPQQRNALTPTTIPDGMGANIPMMGTHMPMAGDMNGLSPTQALPPPLSMPSTSHCTPPPPYPTDCSIVSFLARLGCSSCLDYFTTQGLTTIYQIEHYSMDDLASLKIPEQFRHAIWKGILDHRQLHEFSSPSHLLRTPSSASTVSVGSSETRGERVIDAVRFTLRQTISFPPRDEWNDFNFDMDARRNKQQRIKEEGE

SEQ ID NO: 1972 - protein, 305 aa, Homo sapiens
MTSRTPLLVTACLYYSYCNSRHLQQGVRKSKRPVFSHCQVPETQKTDTRHLSGARAGVCPCCHPDGLLATMRDLLQYIACFFAFFSAGFLIVATWTDCWMVNADDSLEVSTKCRGLWWECVTNAFDGIRTCDEYDSILAEHPLKLVVTRALMITADILAGFGFLTLLLGLDCVKFLPDEPYIKVRICFVAGATLLIAGTPGIIGSVWYAVDVYVERSTLVLHNIFLGIQYKFGWSCWLGMAGSLGCFLAGAVLTCCLYLFKDVGPERNYPYSLRKAYSAAGVSMAKSYSAPRTETAKMYAVDTRV

SEQ ID NO: 1973 - protein, 1035 aa, Homo sapiens
MGGPAAPRGAGRLRALLLALVVAGIPAGAYNLDPQRPVHFQGPADSFFGYAVLEHFHDNTRWVLVGAPKADSKYSPSVKSPGAVFKCRVHTNPDRRCTELDMARGKNRGTSCGKTCREDRDDEWMGVSLARQPKADGRVLACAHRWKNIYYEADHILPHGFCYIIPSNLQAKGRTLIPCYEEYKKKYGEEHGSCQAGIAGFFTEELVVMGAPGSFYWAGTIKVLNLTDNTYLKLNDEVIMNRRYTYLGYAVTAGHFSHPSTIDVVGGAPQDKGIGKVYIFRADRRSGTLIKIFQASGKKMGSYFGSSLCAVDLNGDGLSDLLVGAPMFSEIRDEGQVTVYINRGNGALEEQLALTGDGAYNAHFGESIASLDDLDNDGFPDVAIGAPKEDDFAGAVYIYHGDAGGIVPQYSMKLSGQKINPVLRMFGQSISGGIDMDGNGYPDVTVGAFMSDSVVLLRARPVITVDVSIFLPGSINITAPQCHDGQQPVNCLNVTTCFSFHGKHVPGEIGLNYVLMADVAKKEKGQMPRVYFVLLGETMGQVTEKLQLTYMEETCRHYVAHVKRRVQDVISPIVFEAAYSLSEHVTGEEERELPPLTPVLRWKKGQKIAQKNQTVFERNCRSEDCAADLQLQGKLLLSSMDEKTLYLALGAVKNISLNISISNLGDDAYDANVSFNVSRELFFINMWQKEEMGISCELLESDFLKCSVGFPFMRSKSKYEFSVIFDTSHLSGEEEVLSFIVTAQSGNTERSESLHDNTLVLMVPLMHEVDTSITGIMSPTSFVYGESVDAANFIQLDDLECHFQPINITLQVYNTGPSTLPGSSVSISFPNRLSSGGAEMFHVQEMVVGQEKGNCSFQKNPTPCIIPQEQENIFHTIFAFFTKSGRKVLDCEKPGISCLTAHCNFSALAKEESRTIDIYMLLNTEILKKDSSSVIQFMSRAKVKVDPALRVVEIAHGNPEEVTVVFEALHNLEPRGYVVGWIIAISLLVGILIFLLLAVLLWKMGFFRRRYKEIIEAEKNRKENEDSWDWVQKNQ

SEQ ID NO: 1974 - protein, 768 aa, Homo sapiens
MNGDSRAAVVTSPPPTTAPHKERYFDRVDENNPEYLRERNMAPDLRQDFNMMEQKKRVSMILQSPAFCEELESMIQEQFKKGKNPTGLLALQQIADFMTTNVPNVYPAAPQGGMAALNMSLGMVTPVNDLRGSDSIAYDKGEKLLRCKLAAFYRLADLFGWSQLIYNHITTRVNSEQEHFLIVPFGLLYSEVTASSLVKINLQGDIVDRGSTNLGVNQAGFTLHSAIYAARPDVKCVVHIHTPAGAAVSAMKCGLLPISPEALSLGEVAYHDYHGILVDEEEKVLIQKNLGPKSKVLILRNHGLVSVGESVEEAFYYIHNLVVACEIQVRTLASAGGPDNLVLLNPEKYKAKSRSPGSPVGEGTGSPPKWQIGEQEFEALMRMLDNLGYRTGYPYRYPALREKSKKYSDVEVPASVTGYSFASDGDSGTCSPLRHSFQKQQREKTRWLNSGRGDEASEEGQNGSSPKSKTKVWTNITHDHVKPLLQSLSSGVCVPSCITNCLWTKEDGHRTSTSAVPNLFVPLNTNPKEVQEMRNKIREQNLQDIKTAGPQSQVLCGVVMDRSLVQGELVTASKAIIEKEYQPHVIVSTTGPNPFTTLTDRELEEYRREVERKQKGSEENLDEAREQKEKSPPDQPAVPHPPPSTPIKLEEDLVPEPTTGDDSDAATFKPTLPDLSPDEPSEALGFPMLEKEEEAHRPPSPTEAPTEASPEPAPDPAPVAEEAAPSAVEEGAAADPGSDGSPGKSPSKKKKKFRTPSFLKKSKKKSDS

SEQ ID NO: 1975 - protein, 546 aa, Homo sapiens
MELENIVANSLLLKARQEKDYSSLCDKQPIGRRLFRQFCDTKPTLKRHIEFLDAVAEYEVADDEDRSDCGLSILDRFFNDKLAAPLPEIPPDVVTECRLGLKEENPSKKAFEECTRVAHNYLRGEPFEEYQESSYFSQFLQWKWLERQPVTKNTFRHYRVLGKGGFGEVCACQVRATGKMYACKKLQKKRIKKRKGEAMALNEKRILEKVQSRFVVSLAYAYETKDALCLVLTIMNGGDLKFHIYNLGNPGFDEQRAVFYAAELCCGLEDLQRERIVYRDLKPENILLDDRGHIRISDLGLATEIPEGQRVRGRVGTVGYMAPEVVNNEKYTFSPDWWGLGCLIYEMIQGHSPFKKYKEKVKWEEVDQRIKNDTEEYSEKFSEDAKSICRMLLTKNPSKRLGCRGEGAAGVKQHPVFKDINFRRLEANMLEPPFCPDPHAVYCKDVLDIEQFSVVKGIYLDTADEDFYARFATGCVSIPWQNEMIESGCFKDINKSESEEALPLDLDKNIHTPVSRPNRGFFYRLFRRGGCLTMVPSEKEVEPKQC

SEQ ID NO: 1976 - protein, 504 aa, Homo sapiens
MSQPRTPEQALDTPGDCPPGRRDEDAGEGIQCSQRMLSFSDALLSIIATVMILPVTHTEISPEQQFDRSVQRLLATRIAVYLMTFLIVTVAWAAHTRLFQVVGKTDDTLALLNLACMMTITFLPYTFSLMVTFPDVPLGIFLFCVCVIAIGVVQALIVGYAFHFPHLLSPQIQRSAHRALYRRHVLGIVLQGPALCFAAAIFSLFFVPLSYLLMVTVILLPYVSKVTGWCRDRLLGHREPSAHPVEVFSFDLHEPLSKERVEAFSDGVYAIVATLLILDICEDNVPDPKDVKERFSGSLVAALSATGPRFLAYFGSFATVGLLWFAHHSLFLHVRKATRAMGLLNTLSLAFVGGLPLAYQQTSAFARQPRDELERVRVSCTIIFLASIFQLAMWTTALLHQAETLQPSVWFGGREHVLMFAKLALYPCASLLAFASTCLLSRFSVGIFHLMQIAVPCAFLLLRLLVGLALATLRVLRGLARPEHPPPAPTGQDDPQSQLLPAPC

SEQ ID NO: 1977 - protein, 540 aa, Homo sapiens
MARKQNRNSKELGLVPLTDDTSHAGPPGPGRALLECDHLRSGVPGGRRRKDWSCSLLVASLAGAFGSSFLYGYNLSVVNAPTPYIKAFYNESWERRHGRPIDPDTLTLLWSVTVSIFAIGGLVGTLIVKMIGKVLGRKHTLLANNGFAISAALLMACSLQAGAFEMLIVGRFIMGIDGGVALSVLPMYLSEISPKEIRGSLGQVTAIFICIGVFTGQLLGLPELLGKESTWPYLFGVIVVPAVVQLLSLPFLPDSPRYLLLEKHNEARAVKAFQTFLGKADVSQEVEEVLAESRVQRSIRLVSVLELLRAPYVRWQVVTVIVTMACYQLCGLNAIWFYTNSIFGKAGIPPAKIPYVTLSTGGIETLAAVFSGLVIEHLGRRPLLIGGFGLMGLFFGTLTITLTLQDHAPWVPYLSIVGILAIIASFCSGPGGIPFILTGEFFQQSQRPAAFIIAGTVNWLSNFAVGLLFPFIQKSLDTYCFLVFATICITGAIYLYFVLPETKNRTYAEISQAFSKRNKAYPPEEKIDSAVTDGKINGRP

SEQ ID NO: 1978 - protein, 1228 aa, Homo sapiens
MKGARLFVLLSSLWSGGIGLNNSKHSWTIPEDGNSQKTMPSASVPPNKIQSLQILPTTRVMSAEIATTPEARTSEDSLLKSTLPPSETSAPAEGVRNQTLTSTEKAEGVVKLQNLTLPTNASIKFNPGAESVVLSNSTLKFLQSFARKSNEQATSLNTVGGTGGIGGVGGTGGVGNRAPRETYLSRGDSSSSQRTDYQKSNFETTRGKNWCAYVHTRLSPTVILDNQVTYVPGGKGPCGWTGGSCPQRSQKISNPVYRMQHKIVTSLDWRCCPGYSGPKCQLRAQEQQSLIHTNQAESHTAVGRGVAEQQQQQGCGDPEVMQKMTDQVNYQAMKLTLLQKKIDNISLTVNDVRNTYSSLEGKVSEDKSREFQSLLKGLKSKSINVLIRDIVREQFKIFQNDMQETVAQLFKTVSSLSEDLESTRQIIQKVNESVVSIAAQQKFVLVQENRPTLTDIVELRNHIVNVRQEMTLTCEKPIKELEVKQTHLEGALEQEHSRSILYYESLNKTLSKLKEVHEQLLSTEQVSDQKNAPAAESVSNNVTEYMSTLHENIKKQSLMMLQMFEDLHIQESKINNLTVSLEMEKESLRGECEDMLSKCRNDFKFQLKDTEENLHVLNQTLAEVLFPMDNKMDKMSEQLNDLTYDMEILQPLLEQGASLRQTMTYEQPKEAIVIRKKIENLTSAVNSLNFIIKELTKRHNLLRNEVQGRDDALERRINEYALEMEDGLNKTMTIINNAIDFIQDNYALKETLSTIKDNSEIHHKCTSDMETILTFIPQFHRLNDSIQTLVNDNQRYNFVLQVAKTLAGIPRDEKLNQSNFQKMYQMFNETTSQVRKYQQNMSHLEEKLLLTTKISKNFETRLQDIESKVTQTLIPYYISVKKGSVVTNERDQALQLQVLNSRFKALEAKSIHLSINFFSLNKTLHEVLTMCHNASTSVSELNATIPKWIKHSLPDIQLLQKGLTEFVEPIIQIKTQAALSNLTCCIDRSLPGSLANVVKSQKQVKSLPKKINALKKPTVNLTTVLIGRTQRNTDNIIYPEEYSSCSRHPCQNGGTCINGRTSFTCACRHPFTGDNCTIKLVEENALAPDFSKGSYRYAPMVAFFASHTYGMTIPGPILFNNLDVNYGASYTPRTGKFRIPYLGVYVFKYTIESFSAHISGFLVVDGIDKLAFESENINSEIHCDRVLTGDALLELNYGQEVWLRLAKGTIPAKFPPVTTFSGYLLYRT

SEQ ID NO: 1979 - protein, 833 aa, Homo sapiens
MLPFGDKTREMVNAWFAERVHTIPVCKEGIRGHTESCSCPLQQSPRADNSAPGTPTRKISASEFDRPLRPIVVKDSEGTVSFLSDSEKKEQMPLTPPRFDHDEGDQCSRLLELVKDISSHLDVTALCHKIFLHIHGLISADRYSLFLVCEDSSNDKFLISRLFDVAEGSTLEEVSNNCIRLEWNKGIVGHVAALGEPLNIKDAYEDPRFNAEVDQITGYKTQSILCMPIKNHREEVVGVAQAINKKSGNGGTFTEKDEKDFAAYLAFCGIVLHNAQLYETSLLENKRNQVLLDLASLIFEEQQSLEVILKKIAATIISFMQVQKCTIFIVDEDCSDSFSSVFHMECEELEKSSDTLTREHDANKINYMYAQYVKNTMEPLNIPDVSKDKRFPWTTENTGNVNQQCIRSLLCTPIKNGKKNKVIGVCQLVNKMEENTGKVKPFNRNDEQFLEAFVIFCGLGIQNTQMYEAVERAMAKQMVTLEVLSYHASAAEEETRELQSLAAAVVPSAQTLKITDFSFSDFELSDLETALCTIRMFTDLNLVQNFQMKHEVLCRWILSVKKNYRKNVAYHNWRHAFNTAQCMFAALKAGKIQNKLTDLEILALLIAALSHDLDHRGVNNSYIQRSEHPLAQLYCHSIMEHHHFDQCLMILNSPGNQILSGLSIEEYKTTLKIIKQAILATDLALYIKRRGEFFELIRKNQFNLEDPHQKELFLAMLMTACDLSAITKPWPIQQRIAELVATEFFDQGDRERKELNIEPTDLMNREKKNKIPSMQVGFIDAICLQLYEALTHVSEDCFPLLDGCRKNRQKWQALAEQQEKMLINGESGQAKRN

SEQ ID NO: 1980 - protein, 630 aa, Homo sapiens
MLGMYVPDRFSLKSSRVQDGMGLYTARRVRKGEKFGPFAGEKRMPEDLDENMDYRLMWEVRGSKGEVLYILDATNPRHSNWLRFVHEAPSQEQKNLAAIQEGENIFYLAVEDIETDTELLIGYLDSDMEAEEEEQQIMTVIKEGEVENSRRQSTAGRKDRLGCKEDYACPQCESSFTSEDILAEHLQTLHQKPTEEKEFKCKNCGKKFPVKQALQRHVLQCTAKSSLKESSRSFQCSVCNSSFSSASSFEQHQETCRGDARFVCKADSCGKRLKSKDALKRHQENVHTGDPKKKLICSVCNKKCSSASSLQEHRKIHEIFDCQECMKKFISANQLKRHMITHSEKRPYNCEICNKSFKRLDQVGAHKVIHSEDKPYKCKLCGKGFAHRNVYKNHKKTHSEERPFQCEECKALFRTPFSLQRHLLIHNSERTFKCHHCDATFKRKDTLNVHVQVVHERHKKYRCELCNKAFVTPSVLRSHKKTHTGEKEKICPYCGQKFASSGTLRVHIRSHTGERPYQCPYCEKGFSKNDGLKMHIRTHTREKPYKCSECSKAFSQKRGLDEHKRTHTGEKPFQCDVCDLAFSLKKMLIRHKMTHNPNRPLAECQFCHKKFTRNDYLKVHMDNIHGVADS

SEQ ID NO: 1981 - protein, 848 aa, Homo sapiens
MEGSPSLRRMTVMREKGRRQAVRGPAFMFNDRGTSLTAEEERFLDAAEYGNIPVVRKMLEESKTLNVNCVDYMGQNALQLAVGNEHLEVTELLLKKENLARIGDALLLAISKGYVRIVEAILNHPGFAASKRLTLSPCEQELQDDDFYAYDEDGTRFSPDITPIILAAHCQKYEVVHMLLMKGARIERPHDYFCKCGDCMEKQRHDSFSHSRSRINAYKGLASPAYLSLSSEDPVLTALELSNELAKLANIEKEFKNDYRKLSMQCKDFVVGVLDLCRDSEEVEAILNGDLESAEPLEVHRHKASLSRVKLAIKYEVKKFVAHPNCQQQLLTIWYENLSGLREQTIAIKCLVVLVVALGLPFLAIGYWIAPCSRLGKILRSPFMKFVAHAASFIIFLGLLVFNASDRFEGITTLPNITVTDYPKQIFRVKTTQFTWTEMLIMVWVLGMMWSECKELWLEGPREYILQLWNVLDFGMLSIFIAAFTARFLAFLQATKAQQYVDSYVQESDLSEVTLPPEIQYFTYARDKWLPSDPQIISEGLYAIAVVLSFSRIAYILPANESFGPLQISLGRTVKDIFKFMVLFIMVFFAFMIGMFILYSYYLGAKVNAAFTTVEESFKTLFWSIFGLSEVTSVVLKYDHKFIENIGYVLYGIYNVTMVVVLLNMLIAMINSSYQEIEDDSDVEWKFARSKLWLSYFDDGKTLPPPFSLVPSPKSFVYFIMRIVNFPKCRRRRLQKDIEMGMGNSKSRLNLFTQSNSRVFESHSFNSILNQPTRYQQIMKRLIKRYVLKAQVDKENDEVNEGELKEIKQDISSLRYELLEDKSQATEELAILIHKLSEKLNPSMLRCE

SEQ ID NO: 1982 - protein, 1187 aa, Homo sapiens
MPLRHWGMARGSKPVGDGAQPMAAMGGLKVLLHWAGPGGGEPWVTFSESSLTAEEVCIHIAHKVGITPPCFNLFALFDAQAQVWLPPNHILEIPRDASLMLYFRIRFYFRNWHGMNPREPAVYRCGPPGTEASSDQTAQGMQLLDPASFEYLFEQGKHEFVNDVASLWELSTEEEIHHFKNESLGMAFLHLCHLALRHGIPLEEVAKKTSFKDCIPRSFRRHIRQHSALTRLRLRNVFRRFLRDFQPGRLSQQMVMVKYLATLERLAPRFGTERVPVCHLRLLAQAEGEPCYIRDSGVAPTDPGPESAAGPPTHEVLVTGTGGIQWWPVEEEVNKEEGSSGSSGRNPQASLFGKKAKAHKAVGQPADRPREPLWAYFCDFRDITHVVLKEHCVSIHRQDNKCLELSLPSRAAALSFVSLVDGYFRLTADSSHYLCHEVAPPRLVMSIRDGIHGPLLEPFVQAKLRPEDGLYLIHWSTSHPYRLILTVAQRSQAPDGMQSLRLRKFPIEQQDGAFVLEGWGRSFPSVRELGAALQGCLLRAGDDCFSLRRCCLPQPGETSNLIIMRGARASPRTLNLSQLSFHRVDQKEITQLSHLGQGTRTNVYEGRLRVEGSGDPEEGKMDDEDPLVPGRDRGQELRVVLKVLDPSHHDIALAFYETASLMSQVSHTHLAFVHGVCVRGPENIMVTEYVEHGPLDVWLRRERGHVPMAWKMVVAQQLASALSYLENKNLVHGNVCGRNILLARLGLAEGTSPFIKLSDPGVGLGALSREERVERIPWLAPECLPGGANSLSTAMDKWGFGATLLEICFDGEAPLQSRSPSEKEHFYQRQHRLPEPSCPQLATLTSQCLTYEPTQRPSFRTILRDLTRLQPHNLADVLTVNPDSPASDPTVFHKRYLKKIRDLGEGHFGKVSLYCYDPTNDGTGEMVAVKALKADCGPQHRSGWKQEIDILRTLYHEHIIKYKGCCEDQGEKSLQLVMEYVPLGSLRDYLPRHSIGLAQLLLFAQQICEGMAYLHAQHYIHRDLAARNVLLDNDRLVKIGDFGLAKAVPEGHEYYRVREDGDSPVFWYAPECLKEYKFYYASDVWSFGVTLYELLTHCDSSQSPPTKFLELIGIAQGQMTVLRLTELLERGERLPRPDKCPCEVYHLMKNCWETEASFRPTFENLIPILKTVHEKYQGQAPSVFSVC

SEQ ID NO: 1983 - protein, 1745 aa, Homo sapiens
MGNRRDLGQPRAGLCLLLAALQLLPGTQADPVDVLKALGVQGGQAGVPEGPGFCPQRTPEGDRAFRIGQASTLGIPTWELFPEGHFPENFSLLITLRGQPANQSVLLSIYDERGARQLGLALGPALGLLGDPFRPLPQQVNLTDGRWHRVAVSIDGEMVTLVADCEAQPPVLGHGPRFISIAGLTVLGTQDLGEKTFEGDIQELLISPDPQAAFQACERYLPDCDNLAPAATVAPQGEPETPRPRRKGKGKGRKKGRGRKGKGRKKNKEIWTSSPPPDSAENQTSTDIPKTETPAPNLPPTPTPLVVTSTVTTGLNATILERSLDPDSGTELGTLETKAAREDEEGDDSTMGPDFRAAEYPSRTQFQIFPGAGEKGAKGEPAVIEKGQQFEGPPGAPGPQGVVGPSGPPGPPGFPGDPGPPGPAGLPGIPGIDGIRGPPGTVIMMPFQFAGGSFKGPPVSFQQAQAQAVLQQTQLSMKGPPGPVGLTGRPGPVGLPGHPGLKGEEGAEGPQGPRGLQGPHGPPGRVGKMGRPGADGARGLPGDTGPKGDRGFDGLPGLPGEKGQRGDFGHVGQPGPPGEDGERGAEGPPGPTGQAGEPGPRGLLGPRGSPGPTGRPGVTGIDGAPGAKGNVGPPGEPGPPGQQGNHGSQGLPGPQGLIGTPGEKGPPGNPGIPGLPGSDGPLGHPGHEGPTGEKGAQGPPGSAGPPGYPGPRGVKGTSGNRGLQGEKGEKGEDGFPGFKGDVGLKGDQGKPGAPGPRGEDGPEGPKGQAGQAGEEGPPGSAGEKGKLGVPGLPGYPGRPGPKGSIGFPGPLGPIGEKGKSGKTGQPGLEGERGPPGSRGERGQPGATGQPGPKGDVGQDGAPGIPGEKGLPGLQGPPGFPGPKGPPGHQGKDGRPGHPGQRGELGFQGQTGPPGPAGVLGPQGKTGEVGPLGERGPPGPPGPPGEQGLPGLEGREGAKGELGPPGPLGKEGPAGLRGFPGPKGGPGDPGPTGLKGDKGPPGPVGANGSPGERGPLGPAGGIGLPGQSGSEGPVGPAGKKGSRGERGPPGPTGKDGIPGPLGPLGPPGAAGPSGEEGDKGDVGAPGHKGSKGDKGDAGPPGQPGIRGPAGHPGPPGADGAQGRRGPPGLFGQKGDDGVRGFVGVIGPPGLQGLPGPPGEKGEVGDVGSMGPHGAPGPRGPQGPTGSEGTPGLPGGVGQPGAVGEKGERGDAGDPGPPGAPGIPGPKGDIGEKGDSGPSGAAGPPGKKGPPGEDGAKGSVGPTGLPGDLGPPGDPGVSGIDGSPGEKGDPGDVGGPGPPGASGEPGAPGPPGKRGPSGHMGREGREGEKGAKGEPGPDGPPGRTGPMGARGPPGRVGPEGLRGIPGPVGEPGLLGAPGQMGPPGPLGPSGLPGLKGDTGPKGEKGHIGLIGLIGPPGEAGEKGDQGLPGVQGPPGPKGDPGPPGPIGSLGHPGPPGVAGPLGQKGSKGSPGSMGPRGDTGPAGPPGPPGAPAELHGLRRRRRFVPVPLPVVEGGLEEVLASLTSLSLELEQLRRPPGTAERPGLVCHELHRNHPHLPDGEYWIDPNQGCARDSFRVFCNFTAGGETCLYPDKKFEIVKLASWSKEKPGGWYSTFRRGKKFSYVDADGSPVNVVQLNFLKLLSATARQNFTYSCQNAAAWLDEATGDYSHSARFLGTNGEELSFNQTTAATVSVPQDGCRLRKGQTKTLFEFSSSRAGFLPLWDVAATDFGQTNQKFGFELGPVCFSS

SEQ ID NO: 1984 - protein, 362 aa, Homo sapiens
MATAETALPSISTLTALGPFPDTQDDFLKWWRSEEAQDMGPGPPDPTEPPLHVKSEDQPGEEEDDERGADATWDLDLLLTNFSGPEPGGAPQTCALAPSEASGAQYPPPPETLGAYAGGPGLVAGLLGSEDHSGWVRPALRARAPDAFVGPALAPAPAPEPKALALQPVYPGPGAGSSGGYFPRTGLSVPAASGAPYGLLSGYPAMYPAPQYQGHFQLFRGLQGPAPGPATSPSFLSCLGPGTVGTGLGGTAEDPGVIAETAPSKRGRRSWARKRQAAHTCAHPGCGKSYTKSSHLKAHLRTHTGEKPYACTWEGCGWRFARSDELTRHYRKHTGQRPFRCQLCPRAFSRSDHLALHMKRHL

SEQ ID NO: 1985 - protein, 1541 aa, Homo sapiens
MSSAVGPRGPRPPTVPPPMQELPDLSHLTEEERNIIMAVMDRQKEEEEKEEAMLKCVVRDMAKPAACKTPRNAENQPHQPSPRLHQQFESYKEQVRKIGEEARRYQGEHKDDAPTCGICHKTKFADGCGHLCSYCRTKFCARCGGRVSLRSNNEDKVVMWVCNLCRKQQEILTKSGAWFFGSGPQQTSQDGTLSDTATGAGSEVPREKKARLQERSRSQTPLSTAAASSQDAAPPSAPPDRSKGAEPSQQALGPEQKQASSRSRSEPPRERKKTPGLSEQNGKGALKSERKRVPKTSAQPVEGAVEERERKERRESRRLEKGRSQDYPDTPEKRDEGKAADEEKQRKEEDYQTRYRSDPNLARYPVKPPPEEQQMRMHARVSRARHERRHSDVALPRTEAGAALPEGKAGKRAPAAARASPPDSPRAYSAERTAETRAPGAKQLTNHSPPAPRHGPVPAEAPELKAQEPLRKQSRLDPSSAVLMRKAKREKVETMLRNDSLSSDQSESVRPSPPKPHRSKRGGKKRQMSVSSSEEEGVSTPEYTSCEDVELESESVSEKGDLDYYWLDPATWHSRETSPISSHPVTWQPSKEGDRLIGRVILNKRTTMPKDSGALLGLKVVGGKMTDLGRLGAFITKVKKGSLADVVGHLRAGDEVLEWNGKPLPGATNEEVYNIILESKSEPQVEIIVSRPIGDIPRIPESSHPPLESSSSSFESQKMERPSISVISPTSPGALKDAPQVLPGQLSVKLWYDKVGHQLIVNVLQATDLPARVDGRPRNPYVKMYFLPDRSDKSKRRTKTVKKILEPKWNQTFVYSHVHRRDFRERMLEITVWDQPRVQEEESEFLGEILIELETALLDDEPHWYKLQTHDESSLPLPQPSPFMPRRHIHGESSSKKLQRSQRISDSDISDYEVDDGIGVVPPVGYRSSARESKSTTLTVPEQQRTTHHRSRSVSPHRGNDQGKPRSRLPNVPLQRSLDEIHPTRRSRSPTRHHDASRSPVDHRTRDVDSQYLSEQDSELLMLPRAKRGRSAECLHTTRHLVRHYKTLPPKMPLLQSSSHWNIYSELQPFLDRARSASTNCLRPDTSLHSPERERMHRQRSPTQSPPADTSFSSRRGRQLPQVPVRSGSIEQASLVVEERTRQMKMKVHRFKQTTGSGSSQELDREQYSKYNIHKDQYRSCDNVSAKSSDSDVSDVSAISRTSSASRLSSTSFMSEQSERPRGRISSFTPKMQGRRMGTSGRSIMKSTSVSGEMYTLEHNDGSQSDTAVGTVGAGGKKRRSSLSAKVVAIVSRRSRSTSQLSQTESGHKKLKSTIQRSTETGMAAEMRKMVRQPSRESTDGSINSYSSEGNLIFPGVRLGADSQFSDFLDGLGPAQLVGRQTLATPAMGDIQIGMEDKKGQLEVEVIRARSLTQKPGSKSTPAPYVKVYLLENGACIAKKKTRIARKTLDPLYQQSLVFDESPQGKVLQVIVWGDYGRMDHKCFMGVAQILLEELDLSSMVIGWYKLFPPSSLVDPTLTPLTRRASQSSLESSTGPPCIRS

SEQ ID NO: 1986 - protein, 827 aa, Homo sapiens
MRGCLRLALLCALPWLLLAASPGHPAKSPRQPPAPRRDPFDAARGADFDHVYSGVVNLSTENIYSFNYTSQPDQVTAVRVYVNSSSENLNYPVLVVVRQQKEVLSWQVPLLFQGLYQRSYNYQEVSRTLCPSEATNETGPLQQLIFVDVASMAPLGAQYKLLVTKLKHFQLRTNVAFHFTASPSQPQYFLYKFPKDVDSVIIKVVSEMAYPCSVVSVQNIMCPVYDLDHNVEFNGVYQSMTKKAAITLQKKDFPGEQFFVVFVIKPEDYACGGSFFIQEKENQTWNLQRKKNLEVTIVPSIKESVYVKSSLFSVFIFLSFYLGCLLVGFVHYLRFQRKSIDGSFGSNDGSGNMVASHPIAASTPEGSNYGTIDESSSSPGRQMSSSDGGPPGQSDTDSSVEESDFDTMPDIESDKNIIRTKMFLYLSDLSRKDRRIVSKKYKIYFWNIITIAVFYALPVIQLVITYQTVVNVTGNQDICYYNFLCAHPLGVLSAFNNILSNLGHVLLGFLFLLIVLRRDILHRRALEAKDIFAVEYGIPKHFGLFYAMGIALMMEGVLSACYHVCPNYSNFQFDTSFMYMIAGLCMLKLYQTRHPDINASAYSAYASFAVVIMVTVLGVVFGKNDVWFWVIFSAIHVLASLALSTQIYYMGRFKIDLGIFRRAAMVFYTDCIQQCSRPLYMDRMVLLVVGNLVNWSFALFGLIYRPRDFASYMLGIFICNLLLYLAFYIIMKLRSSEKVLPVPLFCIVATAVMWAAALYFFFQNLSSWEGTPAESREKNRECILLDFFDDHDIWHFLSATALFFSFLVLLTLDDDLDVVRRDQIPVF

SEQ ID NO: 1987 - protein, 798 aa, Homo sapiens
MAWDMCNQDSESVWSDIECAALVGEDQPLCPDLPELDLSELDVNDLDTDSFLGGLKWCSDQSEIISNQYNNEPSNIFEKIDEENEANLLAVLTETLDSLPVDEDGLPSFDALTDGDVTTDNEASPSSMPDGTPPPQEAEEPSLLKKLLLAPANTQLSYNECSGLSTQNHANHNHRIRTNPAIVKTENSWSNKAKSICQQQKPQRRPCSELLKYLTTNDDPPHTKPTENRNSSRDKCTSKKKSHTQSQSQHLQAKPTTLSLPLTPESPNDPKGSPFENKTIERTLSVELSGTAGLTPPTTPPHKANQDNPFRASPKLKSSCKTVVPPPSKKPRYSESSGTQGNNSTKKGPEQSELYAQLSKSSVLTGGHEERKTKRPSLRLFGDHDYCQSINSKTEILINISQELQDSRQLENKDVSSDWQGQICSSTDSDQCYLRETLEASKQVSPCSTRKQLQDQEIRAELNKHFGHPSQAVFDDEADKTGELRDSDFSNEQFSKLPMFINSGLAMDGLFDDSEDESDKLSYPWDGTQSYSLFNVSPSCSSFNSPCRDSVSPPKSLFSQRPQRMRSRSRSFSRHRSCSRSPYSRSRSRSPGSRSSSRSCYYYESSHYRHRTHRNSPLYVRSRSRSPYSRRPRYDSYEEYQHERLKREEYRREYEKRESERAKQRERQRQKAIEERRVIYVGKIRPDTTRTELRDRFEVFGEIEECTVNLRDDGDSYGFITYRYTCDAFAALENGYTLRRSNETDFELYFCGRKQFFKSNYADLDSNSDDFDPASTKSKYDSLDFDSLLKEAQRSLRR

SEQ ID NO: 1988 - protein, 1097 aa, Homo sapiens
MAPRPKKQPDKNPLHGRELNVVPSLGRQTSLTTSVIPKAEQSVAYKDFIYFTVFEGNVRNVSEVSVEYLCSQPCVVNLEAVVSSEFRSSIPVYKKRWKNEKHLHTSRTQIVHVKFPSIMVYRDDYFIRHSISVSAVIVRAWITHKYSGRDWNVKWEENLLHAVAKNYTLLQTIPPFERPFKDHQVCLEWNMGYIWNLRANRIPQCPLENDVVALLGFPYASSGENTGIVKKFPRFRNRELEATRRQRMDYPVFTVSLWLYLLHYCKANLCGILYFVDSNEMYGTPSVFLTEEGYLHIQMHLVKGEDLAVKTKFIIPLKEWFRLDISFNGGQIVVTTSIGQDLKSYHNQTISFREDFHYNDTAGYFIIGGSRYVAGIEGFFGPLKYYRLRSLHPAQIFNPLLEKQLAEQIKLYYERCAEVQEIVSVYASAAKHGGERQEACHLHNSYLDLQRRYGRPSMCRAFPWEKELKDKHPSLFQALLEMDLLTVPRNQNESVSEIGGKIFEKAVKRLSSIDGLHQISSIVPFLTDSSCCGYHKASYYLAVFYETGLNVPRDQLQGMLYSLVGGQGSERLSSMNLGYKHYQGIDNYPLDWELSYAYYSNIATKTPLDQHTLQGDQAYVETIRLKDDEILKVQTKEDGDVFMWLKHEATRGNAAAQQRLAQMLFWGQQGVAKNPEAAIEWYAKGALETEDPALIYDYAIVLFKGQGVKKNRRLALELMKKAASKGLHQAVNGLGWYYHKFKKNYAKAAKYWLKAEEMGNPDASYNLGVLHLDGIFPGVPGRNQTLAGEYFHKAAQGGHMEGTLWCSLYYITGNLETFPRDPEKAVVWAKHVAEKNGYLGHVIRKGLNAYLEGSWHEALLYYVLAAETGIEVSQTNLAHICEERPDLARRYLGVNCVWRYYNFSVFQIDAPSFAYLKMGDLYYYGHQNQSQDLELSVQMYAQAALDGDSQGFFNLALLIEEGTIIPHHILDFLEIDSTLHSNNISILQELYERCWSHSNEESFSPCSLAWLYLHLRLLWGAILHSALIYFLGTFLLSILIAWTVQYFQSVSASDPPPRPSQASPDTATSTASPAVTPAADASDQDQPTVTNNPEPRG

SEQ ID NO: 1989 - protein, 732 aa, Homo sapiens
MSETSRTAFGGRRAVPPNNSNAAEDDLPTVELQGVVPRGVNLQEFLNVTSVHLFKERWDTNKVDHHTDKYENNKLIVRRGQSFYVQIDFSRPYDPRRDLFRVEYVIGRYPQENKGTYIPVPIVSELQSGKWGAKIVMREDRSVRLSIQSSPKCIVGKFRMYVAVWTPYGVLRTSRNPETDTYILFNPWCEDDAVYLDNEKEREEYVLNDIGVIFYGEVNDIKTRSWSYGQFEDGILDTCLYVMDRAQMDLSGRGNPIKVSRVGSAMVNAKDDEGVLVGSWDNIYAYGVPPSAWTGSVDILLEYRSSENPVRYGQCWVFAGVFNTFLRCLGIPARIVTNYFSAHDNDANLQMDIFLEEDGNVNSKLTKDSVWNYHCWNEAWMTRPDLPVGFGGWQAVDSTPQENSDGMYRCGPASVQAIKHGHVCFQFDAPFVFAEVNSDLIYITAKKDGTHVVENVDATHIGKLIVTKQIGGDGMMDITDTYKFQEGQEEERLALETALMYGAKKPLNTEGVMKSRSNVDMDFEVENAVLGKDFKLSITFRNNSHNRYTITAYLSANITFYTGVPKAEFKKETFDVTLEPLSFKKEAVLIQAGEYMGQLLEQASLHFFVTARINETRDVLAKQKSTVLTIPEIIIKVRGTQVVGSDMTVTVEFTNPLKETLRNVWVHLDGPGVTRPMKKMFREIRPNSTVQWEEVCRPWVSGHRKLIASMSSDSLRHVYGELDVQIQRRPSM

SEQ ID NO: 1990 - protein, 973 aa, Homo sapiens
MNFLRGVMGGQSAGPQHTEAETIQKLCDRVASSTLLDDRRNAVRALKSLSKKYRLEVGIQAMEHLIHVLQTDRSDSEIIGYALDTLYNIISNEEEEEVDDVEEENSTRQSEDLGSQFTEIFIKQQENVTLLLSLLEEFDFHVRWPGVKLLTSLLKQLGPQVQQIILVSPMGVSRLMDLLADSREVIRNDGVLLLQALTRSNGAIQKIVAFENAFERLLDIISEEGNSDGGIVVEDCLILLQNLLKNNNSNQNFFKEGSYIQRMKPWFEVGDENSGWSAQKVTNLHLMLQLVRVLVSPTNPPGATSSCQKAMFQCGLLQQLCTILMATGVPADILTETINTVSEVIRGCQVNQDYFASVNAPSNPPRPAIVVLLMSMVNERQPFVLRCAVLYCFQCFLYKNQKGQGEIVSTLLPSTIDATGNSVSAGQLLCGGLFSTDSLSNWCAAVALAHALQENATQKEQLLRVQLATSIGNPPVSLLQQCTNILSQGDKIDRRGSKIQTRVGLLMLLCTWLSNCPIAVTHFLHNSANVPFLTGQIAENLGEEEQLVQGLCALLLGISIYFNDNSLESYMKEKLKQLIEKRIGKENFIEKLGFISKHELYSRASQKPQPNFPSPEYMIFDHEFTKLVKELEGVITKAIYKSSEEDKKEEEVKKTLEQHDNIVTHYKNMIREQDLQLEELRQQVSTLKCQNEQLQTAVTQQVSQIQQHKDQYNLLKIQLGKDNQHQGSYSEGAQMNGIQPEEIGRLREEIEELKRNQELLQSQLTEKDSMIENMKSSQTSGTNEQSSAIVSARDSEQVAELKQELATLKSQLNSQSVEITKLQTEKQELLQKTEAFAKSVEVQGETETIIATKTTDVEGRLSALLQETKELKNEIKALSEERTAIKEQLDSSNSTIAILQTEKDKLELEITDSKKEQDDLLVLLADQDQKILSLKNKLKDLGHPVEEEDELESGDQEDEDDESEDPGKDLDHI

SEQ ID NO: 1991 - protein, 533 aa, Homo sapiens
MGPRGAASLPRGPGPRRLLLPVVLPLLLLLLLAPPGSGAGASRPPHLVFLLADDLGWNDVGFHGSRIRTPHLDALAAGGVLLDNYYTQPLCTPSRSQLLTGRYQIRTGLQHQIIWPCQPSCVPLDEKLLPQLLKEAGYTTHMVGKWHLGMYRKECLPTRRGFDTYFGYLLGSEDYYSHERCTLIDALNVTRCALDFRDGEEVATGYKNMYSTNIFTKRAIALITNHPPEKPLFLYLALQSVHEPLQVPEEYLKPYDFIQDKNRHHYAGMVSLMDEAVGNVTAALKSSGLWNNTVFIFSTDNGGQTLAGGNNWPLRGRKWSLWEGGVRGVGFVASPLLKQKGVKNRELIHISDWLPTLVKLARGHTNGTKPLDGFDVWKTISEGSPSPRIELLHNIDPNFVDSSPCPRNSMAPAKDDSSLPEYSAFNTSVHAAIRHGNWKLLTGYPGCGYWFPPPSQYNVSEIPSSDPPTKTLWLFDIDRDPEERHDLSREYPHIVTKLLSRLQFYHKHSVPVYFPAQDPRCDPKATGVWGPWM

SEQ ID NO: 1992 - protein, 885 aa, Homo sapiens
MGCAPSIHVSQSGVIYCRDSDESSSPRQTTSVSQGPAAPLPGLFVQTDAADAIPPSRASGPPSVARVRRARTELGSGSSAGSAAPAATTSRGRRRHCCSSAEAETQTCYTSVKQVSSAEVRIGPMRLTQDPIQVLLIFAKEDSQSDGFWWACDRAGYRCNIARTPESALECFLDKHHEIIVIDHRQTQNFDAEAVCRSIRATNPSEHTVILAVVSRVSDDHEEASVLPLLHAGFNRRFMENSSIIACYNELIQIEHGEVRSQFKLRACNSVFTALDHCHEAIEITSDDHVIQYVNPAFERMMGYHKGELLGKELADLPKSDKNRADLLDTINTCIKKGKEWQGVYYARRKSGDSIQQHVKITPVIGQGGKIRHFVSLKKLCCTTDNNKQIHKIHRDSGDNSQTEPHSFRYKNRRKESIDVKSISSRGSDAPSLQNRRYPSMARIHSMTIEAPITKVINIINAAQENSPVTVAEALDRVLEILRTTELYSPQLGTKDEDPHTSDLVGGLMTDGLRRLSGNEYVFTKNVHQSHSHLAMPITINDVPPCISQLLDNEESWDFNIFELEAITHKRPLVYLGLKVFSRFGVCEFLNCSETTLRAWFQVIEANYHSSNAYHNSTHAADVLHATAFFLGKERVKGSLDQLDEVAALIAATVHDVDHPGRTNSFLCNAGSELAVLYNDTAVLESHHTALAFQLTVKDTKCNIFKNIDRNHYRTLRQAIIDMVLATEMTKHFEHVNKFVNSINKPMAAEIEGSDCECNPAGKNFPENQILIKRMMIKCADVANPCRPLDLCIEWAGRISEEYFAQTDEEKRQGLPVVMPVFDRNTCSIPKSQISFIDYFITDMFDAWDAFAHLPALMQHLADNYKHWKTLDDLKCKSLRLPSDS

SEQ ID NO: 1993 - protein, 495 aa, Homo sapiens
MDSLAESRWPPGLAVMKTIDDLLRCGICFEYFNIAMIIPQCSHNYCSLCIRKFLSYKTQCPTCCVTVTEPDLKNNRILDELVKSLNFARNHLLQFALESPAKSPASSSSKNLAVKVYTPVASRQSLKQGSRLMDNFLIREMSGSTSELLIKENKSKFSPQKEASPAAKTKETRSVEEIAPDPSEAKRPEPPSTSTLKQVTKVDCPVCGVNIPESHINKHLDSCLSREEKKESLRSSVHKRKPLPKTVYNLLSDRDLKKKLKEHGLSIQGNKQQLIKRHQEFVHMYNAQCDALHPKSAAEIVREIENIEKTRMRLEASKLNESVMVFTKDQTEKEIDEIHSKYRKKHKSEFQLLVDQARKGYKKIAGMSQKTVTITKEDESTEKLSSVCMGQEDNMTSVTNHFSQSKLDSPEELEPDREEDSSSCIDIQEVLSSSESDSCNSSSSDIIRDLLEEEEAWEASHKNDLQDTEISPRQNRRTRAAESAEIEPRNKRNRN

SEQ ID NO: 1994 - protein, 1083 aa, Homo sapiens
MPTNFTVVPVEAHADGGGDETAERTEAPGTPEGPEPERPSPGDGNPRENSPFLNNVEVEQESFFEGKNMALFEEEMDSNPMVSSLLNKLANYTNLSQGVVEHEEDEESRRREAKAPRMGTFIGVYLPCLQNILGVILFLRLTWIVGVAGVLESFLIVAMCCTCTMLTAISMSAIATNGVVPAGGSYYMISRSLGPEFGGAVGLCFYLGTTFAGAMYILGTIEIFLTYISPGAAIFQAEAAGGEAAAMLHNMRVYGTCTLVLMALVVFVGVKYVNKLALVFLACVVLSILAIYAGVIKSAFDPPDIPVCLLGNRTLSRRSFDACVKAYGIHNNSATSALWGLFCNGSQPSAACDEYFIQNNVTEIQGIPGAASGVFLENLWSTYAHAGAFVEKKGVPSVPVAEESRASALPYVLTDIAASFTLLVGIYFPSVTGIMAGSNRSGDLKDAQKSIPTGTILAIVTTSFIYLSCIVLFGACIEGVVLRDKFGEALQGNLVIGMLAWPSPWVIVIGSFFSTCGAGLQSLTGAPRLLQAIARDGIVPFLQVFGHGKANGEPTWALLLTVLICETGILIASLDSVAPILSMFFLMCYLFVNLACAVQTLLRTPNWRPRFKFYHWTLSFLGMSLCLALMFICSWYYALSAMLIAGCIYKYIEYRGAEKEWGDGIRGLSLNAARYALLRVEHGPPHTKNWRPQVLVMLNLDAEQAVKHPRLLSFTSQLKAGKGLTIVGSVLEGTYLDKHMEAQRAEENIRSLMSTEKTKGFCQLVVSSSLRDGMSHLIQSAGLGGLKHNTVLMAWPASWKQEDNPFSWKNFVDTVRDTTAAHQALLVAKNVDSFPQNQERFGGGHIDVWWIVHDGGMLMLLPFLLRQHKVWRKCRMRIFTVAQVDDNSIQMKKDLQMFLYHLRISAEVEVVEMVENDISAFTYERTLMMEQRSQMLKQMQLSKNEQEREAQLIHDRNTASHTAAAARTQAPPTPDKVQMTWTREKLIAEKYRSRDTSLSGFKDLFSMKPDQSNVRRMHTAVKLNGVVLNKSQDAQLVLLNMPGPPKNRQGDENYMEFLEVLTEGLNRVLLVRGGGREVITIYS

SEQ ID NO: 1995 - protein, 834 aa, Homo sapiens
MWGLGARGPDRGLLLALALGGLARAGGVEVEPGGAHGESGGFQVVTFEWAHVQDPYVIALWILVASLAKIGFHLSHKVTSVVPESALLIVLGLVLGGIVWAADHIASFTLTPTVFFFYLLPPIVLDAGYFMPNRLFFGNLGTILLYAVVGTVWNAATTGLSLYGVFLSGLMGDLQIGLLDFLLFGSLMAAVDPVAVLAVFEEVHVNEVLFIIVFGESLLNDAVTVVLYNVFESFVALGGDNVTGVDCVKGIVSFFVVSLGGTLVGVVFAFLLSLVTRFTKHVRIIEPGFVFIISYLSYLTSEMLSLSAILAITFCGICCQKYVKANISEQSATTVRYTMKMLASSAETIIFMFLGISAVNPFIWTWNTAFVLLTLVFISVYRAIGVVLQTWLLNRYRMVQLEPIDQVVLSYGGLRGAVAFALVVLLDGDKVKEKNLFVSTTIIVVFFTVIFQGLTIKPLVQWLKVKRSEHREPRLNEKLHGRAFDHILSAIEDISGQIGHNYLRDKWSHFDRKFLSRVLMRRSAQKSRDRILNVFHELNLKDAISYVAEGERRGSLAFIRSPSTDNVVNVDFTPRSSTVEASVSYLLRENVSAVCLDMQSLEQRRRSIRDAEDMVTHHTLQQYLYKPRQEYKHLYSRHELTPTEDEKQDREIFHRTMRKRLESFKSTKLGLNQNKKAAKLYKRERAQKRRNSSIPNGKLPMESPAQNFTIKEKDLELSDTEEPPNYDEEMSGGIEFLASVTKDTASDSPAGIDNPVFSPDEALDRSLLARLPPWLSPGETVVPSQRARTQIPYSPGTFCRLMPFRLSSKSVDSFLQADGPEERPPAALPESTHM

SEQ ID NO: 1996 - protein, 1706 aa, Homo sapiens
MGVPKFYRWISERYPCLSEVVKEHQIPEFDNLYLDMNGIIHQCSHPNDDDVHFRISDDKIFTDIFHYLEVLFRIIKPRKVFFMAVDGVAPRAKMNQQRGRRFRSAKEAEDKIKKAIEKGETLPTEARFDSNCITPGTEFMARLHEHLKYFVNMKISTDKSWQGVTIYFSGHETPGEGEHKIMEFIRSEKAKPDHDPNTRHCLYGLDADLIMLGLTSHEAHFSLLREEVRFGGKKTQRVCAPEETTFHLLHLSLMREYIDYEFSVLKEKITFKYDIERIIDDWILMGFLVGNDFIPHLPHLHINHDALPLLYGTYVTILPELGGYINESGHLNLPRFEKYLVKLSDFDREHFSEVFVDLKWFESKVGNKYLNEAAGVAAEEARNYKEKKKLKGQENSLCWTALDKNEGEMITSKDNLEDETEDDDLFETEFRQYKRTYYMTKMGVDVVSDDFLADQAACYVQAIQWILHYYYHGVQSWSWYYPYHYAPFLSDIHNISTLKIHFELGKPFKPFEQLLAVLPAASKNLLPACYQHLMTNEDSPIIEYYPPDFKTDLNGKQQEWEAVVLIPFIDEKRLLEAMETCNHSLKKEERKRNQHSECLMCWYDRDTEFIYPSPWPEKFPAIERCCTRYKIISLDAWRVDINKNKITRIDQKALYFCGFPTLKHIRHKFFLKKSGVQVFQQSSRGENMMLEILVDAESDELTVENVASSVLGKSVFVNWPHLEEARVVAVSDGETKFYLEEPPGTQKLYSGRTAPPSKVVHLGDKEQSNWAKEVQGISEHYLRRKGIIINETSAVVYAQLLTGRKYQINQNGEVRLEKQWSKQVVPFVYQTIVKDIRAFDSRFSNIKTLDDLFPLRSMVFMLGTPYYGCTGEVQDSGDVITEGRIRVIFSIPCEPNLDALIQNQHKYSIKYNPGYVLASRLGVSGYLVSRFTGSIFIGRGSRRNPHGDHKANVGLNLKFNKKNEEVPGYTKKVGSEWMYSSAAEQLLAEYLERAPELFSYIAKNSQEDVFYEDDIWPGENENGAEKVQEIITWLKGHPVSTLSRSSCDLQILDAAIVEKIEEEVEKCKQRKNNKKVRVTVKPHLLYRPLEQQHGVIPDRDAEFCLFDRVVNVRENFSVPVGLRGTIIGIKGANREADVLFEVLFDEEFPGGLTIRCSPGRGYRLPTSALVNLSHGSRSETGNQKLTAIVKPQPAVHQHSSSSSVSSGHLGALNHSPQSLFVPTQVPTKDDDEFCNIWQSLQGSGKMQYFQPTIQEKGAVLPQEISQVNQHHKSGFNDNSVKYQQRKHDPHRKFKEECKSPKAECWSQKMSNKQPNSGIENFLASLNISKENEVQSSHHGEPPSEEHLSPQSFAMGTRMLKEILKIDGSNTVDHKNEIKQIANEIPVSSNRRDEYGLPSQPKQNKKLASYMNKPHSANEYHNVQSMDNMCWPAPSQIPPVSTPVTELSRICSLVGMPQPDFSFLRMPQTMTVCQVKLSNGLLVHGPQCHSENEAKEKAALFALQQLGSLGMNFPLPSQVFANYPSAVPPGTIPPAFPPPTGWDHYGSNYALGAANIMPSSSHLFGSMPWGPSVPVPGKPFHHTLYSGTMPMAGGIPGGVHNQFIPLQVTKKRVANKKNFENKEAQSSQATPVQTSQPDSSNIVKVSPRESSSASLKSSPIAQPASSFQVETASQGHSISHHKSTPISSSRRKSRKLAVNFGVSKPSE

SEQ ID NO: 1997 - protein, 553 aa, Homo sapiens
MVDMGALDNLIANTAYLQARKPSDCDSKELQRRRRSLALPGLQGCAELRQKLSLNFHSLCEQQPIGRRLFRDFLATVPTFRKAATFLEDVQNWELAEEGPTKDSALQGLVATCASAPAPGNPQPFLSQAVATKCQAATTEEERVAAVTLAKAEAMAFLQEQPFKDFVTSAFYDKFLQWKLFEMQPVSDKYFTEFRVLGKGGFGEVCAVQVKNTGKMYACKKLDKKRLKKKGGEKMALLEKEILEKVSSPFIVSLAYAFESKTHLCLVMSLMNGGDLKFHIYNVGTRGLDMSRVIFYSAQIACGMLHLHELGIVYRDMKPENVLLDDLGNCRLSDLGLAVEMKGGKPITQRAGTNGYMAPEILMEKVSYSYPVDWFAMGCSIYEMVAGRTPFKDYKEKVSKEDLKQRTLQDEVKFQHDNFTEEAKDICRLFLAKKPEQRLGSREKSDDPRKHHFFKTINFPRLEAGLIEPPFVPDPSVVYAKDIAEIDDFSEVRGVEFDDKDKQFFKNFATGAVPIAWQEEIIETGLFEELNDPNRPTGCEEGNSSKSGVCLLL

SEQ ID NO: 1998 - protein, 992 aa, Homo sapiens
MARGGAACKSDARLLLGRDALRPAPALLAPAVLLGAALGLGLGLWLGCRAGRQRTRHQKDDTQNLLKNLESNAQTPSETGSPSRRRKREVQMSKDKEAVDECEPPSNSNITAFALKAKVIYPINQKFRPLADGSSNPSLHENLKQAVLPHQPVEASPSSSLGSLSQGEKDDCSSSSSVHSATSDDRFLSRTFLRVNAFPEVLACESVDVDLCIYSLHLKDLLHLDTALRQEKHMMFIQIFKMCLLDLLPKKKSDDELYQKILSKQEKDLEELEKGLQVKLSNTEMSGAGDSEYITLADVEKKEREYSEQLIDNMEAFWKQMANIQHFLVDQFKCSSSKARQLMMTLTERMIAAEGLLCDSQELQALDALERTMGRAHMAKVIEFLKLQVQEETRCRLAAISHGLELLAGEGKLSGRQKEELLTQQHKAFWQEAERFSREFVQRGKDLVTASLAHQVEGTAKLTLAQEEEQRSFLAEAQPTADPEKFLEAFHEVLERQRLMQCDLEEEENVRATEAVVALCQELYFSTVDTFQKFVDALFLQTLPGMTGLPPEECDYLRQEVQENAAWQLGKSNRFRRQQWKLFQELLEQDQQVWMEECALSSVLQTHLREDHEGTIRGVLGRLGGLTEESTRCVLQGHDLLLRSALRRLALRGNALATLTQMRLSGKKHLLQELREQRALEQGSSQCLDEHQWQLLRALEARVLEEASRLEEEAQQTRLQLQQRLLAEAQEVGQLLQQHMECAIGQALLVHARNAATKSRAKDRDDFKRTLMEAAVESVYVTSAGVSRLVQAYYQQIGRIMEDHEERKLQHLKTLQGERMENYKLRKKQELSNPSSGSRTAGGAHETSQAVHQRMLSQQKRFLAQFPVHQQMRLHAQQQQAGVMDLLEAQLETQLQEAEQNFISELAALARVPLAESKLLPAKRGLLEKPLRTKRKKPLPQERGDLGVPNNEDLASGDQTSGSLSSKRLSQQESEAGDSGNSKKMLKRRSNL

SEQ ID NO: 1999 - protein, 348 aa, Homo sapiens
MAATLGPLGSWQQWRRCLSARDGSRMLLLLLLLGSGQGPQQVGAGQTFEYLKREHSLSKPYQGVGTGSSSLWNLMGNAMVMTQYIRLTPDMQSKQGALWNRVPCFLRDWELQVHFKIHGQGKKNLHGDGLAIWYTKDRMQPGPVFGNMDKFVGLGVFVDTYPNEEKQQERVFPYISAMVNNGSLSYDHERDGRPTELGGCTAIVRNLHYDTFLVIRYVKRHLTIMMDIDGKHEWRDCIEVPGVRLPRGYYFGTSSITGDLSDNHDVISLKLFELTVERTPEEEKLHRDVFLPSVDNMKLPEMTAPLPPLSGLALFLIVFFSLVFSVFAIVIGIILYNKWQEQSRKRFY

SEQ ID NO: 2000 - protein, 535 aa, Homo sapiens
MRLRNGTVATALAFITSFLTLSWYTTWQNGKEKLIAYQREFLALKERLRIAEHRISQRSSELNTIVQQFKRVGAETNGSKDALNKFSDNTLKLLKELTSKKSLQVPSIYYHLPHLLKNEGSLQPAVQIGNGRTGVSIVMGIPTVKREVKSYLIETLHSLIDNLYPEEKLDCVIVVFIGETDIDYVHGVVANLEKEFSKEISSGLVEVISPPESYYPDLTNLKETFGDSKERVRWRTKQNLDYCFLMMYAQEKGIYYIQLEDDIIVKQNYFNTIKNFALQLSSEEWMILEFSQLGFIGKMFQAPDLTLIVEFIFMFYKEKPIDWLLDHILWVKVCNPEKDAKHCDRQKANLRIRFRPSLFQHVGLHSSLSGKIQKLTDKDYMKPLLLKIHVNPPAEVSTSLKVYQGHTLEKTYMGEDFFWAITPIAGDYILFKFDKPVNVESYLFHSGNQEHPGDILLNTTVEVLPFKSEGLEISKETKDKRLEDGYFRIGKFENGVAEGMVDPSLNPISAFRLSVIQNSAVWAILNEIHIKKATN

SEQ ID NO: 2001 - protein, 619 aa, Homo sapiens
MPDPAAHLPFFYGSISRAEAEEHLKLAGMADGLFLLRQCLRSLGGYVLSLVHDVRFHHFPIERQLNGTYAIAGGKAHCGPAELCEFYSRDPDGLPCNLRKPCNRPSGLEPQPGVFDCLRDAMVRDYVRQTWKLEGEALEQAIISQAPQVEKLIATTAHERMPWYHSSLTREEAERKLYSGAQTDGKFLLRPRKEQGTYALSLIYGKTVYHYLISQDKAGKYCIPEGTKFDTLWQLVEYLKLKADGLIYCLKEACPNSSASNASGAAAPTLPAHPSTLTHPQRRIDTLNSDGYTPEPARITSPDKPRPMPMDTSVYESPYSDPEELKDKKLFLKRDNLLIADIELGCGNFGSVRQGVYRMRKKQIDVAIKVLKQGTEKADTEEMMREAQIMHQLDNPYIVRLIGVCQAEALMLVMEMAGGGPLHKFLVGKREEIPVSNVAELLHQVSMGMKYLEEKNFVHRDLAARNVLLVNRHYAKISDFGLSKALGADDSYYTARSAGKWPLKWYAPECINFRKFSSRSDVWSYGVTMWEALSYGQKPYKKMKGPEVMAFIEQGKRMECPPECPPELYALMSDCWIYKWEDRPDFLTVEQRMRACYYSLASKVEGPPGSTQKAEAACA

SEQ ID NO: 2002 - protein, 1150 aa, Homo sapiens
MAATYRLVVSTVNHYSSVVIDRRFEQAIHYCTGTCHTFTHGIDCIVVHHSVCADLLHIPVSQFKDADLNSMFLPHENGLSSAEGDYPQQAFTGIPRVKRGSTFQNTYNLKDIAGEAISFASGKIKEFSFEKLKNSNHAAYRKGRKVKSDSFNRRSVDLDLLCGHYNNDGNAPSFGLLRSSSVEEKPLSHRNSLDTNLTSMFLQNFSEEDLVTQILEKHKIDNFSSGTDIKMCLDILLKCSEDLKKCTDIIKQCIKKKSGSSISEGSGNDTISSSETVYMNVMTRLASYLKKLPFEFMQSGNNEALDLTELISNMPSLQLTPFSPVFGTEQPPKYEDVVQLSASDSGRFQTIELQNDKPNSRKMDTVQSIPNNSTNSLYNLEVNDPRTLKAVQVQSQSLTMNPLENVSSDDLMETLYIEEESDGKKALDKGQKTENGPSHELLKVNEHRAEFPEHATHLKKCPTPMQNEIGKIFEKSFVNLPKEDCKSKVSKFEEGDQRDFTNSSSQEEIDKLLMDLESFSQKMETSLREPLAKGKNSNFLNSHSQLTGQTLVDLEPKSKVSSPIEKVSPSCLTRIIETNGHKIEEEDRALLLRILESIEDFAQELVECKSSRGSLSQEKEMMQILQETLTTSSQANLSVCRSPVGDKAKDTTSAVLIQQTPEVIKIQNKPEKKPGTPLPPPATSPSSPRPLSPVPHVNNVVNAPLSINIPRFYFPEGLPDTCSNHEQTLSRIETAFMDIEEQKADIYEMGKIAKVCGCPLYWKAPMFRAAGGEKTGFVTAQSFIAMWRKLLNNHHDDASKFICLLAKPNCSSLEQEDFIPLLQDVVDTHPGLTFLKDAPEFHSRYITTVIQRIFYTVNRSWSGKITSTEIRKSNFLQTLALLEEEEDINQITDYFSYEHFYVIYCKFWELDTDHDLYISQADLSRYNDQASSSRIIERIFSGAVTRGKTIQKEGRMSYADFVWFLISEEDKRNPTSIEYWFRCMDVDGDGVLSMYELEYFYEEQCERMEAMGIEPLPFHDLLCQMLDLVKPAVDGKITLRDLKRCRMAHIFYDTFFNLEKYLDHEQRDPFAVQKDVENDGPEPSDWDRFAAEEYETLVAEESAQAQFQEGFEDYETDEPASPSEFGNKSNKILSASLPEKCGKLQSVDEE

SEQ ID NO: 2003 - protein, 597 aa, Homo sapiens
MFPVAPKPQDSSQPSDRLMTEKQQEEAEWESINVLLMMHGLKPLSLVKRTDLKDLIIFDKQSSQRMRQNLKLLVEETSCQQNMIQELIETNQQLRNELQLEQSRAANQEQRANDLEQIMESVKSKIGELEDESLSRACHQQNKIKDLQKEQKTLQVKCQHYKKKRTEQEETIASLQMEVCRLKKEEEDRIVTQNRVFAYLCKRVPHTVLDRQLLCLIDYYESKIRKIHTQRQYKEDESQSEEENDYRNLDASPTYKGLLMSLQNQLKESKSKIDALSSEKLNLQKDLETRPTQHELRLYKQQVKKLEKALKKNVKLQELINHKKAEDTEKKDEPSKYNQQQALIDQRYFQVLCSINSIIHNPRAPVIIYKQTKGGVQNFNKDLVQDCGFEHLVPVIEMWADQLTSLKDLYKSLKTLSAELVPWLNLKKQDENEGIKVEDLLFIVDTMLEEVENKEKDSNMPHFQTLQAIVSHFQKLFDVPSLNGVYPRMNEVYTRLGEMNNAVRNLQELLELDSSSSLCVLVSTVGKLCRLINEDVNEQVMQVLGPEDLQSIIYKLEEHEEFFPAFQAFTNDLLEILEIDDLDAIVPAVKKLKVLSY

SEQ ID NO: 2004 - protein, 780 aa, Homo sapiens
MKPGATGESDLAEVLPQHKFDSKSLEAYLNQHLSGFGAEREATLTIAQYRAGKSNPTFYLQKGFQTYVLRKKPPGSLLPKAHQIDREFKVQKALFSIGFPVPKPILYCSDTSVIGTEFYVMEHVQGRIFRDLTIPGLSPAERSAIYVATVETLAQLHSLNIQSLQLEGYGIGAGYCKRQVSTWTKQYQAAAHQDIPAMQQLSEWLMKNLPDNDNEENLIHGDFRLDNIVFHPKECRVIAVLDWELSTIGHPLSDLAHFSLFYFWPRTVPMINQGSYSENSGIPSMEELISIYCRCRGINSILPNWNFFLALSYFKMAGIAQGVYSRYLLGNNSSEDSFLFANIVQPLAETGLQLSKRTFSTVLPQIDTTGQLFVQTRKGQEVLIKVKHFMKQHILPAEKEVTEFYVQNENSVDKWGKPLVIDKLKEMAKVEGLWNLFLPAVSGLSHVDYALIAEETGKCFFAPDVFNCQAPDTGNMEVLHLYGSEEQKKQWLEPLLQGNITSCFCMTEPDVASSDATNIECSIQRDEDSYVINGKKWWSSGAGNPKCKIAIVLGRTQNTSLSRHKQHSMILVPMNTPGVKIIRPLSVFGYTDNFHGGHFEIHFNQVRVPATNLILGEGRGFEISQGRLGPGRIHHCMRTVGLAERALQIMCERATQRIAFKKKLYAHEVVAHWIAESRIAIEKIRLLTLKAAHSMDTLGSAGAKKEIAMIKVAAPRAVSKIVDWAIQVCGGAGVSQDYPLANMYAITRVLRLADGPDEVHLSAIATMELRDQAKRLTAKI

SEQ ID NO: 2005 - protein, 679 aa, Homo sapiens
MGIRGLMSFVEDHSNEFFTDLKLRDTKIVIDGYALFHRLCFSSNLDLRYGGDYDSFADVVQKFFESLFACNICPYVVLDGGCDISDKKLTTLKDRAREKIQMAHSLSVGGSGYVCPLLIREVFIQVLIKLRVCFVQCFSEADRDIMTLANHWNCPVLSSDSDFCIFDLKTGFCPLNSFQWRNMNTIKGTQNYIPAKCFSLDAFCHHFSNMNKALLPLFAVLCGNDHVNLPIMETFLSKARLPLGATSSKGRRHHRILGLLNWLSHFANPTEALDNVLKYLPKKDRENVKELLCCSMEEYQQSQVKLQDFFQCGTYVCPDALNLGLPEWVLVALAKGQLSPFISDALVLRRTILPTQVENMQQPNAHRISQPIRQIIYGLLLNASPHLDKTSWNALPPQPLAFSEVERINKNIRTSIIDAVELAKDHSDLSRLTELSLRRRQMLLLETLKVKQTILEPIPTSLKLPIAVSCYWLQHTETKAKLHHLQSLLLTMLVGPLIAIINSPGKEELQEDGAKMLYAEFQRVKAQTRLGTRLDLDTAHIFCQWQSCLQMGMYLNQLLSTPLPEPDLTRLYSGSLVHGLCQQLLASTSVESLLSICPEAKQLYEYLFNATRSYAPAEIFLPKGRSNSKKKRQKKQNTSCSKNRGRTTAHTKCWYEGNNRFGLLMVENLEEHSEASNIE

SEQ ID NO: 2006 - protein, 657 aa, Homo sapiens
MRLKIGFILRSLLVVGSFLGLVVLWSSLTPRPDDPSPLSRMREDRDVNDPMPNRGGNGLAPGEDRFKPVVPWPHVEGVEVDLESIRRINKAKNEQEHHAGGDSQKDIMQRQYLTFKPQTFTYHDPVLRPGILGNFEPKEPEPPGVVGGPGEKAKPLVLGPEFKQAIQASIKEFGFNMVASDMISLDRSVNDLRQEECKYWHYDENLLTSSVVIVFHNEGWSTLMRTVHSVIKRTPRKYLAEIVLIDDFSNKEHLKEKLDEYIKLWNGLVKVFRNERREGLIQARSIGAQKAKLGQVLIYLDAHCEVAVNWYAPLVAPISKDRTICTVPLIDVINGNTYEIIPQGGGDEDGYARGAWDWSMLWKRVPLTPQEKRLRKTKTEPYRSPAMAGGLFAIEREFFFELGLYDPGLQIWGGENFEISYKIWQCGGKLLFVPCSRVGHIYRLEGWQGNPPPIYVGSSPTLKNYVRVVEVWWDEYKDYFYASRPESQALPYGDISELKKFREDHNCKSFKWFMEEIAYDITSHYPLPPKNVDWGEIRGFETAYCIDSMGKTNGGFVELGPCHRMGGNQLFRINEANQLMQYDQCLTKGADGSKVMITHCNLNEFKEWQYFKNLHRFTHIPSGKCLDRSEVLHQVFISNCDSSKTTQKWEMNNIHSV

SEQ ID NO: 2007 - protein, 402 aa, Homo sapiens
MNFWRYCFFAFTLLSVVIFVRFYSSQLSPPKSYEKLNSSSERYFRKTACNHALEKMPVFLWENILPSPLRSVPCKDYLTQNHYITSPLSEEEAAFPLAYVMVIHKDFDTFERLFRAIYMPQNVYCVHVDEKAPAEYKESVRQLLSCFQNAFIASKTESVVYAGISRLQADLNCLKDLVASEVPWKYVINTCGQDFPLKTNREIVQHLKGFKGKNITPGVLPPDHAIKRTKYVHQEHTDKGGFFVKNTNILKTSPPHQLTIYFGTAYVALTRDFVDFVLRDQRAIDLLQWSKDTYSPDEHFWVTLNRVSGVPGSMPNASWTGNLRAIKWSDMEDRHGGCHGHYVHGICIYGNGDLKWLVNSPSLFANKFELNTYPLTVECLELRHRERTLNQSETAIQPSWYF

SEQ ID NO: 2008 - protein, 1060 aa, Homo sapiens
MASALNSKINPPGTCQGSKADGGAGWRMDCDPQMHVKMCKKIAQLTKVIYALNTRQDEAEASMEALREAHQEELQNAVAETKARLLQEQGCAEEEALLQRIQALESALELQKRLTEEALAESASCRLETKERELRVEAEHAERVLTLSREMLELKADYERRLQHLTSHEATPQGRLPQESPETKSEPGQGPEMQEVLLEVQRLRVENQQLSKDYARKAEELQATYERENEAIRQAMQQSVSQALWQWQEKESDLRKNFQVQESALQAQVRKLEGDLEHRGRKISDLKKYAQKLKERIQDLDVQLKEARQENSELKGTAKKLGEKLAVAKDRMMLQECRGTQQTDAMKTELVSENKVLREENDLEAGNLHPQQDQSCLKECPCMKGGTDMQTKKEASAETEYMKQQYEEDLRKIKHQTEEEKKHLKDQLVKRLEDLVKKHTVEIKSVRSSVEAERKKLQREVEAQLEEVRKKSEKEIKQLEEEKAALNVKLQNSLLEVLRLEEFIQQNKTRPTGAEESPQELGRQHCSILETQDPCLKLDETSPRGEEYQDKLAAEEGTSSDEEERTKVLLKEGSDPQPPLGSLLKEKTSKIQRLEEDWQSQKAKLQAQVSQMQQALEQCTSNYREDLQALKQLSDLEREKLQRELQETTQQNHAMKAQLEASHQRALRMLEKARHQELKATEERLKKESSHSLQIQHQTHRLELQALEEKARQELQEERERMQAQQALLLESLRQELSEQQAACSGHQKDLEALQAELRALGRQQASSQCPGDSKDHIIATEERGGPGQAGSPPGAAGQGSGEGCGLWEENAQLQDAVRRLRAEVEQHQQEAQKLRDQRRFLEETQQAQRAREVETLRQEHRKEMQAMVADFSSAQAQLQARLAALEAELKDSGEKPGKGASRPEDLQLIGRLQTRLKEREDIIKQLTEERRFHYAAFPSAMSHRNRSFSFNPHPGYLTPSMKKKKVEDVPSRVVSVPNLASYAKNFLSGDLSSRINAPPITTSPSLDPSPSCGRTYKPNQSTDAKTATRTPDGETAQAKEVQQKQGSPHQEWFTKYFSF

SEQ ID NO: 2009 - protein, 791 aa, Homo sapiens
MGEERWVSLTPEEFDQLQKYSEYSSKKIKDALTEFNEGGSLKQYDPHEPISYDVFKLFMRAYLEVDLPQPLSTHLFLAFSQKPRHETSDHPTEGASNSEANSADTNIQNADNATKADEACAPDTESNMAEKQAPAEDQVAATPLEPPVPRSSSSESPVVYLKDVVCYLSLLETGRPQDKLEFMFRLYDSDENGLLDQAEMDCIVNQMLHIAQYLEWDPTELRPILKEMLQGMDYDRDGFVSLQEWVHGGMTTIPLLVLLGMDDSGSKGDGRHAWTMKHFKKPTYCNFCHIMLMGVRKQGLCCTYCKYTVHERCVSRNIPGCVKTYSKAKRSGEVMQHAWVEGNSSVKCDRCHKSIKCYQSVTARHCVWCRMTFHRKCELSTLCDGGELRDHILLPTSICPITRDRPGEKSDGCVSAKGELVMQYKIIPTPGTHPLLVLVNPKSGGRQGERILRKFHYLLNPKQVFNLDNGGPTPGLNFFRDTPDFRVLACGGDGTVGWILDCIDKANFAKHPPVAVLPLGTGNDLARCLRWGGGYEGGSLTKILKDIEQSPLVMLDRWHLEVIPREEVENGDQVPYSIMNNYFSIGVDASIAHRFHVMREKHPEKFNSRMKNKLWYFEFGTSETFAATCKKLHDHIELECDGVGVDLSNIFLEGIAILNIPSMYGGTNLWGENKKNRAVIRESRKGVTDPKELKFCVQDLSDQLLEVVGLEGAMEMGQIYTGLKSAGRRLAQCASVTIRTNKLLPMQVDGEPWMQPCCTIKITHKNQAPMMMGPPQKSSFFSLRRKSRSKD

SEQ ID NO: 2010 - protein, 966 aa, Homo sapiens
MANFQEHLSCSSSPHLPFSESKTFNGLQDELTAMGNHPSPKLLEDQQEKGMVRTELIESVHSPVTTTVLTSVSEDSRDQFENSVLQLREHDESETAVSQGNSNTVDGESTSGTEDIKIQFSRSGSGSGGFLEGLFGCLRPVWNIIGKAYSTDYKLQQQDTWEVPFEEISELQWLGSGAQGAVFLGKFRAEEVAIKKVREQNETDIKHLRKLKHPNIIAFKGVCTQAPCYCIIMEYCAHGQLYEVLRAGRKITPRLLVDWSTGIASGMNYLHLHKIIHRDLKSPNVLVTHTDAVKISDFGTSKELSDKSTKMSFAGTVAWMAPEVIRNEPVSEKVDIWSFGVVLWELLTGEIPYKDVDSSAIIWGVGSNSLHLPVPSTCPDGFKILMKQTWQSKPRNRPSFRQTLMHLDIASADVLATPQETYFKSQAEWREEVKKHFEKIKSEGTCIHRLDEELIRRRREELRHALDIREHYERKLERANNLYMELSAIMLQLEMREKELIKREQAVEKKYPGTYKRHPVRPIIHPNAMEKLMKRKGVPHKSGMQTKRPDLLRSEGIPTTEVAPTASPLSGSPKMSTSSSKSRYRSKPRHRRGNSRGSHSDFAAILKNQPAQENSPHPTYLHQAQSQYPSLHHHNSLQQQYQQPPPAMSQSHHPRLNMHGQDIATCANNLRYFGPAAALRSPLSNHAQRQLPGSSPDLISTAMAADCWRSSEPDKGQAGPWGCCQADAYDPCLQCRPEQYGSLDIPSAEPVGRSPDLSKSPAHNPLLENAQSSEKTEENEFSGCRSESSLGTSHLGTPPALPRKTRPLQKSGDDSSEEEEGEVDSEVEFPRRQRPHRCISSCQSYSTFSSENFSVSDGEEGNTSDHSNSPDELADKLEDRLAEKLDDLLSQTPEIPIDISSHSDGLSDKECAVRRVKTQMSLGKLCVEERGYENPMQFEESDCDSSDGECSDATVRTNKHYSSATW

SEQ ID NO: 2011 - protein, 382 aa, Homo sapiens
MGLLLPLALCILVLCCGAMSPPQLALNPSALLSRGCNDSDVLAVAGFALRDINKDRKDGYVLRLNRVNDAQEYRRGGLGSLFYLTLDVLETDCHVLRKKAWQDCGMRIFFESVYGQCKAIFYMNNPSRVLYLAAYNCTLRPVSKKKIYMTCPDCPSSIPTDSSNHQVLEAATESLAKYNNENTSKQYSLFKVTRASSQWVVGPSYFVEYLIKESPCTKSQASSCSLQSSDSVPVGLCKGSLTRTHWEKFVSVTCDFFESQAPATGSENSAVNQKPTNLPKVEESQQKNTPPTDSPSKAGPRGSVQYLPDLDDKNSQEKGPQEAFPVHLDLTTNPQGETLDISFLFLEPMEEKLVVLPFPKEKARTAECPGPAQNASPLVLPP

SEQ ID NO: 2012 - protein, 529 aa, Homo sapiens
MEHRIVGPGPYRATRLWNETVELFRAKMPLRKHRCRFKSYEHCFTAAEAVDWLHELLRCSQNFGPEVTRKQTVQLLKKFLKNHVIEDIKGKWGEEDFEDNRHLYRFPPSSPLKPYPKKPPNQKDVIKFPEWNDLPPGTSQENIPVRPVVMNSEMWYKRHSIAIGEVPACRLVHRRQLTEANVEEIWKSMTLSYLQKILGLDSLEEVLDVKLVNSKFIIHNVYSVSKQGVVILDDKSKELPHWVLSAMKCLANWPNCSDLKQPMYLGFEKDVFKTIADYYGHLKEPLLTFHLFDAFVSVLGLLQKEKVAVEAFQICCLLLPPENRRKLQLLMRMMARICLNKEMPPLCDGFGTRTLMVQTFSRCILCSKDEVDLDELLAARLVTFLMDNYQEILKVPLALQTSIEERVAHLRRVQIKYPGADMDITLSAPSFCRQISPEEFEYQRSYGSQEPLAALLEEVITDAKLSNKEKKKKLKQFQKSYPEVYQERFPTPESAALLFPEKPKPKPQLLMWALKKPFQPFQRTRSFRM

SEQ ID NO: 2013 - protein, 904 aa, Homo sapiens
MAESSESFTMASSPAQRRRGNDPLTSSPGRSSRRTDALTSSPGRDLPPFEDESEGLLGTEGPLEEEEDGEELIGDGMERDYRAIPELDAYEAEGLALDDEDVEELTASQREAAERAMRQRDREAGRGLGRMRRGLLYDSDEEDEERPARKRRQVERATEDGEEDEEMIESIENLEDLKGHSVREWVSMAGPRLEIHHRFKNFLRTHVDSHGHNVFKERISDMCKENRESLVVNYEDLAAREHVLAYFLPEAPAELLQIFDEAALEVVLAMYPKYDRITNHIHVRISHLPLVEELRSLRQLHLNQLIRTSGVVTSCTGVLPQLSMVKYNCNKCNFVLGPFCQSQNQEVKPGSCPECQSAGPFEVNMEETIYQNYQRIRIQESPGKVAAGRLPRSKDAILLADLVDSCKPGDEIELTGIYHNNYDGSLNTANGFPVFATVILANHVAKKDNKVAVGELTDEDVKMITSLSKDQQIGEKIFASIAPSIYGHEDIKRGLALALFGGEPKNPGGKHKVRGDINVLLCGDPGTAKSQFLKYIEKVSSRAIFTTGQGASAVGLTAYVQRHPVSREWTLEAGALVLADRGVCLIDEFDKMNDQDRTSIHEAMEQQSISISKAGIVTSLQARCTVIAAANPIGGRYDPSLTFSENVDLTEPIISRFDILCVVRDTVDPVQDEMLARFVVGSHVRHHPSNKEEEGLANGSAAEPAMPNTYGVEPLPQEVLKKYIIYAKERVHPKLNQMDQDKVAKMYSDLRKESMATGSIPITVRHIESMIRMAEAHARIHLRDYVIEDDVNMAIRVMLESFIDTQKFSVMRSMRKTFARYLSFRRDNNELLLFILKQLVAEQVTYQRNRFGAQQDTIEVPEKDLVDKARQINIHNLSAFYDSELFRMNKFSHDLKRKMILQQF

SEQ ID NO: 2014 - protein, 409 aa, Homo sapiens
MSLHAWEWEEDPASIEPISSITSFYQSTSECDVEEHLKAKARAQESDSDRPCSSIESSSEPASTFSSDVPHVVPCKFTISLAFPVNMGQKGKYASLIEKYKKHPKTDSSVTKMRRFYHIEYFLLPDDEEPKKVDILLFPMVAKVFLESGVKTVKPWHEGDKAWVSWEQTFNITVTKELLKKINFHKITLRLWNTKDKMSRKVRYYRLKTAGFTDDVGAFHKSEVRHLVLNQRKLSEQGIENTNIVREESNQEHPPGKQEKTEKHPKSLQGSHQAEPETSSKNSEEYEKSLKMDDSSTIQWSVSRTPTISLAGASMMEIKELIESESLSSLTNILDRQRSQIKGKDSEGRRKIQRRHKKPLAEEEADPTLTGPRKQSAFSIQLAVMPLLAGTHCLPCSQQLLLVLWPERP

SEQ ID NO: 2015 - protein, 1074 aa, Homo sapiens
MIPICPVVSFTYVPSRLGEDAKMATGNYFGFTHSGAAAAAAAAQYSQQPASGVAYSHPTTVASYTVHQAPVAAHTVTAAYAPAAATVAVARPAPVAVAAAATAAAYGGYPTAHTATDYGYTQRQQEAPPPPPPATTQNYQDSYSYVRSTAPAVAYDSKQYYQQPTATAAAVAAAAQPQPSVAETYYQTAPKAGYSQGATQYTQAQQTRQVTAIKPATPSPATTTFSIYPVSSTVQPVAAAATVVPSYTQSATYSTTAVTYSGTSYSGYEAAVYSAASSYYQQQQQQQKQAAAAAAAAAATAAWTGTTFTKKAPFQNKQLKPKQPPKPPQIHYCDVCKISCAGPQTYKEHLEGQKHKKKEAALKASQNTSSSNSSTRGTQNQLRCELCDVSCTGADAYAAHIRGAKHQKVVKLHTKLGKPIPSTEPNVVSQATSSTAVSASKPTASPSSIAANNCTVNTSSVATSSMKGLTTTGNSSLNSTSNTKVSAVPTNMAAKKTSTPKINFVGGNKLQSTGNKAEDIKGTECVKSTPVTSAVQIPEVKQDTVSEPVTPASLAALQSDVQPVGHDYVEEVRNDEGKVIRFHCKLCECSFNDPNAKEMHLKGRRHRLQYKKKVNPDLQVEVKPSIRARKIQEEKMRKQMQKEEYWRRREEEERWRMEMRRYEEDMYWRRMEEEQHHWDDRRRMPDGGYPHGPPGPLGLLGVRPGMPPQPQGPAPLRRPDSSDDRYVMTKHATIYPTEEELQAVQKIVSITERALKLVSDSLSEHEKNKNKEGDDKKEGGKDRALKGVLRVGVLAKGLLLRGDRNVNLVLLCSEKPSKTLLSRIAENLPKQLAVISPEKYDIKCAVSEAAIILNSCVEPKMQVTITLTSPIIREENMREGDVTSGMVKDPPDVLDRQKCLDALAALRHAKWFQARANGLQSCVIIIRILRDLCQRVPTWSDFPSWAMELLVEKAISSASSPQSPGDALRRVFECISSGIILKGSPGLLDPCEKDPFDTLATMTDQQREDITSSAQFALRLLAFRQIHKVLGMDPLPQMSQRFNIHNNRKRRRDSDGVDGFEAEGKKDKKDYDNF

SEQ ID NO: 2016 - protein, 790 aa, Homo sapiens
MRTYRYFLLLFWVGQPYPTLSTPLSKRTSGFPAKKRALELSGNSKNELNRSKRSWMWNQFFLLEEYTGSDYQYVGKLHSDQDRGDGSLKYILSGDGAGDLFIINENTGDIQATKRLDREEKPVYILRAQAINRRTGRPVEPESEFIIKIHDINDNEPIFTKEVYTATVPEMSDVGTFVVQVTATDADDPTYGNSAKVVYSILQGQPYFSVESETGIIKTALLNMDRENREQYQVVIQAKDMGGQMGGLSGTTTVNITLTDVNDNPPRFPQSTYQFKTPESSPPGTPIGRIKASDADVGENAEIEYSITDGEGLDMFDVITDQETQEGIITVKKLLDFEKKKVYTLKVEASNPYVEPRFLYLGPFKDSATVRIVVEDVDEPPVFSKLAYILQIREDAQINTTIGSVTAQDPDAARNPVKYSVDRHTDMDRIFNIDSGNGSIFTSKLLDRETLLWHNITVIATEINNPKQSSRVPLYIKVLDVNDNAPEFAEFYETFVCEKAKADQLIQTLHAVDKDDPYSGHQFSFSLAPEAASGSNFTIQDNKDNTAGILTRKNGYNRHEMSTYLLPVVISDNDYPVQSSTGTVTVRVCACDHHGNMQSCHAEALIHPTGLSTGALVAILLCIVILLVTVVLFAALRRQRKKEPLIISKEDIRDNIVSYNDEGGGEEDTQAFDIGTLRNPEAIEDNKLRRDIVPEALFLPRRTPTARDNTDVRDFINQRLKENDTDPTAPPYDSLATYAYEGTGSVADSLSSLESVTTDADQDYDYLSDWGPRFKKLADMYGGVDSDKDS

SEQ ID NO: 2017 - protein, 541 aa, Homo sapiens
MPSLLVLTFSPCVLLGWALLAGGTGGGGVGGGGGGAGIGGGRQEREALPPQKIEVLVLLPQDDSYLFSLTRVRPAIEYALRSVEGNGTGRRLLPPGTRFQVAYEDSDCGNRALFSLVDRVAAARGAKPDLILGPVCEYAAAPVARLASHWDLPMLSAGALAAGFQHKDSEYSHLTRVAPAYAKMGEMMLALFRHHHWSRAALVYSDDKLERNCYFTLEGVHEVFQEEGLHTSIYSFDETKDLDLEDIVRNIQASERVVIMCASSDTIRSIMLVAHRHGMTSGDYAFFNIELFNSSSYGDGSWKRGDKHDFEAKQAYSSLQTVTLLRTVKPEFEKFSMEVKSSVEKQGLNMEDYVNMFVEGFHDAILLYVLALHEVLRAGYSKKDGGKIIQQTWNRTFEGIAGQVSIDANGDRYGDFSVIAMTDVEAGTQEVIGDYFGKEGRFEMRPNVKYPWGPLKLRIDENRIVEHTNSSPCKSSGGLEESAVTGIVVGALLGAGLLMAFYFFRKKYRITIERRTQQEESNLGKHRELREDSIRSHFSVA

SEQ ID NO: 2018 - protein, 3396 aa, Homo sapiens
MFINIKSILWMCSTLIVTHALHKVKVGKSPPVRGSLSGKVSLPCHFSTMPTLPPSYNTSEFLRIKWSKIEVDKNGKDLKETTVLVAQNGNIKIGQDYKGRVSVPTHPEAVGDASLTVVKLLASDAGLYRCDVMYGIEDTQDTVSLTVDGVVFHYRAATSRYTLNFEAAQKACLDVGAVIATPEQLFAAYEDGFEQCDAGWLADQTVRYPIRAPRVGCYGDKMGKAGVRTYGFRSPQETYDVYCYVDHLDGDVFHLTVPSKFTFEEAAKECENQDARLATVGELQAAWRNGFDQCDYGWLSDASVRHPVTVARAQCGGGLLGVRTLYRFENQTGFPPPDSRFDAYCFKPKEATTIDLSILAETASPSLSKEPQMVSDRTTPIIPLVDELPVIPTEFPPVGNIVSFEQKATVQPQAITDSLATKLPTPTGSTKKPWDMDDYSPSASGPLGKLDISEIKEEVLQSTTGVSHYATDSWDGVVEDKQTQESVTQIEQIEVGPLVTSMEILKHIPSKEFPVTETPLVTARMILESKTEKKMVSTVSELVTTGHYGFTLGEEDDEDRTLTVGSDESTLIFDQIPEVITVSKTSEDTIHTHLEDLESVSASTTVSPLIMPDNNGSSMDDWEERQTSGRITEEFLGKYLSTTPFPSQHRTEIELFPYSGDKILVEGISTVIYPSLQTEMTHRRERTETLIPEMRTDTYTDEIQEEITKSPFMGKTEEEVFSGMKLSTSLSEPIHVTESSVEMTKSFDFPTLITKLSAEPTEVRDMEEDFTATPGTTKYDENITTVLLAHGTLSVEAATVSKWSWDEDNTTSKPLESTEPSASSKLPPALLTTVGMNGKDKDIPSFTEDGADEFTLIPDSTQKQLEEVTDEDIAAHGKFTIRFQPTTSTGIAEKSTLRDSTTEEKVPPITSTEGQVYATMEGSALGEVEDVDLSKPVSTVPQFAHTSEVEGLAFVSYSSTQEPTTYVDSSHTIPLSVIPKTDWGVLVPSVPSEDEVLGEPSQDILVIDQTRLEATISPETMRTTKITEGTTQEEFPWKEQTAEKPVPALSSTAWTPKEAVTPLDEQEGDGSAYTVSEDELLTGSERVPVLETTPVGKIDHSVSYPPGAVTEHKVKTDEVVTLTPRIGPKVSLSPGPEQKYETEGSSTTGFTSSLSPFSTHITQLMEETTTEKTSLEDIDLGSGLFEKPKATELIEFSTIKVTVPSDITTAFSSVDRLHTTSAFKPSSAITKKPPLIDREPGEETTSDMVIIGESTSHVPPTTLEDIVAKETETDIDREYFTTSSPPATQPTRPPTVEDKEAFGPQALSTPQPPASTKFHPDINVYIIEVRENKTGRMSDLSVIGHPIDSESKEDEPCSEETDPVHDLMAEILPEFPDIIEIDLYHSEENEEEEEECANATDVTTTPSVQYINGKHLVTTVPKDPEAAEARRGQFESVAPSQNFSDSSESDTHPFVIAKTELSTAVQPNESTETTESLEVTWKPETYPETSEHFSGGEPDVFPTVPFHEEFESGTAKKGAESVTERDTEVGHQAHEHTEPVSLFPEESSGEIAIDQESQKIAFARATEVTFGEEVEKSTSVTYTPTIVPSSASAYVSEEEAVTLIGNPWPDDLLSTKESWVEATPRQVVELSGSSSIPITEGSGEAEEDEDTMFTMVTDLSQRNTTDTLITLDTSRIITESFFEVPATTIYPVSEQPSAKVVPTKFVSETDTSEWISSTTVEEKKRKEEEGTTGTASTFEVYSSTQRSDQLILPFELESPNVATSSDSGTRKSFMSLTTPTQSEREMTDSTPVFTETNTLENLGAQTTEHSSIHQPGVQEGLTTLPRSPASVFMEQGSGEAAADPETTTVSSFSLNVEYAIQAEKEVAGTLSPHVETTFSTEPTGLVLSTVMDRVVAENITQTSREIVISERLGEPNYGAEIRGFSTGFPLEEDFSGDFREYSTVSHPIAKEETVMMEGSGDAAFRDTQTSPSTVPTSVHISHISDSEGPSSTMVSTSAFPWEEFTSSAEGSGEQLVTVSSSVVPVLPSAVQKFSGTASSIIDEGLGEVGTVNEIDRRSTILPTAEVEGTKAPVEKEEVKVSGTVSTNFPQTIEPAKLWSRQEVNPVRQEIESETTSEEQIQEEKSFESPQNSPATEQTIFDSQTFTETELKTTDYSVLTTKKTYSDDKEMKEEDTSLVNMSTPDPDANGLESYTTLPEATEKSHFFLATALVTESIPAEHVVTDSPIKKEESTKHFPKGMRPTIQESDTELLFSGLGSGEEVLPTLPTESVNFTEVEQINNTLYPHTSQVESTSSDKIEDFNRMENVAKEVGPLVSQTDIFEGSGSVTSTTLIEILSDTGAEGPTVAPLPFSTDIGHPQNQTVRWAEEIQTSRPQTITEQDSNKNSSTAEINETTTSSTDFLARAYGFEMAKEFVTSAPKPSDLYYEPSGEGSGEVDIVDSFHTSATTQATRQESSTTFVSDGSLEKHPEVPSAKAVTADGFPTVSVMLPLHSEQNKSSPDPTSTLSNTVSYERSTDGSFQDRFREFEDSTLKPNRKKPTENIIIDLDKEDKDLILTITESTILEILPELTSDKNTIIDIDHTKPVYEDILGMQTDIDTEVPSEPHDSNDESNDDSTQVQEIYEAAVNLSLTEETFEGSADVLASYTQATHDESMTYEDRSQLDHMGFHFTTGIPAPSTETELDVLLPTATSLPIPRKSATVIPEIEGIKAEAKALDDMFESSTLSDGQAIADQSEIIPTLGQFERTQEEYEDKKHAGPSFQPEFSSGAEEALVDHTPYLSIATTHLMDQSVTEVPDVMEGSNPPYYTDTTLAVSTFAKLSSQTPSSPLTIYSGSEASGHTEIPQPSALPGIDVGSSVMSPQDSFKEIHVNIEATFKPSSEEYLHITEPPSLSPDTKLEPSEDDGKPELLEEMEASPTELIAVEGTEILQDFQNKTDGQVSGEAIKMFPTIKTPEAGTVITTADEIELEGATQWPHSTSASATYGVEAGVVPWLSPQTSERPTLSSSPEINPETQAALIRGQDSTIAASEQQVAARILDSNDQATVNPVEFNTEVATPPFSLLETSNETDFLIGINEESVEGTAIYLPGPDRCKMNPCLNGGTCYPTETSYVCTCVPGYSGDQCELDFDECHSNPCRNGATCVDGFNTFRCLCLPSYVGALCEQDTETCDYGWHKFQGQCYKYFAHRRTWDAAERECRLQGAHLTSILSHEEQMFVNRVGHDYQWIGLNDKMFEHDFRWTDGSTLQYENWRPNQPDSFFSAGEDCVVIIWHENGQWNDVPCNYHLTYTCKKGTVACGQPPVVENAKTFGKMKPRYEINSLIRYHCKDGFIQRHLPTIRCLGNGRWAIPKITCMNPSAYQRTYSMKYFKNSSSAKDNSINTSKHDHRWSRRWQESRR

SEQ ID NO: 2019 - protein, 1237 aa, Homo sapiens
MQKSVRYNEGHALYLAFLARKEGTKRGFLSKKTAEASRWHEKWFALYQNVLFYFEGEQSCRPAGMYLLEGCSCERTPAPPRAGAGQGGVRDALDKQYYFTVLFGHEGQKPLELRCEEEQDGKEWMEAIHQASYADILIEREVLMQKYIHLVQIVETEKIAANQLRHQLEDQDTEIERLKSEIIALNKTKERMRPYQSNQEDEDPDIKKIKKVQSFMRGWLCRRKWKTIVQDYICSPHAESMRKRNQIVFTMVEAESEYVHQLYILVNGFLRPLRMAASSKKPPISHDDVSSIFLNSETIMFLHEIFHQGLKARIANWPTLILADLFDILLPMLNIYQEFVRNHQYSLQVLANCKQNRDFDKLLKQYEANPACEGRMLETFLTYPMFQIPRYIITLHELLAHTPHEHVERKSLEFAKSKLEELSRVMHDEVSDTENIRKNLAIERMIVEGCDILLDTSQTFIRQGSLIQVPSVERGKLSKVRLGSLSLKKEGERQCFLFTKHFLICTRSSGGKLHLLKTGGVLSLIDCTLIEEPDASDDDSKGSGQVFGHLDFKIVVEPPDAAAFTVVLLAPSRQEKAAWMSDISQCVDNIRCNGLMTIVFEENSKVTVPHMIKSDARLHKDDTDICFSKTLNSCKVPQIRYASVERLLERLTDLRFLSIDFLNTFLHTYRIFTTAAVVLGKLSDIYKRPFTSIPVRSLELFFATSQNNRGEHLVDGKSPRLCRKFSSPPPLAVSRTSSPVRARKLSLTSPLNSKIGALDLTTSSSPTTTTQSPAASPPPHTGQIPLDLSRGLSSPEQSPGTVEENVDNPRVDLCNKLKRSIQKAVLESAPADRAGVESSPAADTTELSPCRSPSTPRHLRYRQPGGQTADNAHCSVSPASAFAIATAAAGHGSPPGFNNTERTCDKEFIIRRTATNRVLNVLRHWVSKHAQDFELNNELKMNVLNLLEEVLRDPDLLPQERKAAANILRALSQDDQDDIHLKLEDIIQMTDCMKAECFESLSAMELAEQITLLDHVIFRSIPYEEFLGQGWMKLDKNERTPYIMKTSQHFNDMSNLVASQIMNYADVSSRANAIEKWVAVADICRCLHNYNGVLEITSALNRSAIYRLKKTWAKVSKQTKALMDKLQKTVSSEGRFKNLRETLKNCNPPAVPYLGMYLTDLAFIEEGTPNFTEEGLVNFSKMRMISHIIREIRQFQQTSYRIDHQPKVAQYLLDKDLIIDEDTLYELSLKIEPRLPA

SEQ ID NO: 2020 - protein, 1137 aa, Homo sapiens
MSRRKPASGGLAASSSAPARQAVLSRFFQSTGSLKSTSSSTGAADQVDPGAAAAAAAAAAAAPPAPPAPAFPPQLPPHIATEIDRRKKRPLENDGPVKKKVKKVQQKEGGSDLGMSGNSEPKKCLRTRNVSKSLEKLKEFCCDSALPQSRVQTESLQERFAVLPKCTDFDDISLLHAKNAVSSEDSKRQINQKDTTLFDLSQFGSSNTSHENLQKTASKSANKRSKSIYTPLELQYIEMKQQHKDAVLCVECGYKYRFFGEDAEIAARELNIYCHLDHNFMTASIPTHRLFVHVRRLVAKGYKVGVVKQTETAALKAIGDNRSSLFSRKLTALYTKSTLIGEDVNPLIKLDDAVNVDEIMTDTSTSYLLCISENKENVRDKKKGNIFIGIVGVQPATGEVVFDSFQDSASRSELETRMSSLQPVELLLPSALSEQTEALIHRATSVSVQDDRIRVERMDNIYFEYSHAFQAVTEFYAKDTVDIKGSQIISGIVNLEKPVICSLAAIIKYLKEFNLEKMLSKPENFKQLSSKMEFMTINGTTLRNLEILQNQTDMKTKGSLLWVLDHTKTSFGRRKLKKWVTQPLLKLREINARLDAVSEVLHSESSVFGQIENHLRKLPDIERGLCSIYHKKCSTQEFFLIVKTLYHLKSEFQAIIPAVNSHIQSDLLRTVILEIPELLSPVEHYLKILNEQAAKVGDKTELFKDLSDFPLIKKRKDEIQGVIDEIRMHLQEIRKILKNPSAQYVTVSGQEFMIEIKNSAVSCIPTDWVKVGSTKAVSRFHSPFIVENYRHLNQLREQLVLDCSAEWLDFLEKFSEHYHSLCKAVHHLATVDCIFSLAKVAKQGDYCRPTVQEERKIVIKNGRHPVIDVLLGEQDQYVPNNTDLSEDSERVMIITGPNMGGKSSYIKQVALITIMAQIGSYVPAEEATIGIVDGIFTRMGAADNIYKGQSTFMEELTDTAEIIRKATSQSLVILDELGRGTSTHDGIAIAYATLEYFIRDVKSLTLFVTHYPPVCELEKNYSHQVGNYHMGFLVSEDESKLDPGAAEQVPDFVTFLYQITRGIAARSYGLNVAKLADVPGEILKKAAHKSKELEGLINTKRKRLKYFAKLWTMHNAQDLQKWTEEFNMEETQTSLLH

SEQ ID NO: 2021 - protein, 729 aa, Homo sapiens
MGDYGFGVLVQSNTGNKSAFPVRFHPHLQPPHHHQNATPSPAAFINNNTAANGSSAGSAWLFPAPATHNIQDEILGSEKAKSQQQEQQDPLEKQQLSPSPGQEAGILPETEKAKSEENQGDNSSENGNGKEKIRIESPVLTGFDYQEATGLGTSTQPLTSSASSLTGFSNWSAAIAPSSSTIINEDASFFHQGGVPAASANNGALLFQNFPHHVSPGFGGSFSPQIGPLSQHHPHHPHFQHHHSQHQQQRRSPASPHPPPFTHRNAAFNQLPHLANNLNKPPSPWSSYQSPSPTPSSSWSPGGGGYGGWGGSQGRDHRRGLNGGITPLNSISPLKKNFASNHIQLQKYARPSSAFAPKSWMEDSLNRADNIFPFPDRPRTFDMHSLESSLIDIMRAENDTIKGRLNYSYPGSDSSLLINARTYGRRRGQSSLFPMEDGFLDDGRGDQPLHSGLGSPHCFSHQNGERVERYSRKVFVGGLPPDIDEDEITASFRRFGPLIVDWPHKAESKSYFPPKGYAFLLFQDESSVQALIDACIEEDGKLYLCVSSPTIKDKPVQIRPWNLSDSDFVMDGSQPLDPRKTIFVGGVPRPLRAVELAMIMDRLYGGVCYAGIDTDPELKYPKGAGRVAFSNQQSYIAAISARFVQLQHGEIDKRVEVKPYVLDDQLCDECQGARCGGKFAPFFCANVTCLQYYCEYCWAAIHSRAGREFHKPLVKEGGDRPRHISFRWN

SEQ ID NO: 2022 - protein, 542 aa, Homo sapiens
MEPDSVIEDKTIELMCSVPRSLWLGCANLVESMCALSCLQSMPSVRCLQISNGTSSVIVSRKRPSEGNYQKEKDLCIKYFDQWSESDQVEFVEHLISRMCHYQHGHINSYLKPMLQRDFITALPEQGLDHIAENILSYLDARSLCAAELVCKEWQRVISEGMLWKKLIERMVRTDPLWKGLSERRGWDQYLFKNRPTDGPPNSFYRSLYPKIIQDIETIESNWRCGRHNLQRIQCRSENSKGVYCLQYDDEKIISGLRDNSIKIWDKTSLECLKVLTGHTGSVLCLQYDERVIVTGSSDSTVRVWDVNTGEVLNTLIHHNEAVLHLRFSNGLMVTCSKDRSIAVWDMASATDITLRRVLVGHRAAVNVVDFDDKYIVSASGDRTIKVWSTSTCEFVRTLNGHKRGIACLQYRDRLVVSGSSDNTIRLWDIECGACLRVLEGHEELVRCIRFDNKRIVSGAYDGKIKVWDLQAALDPRAPASTLCLRTLVEHSGRVFRLQFDEFQIISSSHDDTILIWDFLNVPPSAQNETRSPSRTYTYISR

SEQ ID NO: 2023 - protein, 4624 aa, Homo sapiens
MFRIGRRQLWKHSVTRVLTQRLKGEKEAKRALLDARHNYLFAIVASCLDLNKTEVEDAILEGNQIERIDQLFAVGGLRHLMFYYQDVEEAETGQLGSLGGVNLVSGKIKKPKVFVTEGNDVALTGVCVFFIRTDPSKAITPDNIHQEVSFNMLDAADGGLLNSVRRLLSDIFIPALRATSHGWGELEGLQDAANIRQEFLSSLEGFVNVLSGAQESLKEKVNLRKCDILELKTLKEPTDYLTLANNPETLGKIEDCMKVWIKQTEQVLAENNQLLKEADDVGPRAELEHWKKRLSKFNYLLEQLKSPDVKAVLAVLAAAKSKLLKTWREMDIRITDATNEAKDNVKYLYTLEKCCDPLYSSDPLSMMDAIPTLINAIKMIYSISHYYNTSEKITSLFVKVTNQIISACKAYITNNGTASIWNQPQDVVEEKILSAIKLKQEYQLCFHKTKQKLKQNPNAKQFDFSEMYIFGKFETFHRRLAKIIDIFTTLKTYSVLQDSTIEGLEDMATKYQGIVATIKKKEYNFLDQRKMDFDQDYEEFCKQTNDLHNELRKFMDVTFAKIQNTNQALRMLKKFERLNIPNLGIDDKYQLILENYGADIDMISKLYTKQKYDPPLARNQPPIAGKILWARQLFHRIQQPMQLFQQHPAVLSTAEAKPIIRSYNRMAKVLLEFEVLFHRAWLRQIEEIHVGLEASLLVKAPGTGELFVNFDPQILILFRETECMAQMGLEVSPLATSLFQKRDRYKRNFSNMKMMLAEYQRVKSKIPAAIEQLIVPHLAKVDEALQPGLAALTWTSLNIEAYLENTFAKIKDLELLLDRVNDLIEFRIDAILEEMSSTPLCQLPQEEPLTCEEFLQMTKDLCVNGAQILHFKSSLVEEAVNELVNMLLDVEVLSEEESEKISNENSVNYKNESSAKREEGNFDTLTSSINARANALLLTTVTRKKKETEMLGEEARELLSHFNHQNMDALLKVTRNTLEAIRKRIHSSHTINFRDSNSASNMKQNSLPIFRASVTLAIPNIVMAPALEDVQQTLNKAVECIISVPKGVRQWSSELLSKKKIQERKMAALQSNEDSDSDVEMGENELQDTLEIASVNLPIPVQTKNYYKNVSENKEIVKLVSVLSTIINSTKKEVITSMDCFKRYNHIWQKGKEEAIKTFITQSPLLSEFESQILYFQNLEQEINAEPEYVCVGSIALYTADLKFALTAETKAWMVVIGRHCNKKYRSEMENIFMLIEEFNKKLNRPIKDLDDIRIAMAALKEIREEQISIDFQVGPIEESYALLNRYGLLIAREEIDKVDTLHYAWEKLLARAGEVQNKLVSLQPSFKKELISAVEVFLQDCHQFYLDYDLNGPMASGLKPQEASDRLIMFQNQFDNIYRKYITYTGGEELFGLPATQYPQLLEIKKQLNLLQKIYTLYNSVIETVNSYYDILWSEVNIEKINNELLEFQNRCRKLPRALKDWQAFLDLKKIIDDFSECCPLLEYMASKAMMERHWERITTLTGHSLDVGNESFKLRNIMEAPLLKYKEEIEDICISAVKERDIEQKLKQVINEWDNKTFTFGSFKTRGELLLRGDSTSEIIANMEDSLMLLGSLLSNRYNMPFKAQIQKWVQYLSNSTDIIESWMTVQNLWIYLEAVFVGGDIAKQLPKEAKRFSNIDKSWVKIMTRAHEVPSVVQCCVGDETLGQLLPHLLDQLEICQKSLTGYLEKKRLCFPRFFFVSDPALLEILGQASDSHTIQAHLLNVFDNIKSVKFHEKIYDRILSISSQEGETIELDKPVMAEGNVEVWLNSLLEESQSSLHLVIRQAAANIQETGFQLTEFLSSFPAQVGLLGIQMIWTRDSEEALRNAKFDKKIMQKTNQAFLELLNTLIDVTTRDLSSTERVKYETLITIHVHQRDIFDDLCHMHIKSPMDFEWLKQCRFYFNEDSDKMMIHITDVAFIYQNEFLGCTDRLVITPLTDRCYITLAQALGMSMGGAPAGPAGTGKTETTKDMGRCLGKYVVVFNCSDQMDFRGLGRIFKGLAQSGSWGCFDEFNRIDLPVLSVAAQQISIILTCKKEHKKSFIFTDGDNVTMNPEFGLFLTMNPGYAGRQELPENLKINFRSVAMMVPDRQIIIRVKLASCGFIDNVVLARKFFTLYKLCEEQLSKQVHYDFGLRNILSVLRTLGAAKRANPMDTESTIVMRVLRDMNLSKLIDEDEPLFLSLIEDLFPNILLDKAGYPELEAAISRQVEEAGLINHPPWKLKVIQLFETQRVRHGMMTLGPSGAGKTTCIHTLMRAMTDCGKPHREMRMNPKAITAPQMFGRLDVATNDWTDGIFSTLWRKTLRAKKGEHIWIILDGPVDAIWIENLNSVLDDNKTLTLANGDRIPMAPNCKIIFEPHNIDNASPATVSRNGMVFMSSSILDWSPILEGFLKKRSPQEAEILRQLYTESFPDLYRFCIQNLEYKMEVLEAFVITQSINMLQGLIPLKEQGGEVSQAHLGRLFVFALLWSAGAALELDGRRRLELWLRSRPTGTLELPPPAGPGDTAFDYYVAPDGTWTHWNTRTQEYLYPSDTTPEYGSILVPNVDNVRTDFLIQTIAKQGKAVLLIGEQGTAKTVIIKGFMSKYDPECHMIKSLNFSSATTPLMFQRTIESYVDKRMGTTYGPPAGKKMTVFIDDVNMPIINEWGDQVTNEIVRQLMEQNGFYNLEKPGEFTSIVDIQFLAAMIHPGGGRNDIPQRLKRQFSIFNCTLPSEASVDKIFGVIGVGHYCTQRGFSEEVRDSVTKLVPLTRRLWQMTKIKMLPTPAKFHYVFNLRDLSRVWQGMLNTTSEVIKEPNDLLKLWKHECKRVIADRFTVSSDVTWFDKALVSLVEEEFGEEKKLLVDCGIDTYFVDFLRDAPEAAGETSEEADAETPKIYEPIESFSHLKERLNMFLQLYNESIRGAGMDMVFFADAMVHLVKISRVIRTPQGNALLVGVGGSGKQSLTRLASFIAGYVSFQITLTRSYNTSNLMEDLKVLYRTAGQQGKGITFIFTDNEIKDESFLEYMNNVLSSGEVSNLFARDEIDEINSDLASVMKKEFPRCLPTNENLHDYFMSRVRQNLHIVLCFSPVGEKFRNRALKFPALISGCTIDWFSRWPKDALVAVSEHFLTSYDIDCSLEIKKEVVQCMGSFQDGVAEKCVDYFQRFRRSTHVTPKSYLSFIQGYKFIYGEKHVEVRTLANRMNTGLEKLKEASESVAALSKELEAKEKELQVANDKADMVLKEVTMKAQAAEKVKAEVQKVKDRAQAIVDSISKDKAIAEEKLEAAKPALEEAEAALQTIRPSDIATVRTLGRPPHLIMRIMDCVLLLFQRKVSAVKIDLEKSCTMPSWQESLKLMTAGNFLQNLQQFPKDTINEEVIEFLSPYFEMPDYNIETAKRVCGNVAGLCSWTKAMASFFSINKEVLPLKANLVVQENRHLLAMQDLQKAQAELDDKQAELDVVQAEYEQAMTEKQTLLEDAERCRHKMQTASTLISGLAGEKERWTEQSQEFAAQTKRLVGDVLLATAFLSYSGPFNQEFRDLLLNDWRKEMKARKIPFGKNLNLSEMLIDAPTISEWNLQGLPNDDLSIQNGIIVTKASRYPLLIDPQTQGKIWIKNKESRNELQITSLNHKYFRNHLEDSLSLGRPLLIEDVGEELDPALDNVLERNFIKTGSTFKVKVGDKEVDVLDGFRLYITTKLPNPAYTPEISARTSIIDFTVTMKGLEDQLLGRVILTEKQELEKERTHLMEDVTANKRRMKELEDNLLYRLTSTQGSLVEDESLIVVLSNTKRTAEEVTQKLEISAETEVQINSAREEYRPVATRGSILYFLITEMRLVNEMYQTSLRQFLGLFDLSLARSVKSPITSKRIANIIEHMTYEVYKYAARGLYEEHKFLFTLLLTLKIDIQRNRVKHEEFLTLIKGGASLDLKACPPKPSKWILDITWLNLVELSKLRQFSDVLDQISRNEKMWKIWFDKENPEEEPLPNAYDKSLDCFRRLLLIRSWCPDRTIAQARKYIVDSMGEKYAEGVILDLEKTWEESDPRTPLICLLSMGSDPTDSIIALGKRLKIETRYVSMGQGQEVHARKLLQQTMANGGWALLQNCHLGLDFMDELMDIIIETELVHDAFRLWMTTEAHKQFPITLLQMSIKFANDPPQGLRAGLKRTYSGVSQDLLDVSSGSQWKPMLYAVAFLHSTVQERRKFGALGWNIPYEFNQADFNATVQFIQNHLDDMDVKKGVSWTTIRYMIGEIQYGGRVTDDYDKRLLNTFAKVWFSENMFGPDFSFYQGYNIPKCSTVDNYLQYIQSLPAYDSPEVFGLHPNADITYQSKLAKDVLDTILGIQPKDTSGGGDETREAVVARLADDMLEKLPPDYVPFEVKERLQKMGPFQPMNIFLRQEIDRMQRVLSLVRSTLTELKLAIDGTIIMSENLRDALDCMFDARIPAWWKKASWISSTLGFWFTELIERNSQFTSWVFNGRPHCFWMTGFFNPQGFLTAMRQEITRANKGWALDNMVLCNEVTKWMKDDISAPPTEGVYVYGLYLEGAGWDKRNMKLIESKPKVLFELMPVIRIYAENNTLRDPRFYSCPIYKKPVRTDLNYIAAVDLRTAQTPEHWVLRGVALLCDVK

SEQ ID NO: 2024 - protein, 654 aa, Homo sapiens
MERSGPSEVTGSDASGPDPQLAVTMGFTGFGKKARTFDLEAMFEQTRRTAVERSRKTLEAREKEEEMNREKELRRQNEDIEPTSSRSNVVRDCSKSSSRDTSSSESEQSSDSSDDELIGPPLPPKMVGKPVNFMEEDILGPLPPPLNEEEEEAEEEEEEEEEEENPVHKIPDSHEITLKHGTKTVSALGLDPSGARLVTGGYDYDVKFWDFAGMDASFKAFRSLQPCECHQIKSLQYSNTGDMILVVSGSSQAKVIDRDGFEVMECIKGDQYIVDMANTKGHTAMLHTGSWHPKIKGEFMTCSNDATVRTWEVENPKKQKSVFKPRTMQGKKVIPTTCTYSRDGNLIAAACQNGSIQIWDRNLTVHPKFHYKQAHDSGTDTSCVTFSYDGNVLASRGGDDSLKLWDIRQFNKPLFSASGLPTMFPMTDCCFSPDDKLIVTGTSIQRGCGSGKLVFFERRTFQRVYEIDITDASVVRCLWHPKLNQIMVGTGNGLAKVYYDPNKSQRGAKLCVVKTQRKAKQAETLTQDYIITPHALPMFREPRQRSTRKQLEKDRLDPLKSHKPEPPVAGPGRGGRVGTHGGTLSSYIVKNIALDKTDDSNPREAILRHAKAAEDSPYWVSPAYSKTQPKTMFAQVESDDEEAKNEPEWKKRKI

SEQ ID NO: 2025 - protein, 980 aa, Homo sapiens
MKSLKAKFRKSDTNEWNKNDDRLLQAVENGDAEKVASLLGKKGASATKHDSEGKTAFHLAAAKGHVECLRVMITHGVDVTAQDTTGHSALHLAAKNSHHECIRKLLQSKCPAESVDSSGKTALHYAAAQGCLQAVQILCEHKSPINLKDLDGNIPLLLAVQNGHSEICHFLLDHGADVNSRNKSGRTALMLACEIGSSNAVEALIKKGADLNLVDSLGYNALHYSKLSENAGIQSLLLSKISQDADLKTPTKPKQHDQVSKISSERSGTPKKRKAPPPPISPTQLSDVSSPRSITSTPLSGKESVFFAEPPFKAEISSIRENKDRLSDSTTGADSLLDISSEADQQDLLSLLQAKVASLTLHNKELQDKLQAKSPKEAEADLSFDSYHSTQTDLGPSLGKPGETSPPDSKSSPSVLIHSLGKSTTDNDVRIQQLQEILQDLQKRLESSEAERKQLQVELQSRRAELVCLNNTEISENSSDLSQKLKETQSKYEEAMKEVLSVQKQMKLGLVSPESMDNYSHFHELRVTEEEINVLKQDLQNALEESERNKEKVRELEEKLVEREKGTVIKPPVEEYEEMKSSYCSVIENMNKEKAFLFEKYQEAQEEIMKLKDTLKSQMTQEASDEAEDMKEAMNRMIDELNKQVSELSQLYKEAQAELEDYRKRKSLEDVTAEYIHKAEHEKLMQLTNVSRAKAEDALSEMKSQYSKVLNELTQLKQLVDAQKENSVSITEHLQVITTLRTAAKEMEEKISNLKEHLASKEVEVAKLEKQLLEEKAAMTDAMVPRSSYEKLQSSLESEVSVLASKLKESVKEKEKVHSEVVQIRSEVSQVKREKENIQTLLKSKEQEVNELLQKFQQAQEELAEMKRYAESSSKLEEDKDKKINEMSKEVTKLKEALNSLSQLSYSTSSSKRQSQQLEALQQQVKQLQNQLAECKKQHQEVISVYRMHLLYAVQGQMDEDVQKVLKQILTMCKNQSQKK

SEQ ID NO: 2026 - protein, 723 aa, Homo sapiens
MFEEKASSPSGKMGGEEKPIGAGEEKQKEGGKKKNKEGSGDGGRAELNPWPEYIYTRLEMYNILKAEHDSILAEKAEKDSKPIKVTLPDGKQVDAESWKTTPYQIACGISQGLADNTVIAKVNNVVWDLDRPLEEDCTLELLKFEDEEAQAVYWHSSAHIMGEAMERVYGGCLCYGPPIENGFYYDMYLEEGGVSSNDFSSLEALCKKIIKEKQAFERLEVKKETLLAMFKYNKFKCRILNEKVNTPTTTVYRCGPLIDLCRGPHVRHTGKIKALKIHKNSSTYWEGKADMETLQRIYGISFPDPKMLKEWEKFQEEAKNRDHRKIGRDQELYFFHELSPGSCFFLPKGAYIYNALIEFIRSEYRKRGFQEVVTPNIFNSRLWMTSGHWQHYSENMFSFEVEKELFALKPMNCPGHCLMFDHRPRSWRELPLRLADFGVLHRNELSGALTGLTRVRRFQQDDAHIFCAMEQIEDEIKGCLDFLRTVYSVFGFSFKLNLSTRPEKFLGDIEVWDQAEKQLENSLNEFGEKWELNSGDGAFYGPKIDIQIKDAIGRYHQCATIQLDFQLPIRFNLTYVSHDGDDKKRPVIVHRAILGSVERMIAILTENYGGKWPFWLSPRQVMVVPVGPTCDEYAQKVRQQFHDAKFMADIDLDPGCTLNKKIRNAQLAQYNFILVVGEKEKISGTVNIRTRDNKVHGERTISETIERLQQLKEFRSKQAEEEF

SEQ ID NO: 2027 - protein, 542 aa, Homo sapiens
MTKSNGEEPKMGGRMERFQQGVRKRTLLAKKKVQNITKEDVKSYLFRNAFVLLTVTAVIVGTILGFTLRPYRMSYREVKYFSFPGELLMRMLQMLVLPLIISSLVTGMAALDSKASGKMGMRAVVYYMTTTIIAVVIGIIIVIIIHPGKGTKENMHREGKIVRVTAADAFLDLIRNMFPPNLVEACFKQFKTNYEKRSFKVPIQANETLVGAVINNVSEAMETLTRITEELVPVPGSVNGVNALGLVVFSMCFGFVIGNMKEQGQALREFFDSLNEAIMRLVAVIMWYAPVGILFLIAGKIVEMEDMGVIGGQLAMYTVTVIVGLLIHAVIVLPLLYFLVTRKNPWVFIGGLLQALITALGTSSSSATLPITFKCLEENNGVDKRVTRFVLPVGATINMDGTALYEALAAIFIAQVNNFELNFGQIITISITATAASIGAAGIPQAGLVTMVIVLTSVGLPTDDITLIIAVDWFLDRLRTTTNVLGDSLGAGIVEHLSRHELKNRDVEMGNSVIEENEMKKPYQLIAQDNETEKPIDSETKM

SEQ ID NO: 2028 - protein, 2201 aa, Homo sapiens
MGAMTQLLAGVFLAFLALATEGGVLKKVIRHKRQSGVNATLPEENQPVVFNHVYNIKLPVGSQCSVDLESASGEKDLAPPSEPSESFQEHTVDGENQIVFTHRINIPRRACGCAAAPDVKELLSRLEELENLVSSLREQCTAGAGCCLQPATGRLDTRPFCSGRGNFSTEGCGCVCEPGWKGPNCSEPECPGNCHLRGRCIDGQCICDDGFTGEDCSQLACPSDCNDQGKCVNGVCICFEGYAGADCSREICPVPCSEEHGTCVDGLCVCHDGFAGDDCNKPLCLNNCYNRGRCVENECVCDEGFTGEDCSELICPNDCFDRGRCINGTCYCEEGFTGEDCGKPTCPHACHTQGRCEEGQCVCDEGFAGVDCSEKRCPADCHNRGRCVDGRCECDDGFTGADCGELKCPNGCSGHGRCVNGQCVCDEGYTGEDCSQLRCPNDCHSRGRCVEGKCVCEQGFKGYDCSDMSCPNDCHQHGRCVNGMCVCDDGYTGEDCRDRQCPRDCSNRGLCVDGQCVCEDGFTGPDCAELSCPNDCHGQGRCVNGQCVCHEGFMGKDCKEQRCPSDCHGQGRCVDGQCICHEGFTGLDCGQHSCPSDCNNLGQCVSGRCICNEGYSGEDCSEVSPPKDLVVTEVTEETVNLAWDNEMRVTEYLVVYTPTHEGGLEMQFRVPGDQTSTIIQELEPGVEYFIRVFAILENKKSIPVSARVATYLPAPEGLKFKSIKETSVEVEWDPLDIAFETWEIIFRNMNKEDEGEITKSLRRPETSYRQTGLAPGQEYEISLHIVKNNTRGPGLKRVTTTRLDAPSQIEVKDVTDTTALITWFKPLAEIDGIELTYGIKDVPGDRTTIDLTEDENQYSIGNLKPDTEYEVSLISRRGDMSSNPAKETFTTGLDAPRNLRRVSQTDNSITLEWRNGKAAIDSYRIKYAPISGGDHAEVDVPKSQQATTKTTLTGLRPGTEYGIGVSAVKEDKESNPATINAATELDTPKDLQVSETAETSLTLLWKTPLAKFDRYRLNYSLPTGQWVGVQLPRNTTSYVLRGLEPGQEYNVLLTAEKGRHKSKPARVKASTEQAPELENLTVTEVGWDGLRLNWTAADQAYEHFIIQVQEANKVEAARNLTVPGSLRAVDIPGLKAATPYTVSIYGVIQGYRTPVLSAEASTGETPNLGEVVVAEVGWDALKLNWTAPEGAYEYFFIQVQEADTVEAAQNLTVPGGLRSTDLPGLKAATHYTITIRGVTQDFSTTPLSVEVLTEEVPDMGNLTVTEVSWDALRLNWTTPDGTYDQFTIQVQEADQVEEAHNLTVPGSLRSMEIPGLRAGTPYTVTLHGEVRGHSTRPLAVEVVTEDLPQLGDLAVSEVGWDGLRLNWTAADNAYEHFVIQVQEVNKVEAAQNLTLPGSLRAVDIPGLEAATPYRVSIYGVIRGYRTPVLSAEASTAKEPEIGNLNVSDITPESFNLSWMATDGIFETFTIEIIDSNRLLETVEYNISGAERTAHISGLPPSTDFIVYLSGLAPSIRTKTISATATTEALPLLENLTISDINPYGFTVSWMASENAFDSFLVTVVDSGKLLDPQEFTLSGTQRKLELRGLITGIGYEVMVSGFTQGHQTKPLRAEIVTEAEPEVDNLLVSDATPDGFRLSWTADEGVFDNFVLKIRDTKKQSEPLEITLLAPERTRDITGLREATEYEIELYGISKGRRSQTVSAIATTAMGSPKEVIFSDITENSATVSWRAPTAQVESFRITYVPITGGTPSMVTVDGTKTQTRLVKLIPGVEYLVSIIAMKGFEESEPVSGSFTTALDGPSGLVTANITDSEALARWQPAIATVDSYVISYTGEKVPEITRTVSGNTVEYALTDLEPATEYTLRIFAEKGPQKSSTITAKFTTDLDSPRDLTATEVQSETALLTWRPPRASVTGYLLVYESVDGTVKEVIVGPDTTSYSLADLSPSTHYTAKIQALNGPLRSNMIQTIFTTIGLLYPFPKDCSQAMLNGDTTSGLYTIYLNGDKAEALEVFCDMTSDGGGWIVFLRRKNGRENFYQNWKAYAAGFGDRREEFWLGLDNLNKITAQGQYELRVDLRDHGETAFAVYDKFSVGDAKTRYKLKVEGYSGTAGDSMAYHNGRSFSTFDKDTDSAITNCALSYKGAFWYRNCHRVNLMGRYGDNNHSQGVNWFHWKGHEHSIQFAEMKLRPSNFRNLEGRRKRA

SEQ ID NO: 2029 - protein, 1261 aa, Homo sapiens
MDAPRASAAKPPTGRKMKARAPPPPGKAATLHVHSDQKPPHDGALGSQQNLVRMKEALRASTMDVTVVLPSGLEKRSVLNGSHAMMDLLVELCLQNHLNPSHHALEIRSSETQQPLSFKPNTLIGTLNVHTVFLKEKVPEEKVKPGPPKVPEKSVRLVVNYLRTQKAVVRVSPEVPLQNILPVICAKCEVSPEHVVLLRDNIAGEELELSKSLNELGIKELYAWDNRRETFRKSSLGNDETDKEKKKFLGFFKVNKRSNSKGCLTTPNSPSMHSRSLTLGPSLSLGSISGVSVKSEMKKRRAPPPPGSGPPVQDKASEKVSLGSQIDLQKKKRRAPAPPPPQPPPPSPLIPNRTEDKEENRKSTMVSLPLGSGSHCSPDGAPQVLSEAEETVSVGSCFASEDTTEDSGVMSSPSDIVSLDSQQDSMKYKDKWATDQEDCSDQDLAGTPDLGPQKSPLWEKNGSENSHLRTEKAVTASNDEEDLLIAGEFRKTLAELDEDLEEMEDSYETDTSSLTSSIHGASNHCPQDAMIPHGDTDAIPVTFIGEVSDDPVDSGLFSNRNNNAGSFDSEGVASRRDSLAPLQAEHSQPHEKAREEVPALHPASHDVGKGIRVALSNISKDGNLMETAPRVTSFASNLHTDNLNAKVKDKVYGCADGERTQATERVNSQPVNEKDSNDKNAALAPTSWHQRGQNPGKSYRLKHGLTTYKIIPPKSEMRCYDRDVSLSTGAIKIDELGNLVSPHATGIRIISLSSSVPEAESQPIGKVREFWRCNSVEKHLGRPSESSARGPPSTPVPTQTQNPESRLQADPKPISPQQKSAHHEGRNPLGEGRNQPPTMGMGHVRVPAAHTTEVTFLKPQRRTSSQYVASAIAKRIGAPKVHADVVRPHGYAEKGYAGKAPVLAAPPVTVKDDRTSSPHSETQGWKDGAQWPCVTPPNNHGEDLAVGAPPRGEVIGPHRKLSTQDRPAAIHRSSCFSLVQSSQRDRVSVGQSCGFSGKQSTSSQEASSASEPRRAPDGTDPPPPHTSDTQACSRELVNGSVRAPGHGEPSHPPGGSGTESHILLEREEKPSVFSTDGNETDSIWPPSIFGPKKKFKPVVQRPVPKDTSLHSALMEAIHSAGGKDRLRKTAEHTGEGRPAKLSYTEAEGERSALLAAIRGHSGTCSLRKVASSASEELQSFRDAALSAQGSESPLLEDLGLLSPPAIPPPPPPPSQALSAPRTASRFSTGTLSNTADARQALMDAIRSGTGAARLRKVPLLV

SEQ ID NO: 2030 - protein, 1058 aa, Homo sapiens
MEDGTPKHIIQMTGFKMEEKEALVKLLLKLDCTFIKSEKYKNCTHLIAERLCKSEKFLAACAAGKWILTKDYIIHSAKSGRWLDETTYEWGYKIEKDSRYSPQMQSAPKRWREELKRTGAPGAFHRWKVVLLVRTDKRSDSLIRVLEAGKANVILPKSSPSGITHVIASNARIKAEKEKDNFKAPFYPIQYLGDFLLEKEIQNDEDSQTNSVWTEHSNEETNKDFRKDAGFLEMKGALRETMYRTQKEMQNHEDVNVGSILIQHHKKEKFSGSSKDLKFVKMRNTFGSHTYENQKEIKKKDEDIQRSYTLRRKRKKGKESNCKKGVEHEKIKSTLRRHIYNRDQKEMKNSIFAEYAKESKAMAIKTDVDVVEIKNTLRKHIYRAQAVRYNCIRIDKQPVYNVEVKNAEFPRGVLNLIESLIEGHFFKEAIEELSTLQAHYIPPVCVLHALLENVLQDNIDTFSGRYFHILSALLHLHPPWKSPAMSRYYLELFQCPTCMKGAWSLVEVLIRSCLFNESFCHQISENIGSKVLHLTLLKFFFNLIESEVQHLSQKLYDWSDSQNLKITGKAMLLEIFWSGSETSGLLTKPVNMLLEWTIYSHKEKFKSNDVFKHELAYLLAGILGAAIDYWIFLGLKMGRNVMRHMSDDLGSYVSLSCDDFSSQELEIFICSFSSSWLQMFVAEAVFKKLCLQSSGSVSSEPLSLQKMVYSYLPALGKTGVLGSGKIQVSKKIGQRPCFDSQRTLLMLNGTKQKQVEGLPELLDLNLAKCSSSLKKLKKKSEGELSCSKENCPSVVKKMNFHKTNLKGETALHRACINNQVEKLILLLSLPGIDINVKDNAGWTPLHEACNYGNTVCVQEILQRCPEVDLLTQVDGVTPLHDALSNGHVEIGKLLLQHGGPVLLQQRNAKGELPLDYVVSPQIKEELFAITKIEDTVENFHAQAEKHFHYQQLEFGSFLLSRMLLNFCSIFDLSSEFILASKGLTHLNELLMACKSHKETTSVHTDWLLDLYAGNIKTLQKLPHILKELPENLKVCPGVHTEALMITLEMMCRSVMEFS

SEQ ID NO: 2031 - protein, 2701 aa, Homo sapiens
MAEEGAVAVCVRVRPLNSREESLGETAQVYWKTDNNVIYQVDGSKSFNFDRVFHGNETTKNVYEEIAAPIIDSAIQGYNGTIFAYGQTASGKTYTMMGSEDHLGVIPRAIHDIFQKIKKFPDREFLLRVSYMEIYNETITDLLCGTQKMKPLIIREDVNRNVYVADLTEEVVYTSEMALKWITKGEKSRHYGETKMNQRSSRSHTIFRMILESREKGEPSNCEGSVKVSHLNLVDLAGSERAAQTGAAGVRLKEGCNINRSLFILGQVIKKLSDGQVGGFINYRDSKLTRILQNSLGGNAKTRIICTITPVSFDETLTALQFASTAKYMKNTPYVNEVSTDEALLKRYRKEIMDLKKQLEEVSLETRAQAMEKDQLAQLLEEKDLLQKVQNEKIENLTRMLVTSSSLTLQQELKAKRKRRVTWCLGKINKMKNSNYADQFNIPTNITTKTHKLSINLLREIDESVCSESDVFSNTLDTLSEIEWNPATKLLNQENIESELNSLRADYDNLVLDYEQLRTEKEEMELKLKEKNDLDEFEALERKTKKDQEMQLIHEISNLKNLVKHAEVYNQDLENELSSKVELLREKEDQIKKLQEYIDSQKLENIKMDLSYSLESIEDPKQMKQTLFDAETVALDAKRESAFLRSENLELKEKMKELATTYKQMENDIQLYQSQLEAKKKMQVDLEKELQSAFNEITKLTSLIDGKVPKDLLCNLELEGKITDLQKELNKEVEENEALREEVILLSELKSLPSEVERLRKEIQDKSEELHIITSEKDKLFSEVVHKESRVQGLLEEIGKTKDDLATTQSNYKSTDQEFQNFKTLHMDFEQKYKMVLEENERMNQEIVNLSKEAQKFDSSLGALKTELSYKTQELQEKTREVQERLNEMEQLKEQLENRDSTLQTVEREKTLITEKLQQTLEEVKTLTQEKDDLKQLQESLQIERDQLKSDIHDTVNMNIDTQEQLRNALESLKQHQETINTLKSKISEEVSRNLHMEENTGETKDEFQQKMVGIDKKQDLEAKNTQTLTADVKDNEIIEQQRKIFSLIQEKNELQQMLESVIAEKEQLKTDLKENIEMTIENQEELRLLGDELKKQQEIVAQEKNHAIKKEGELSRTCDRLAEVEEKLKEKSQQLQEKQQQLLNVQEEMSEMQKKINEIENLKNELKNKELTLEHMETERLELAQKLNENYEEVKSITKERKVLKELQKSFETERDHLRGYIREIEATGLQTKEELKIAHIHLKEHQETIDELRRSVSEKTAQIINTQDLEKSHTKLQEEIPVLHEEQELLPNVKEVSETQETMNELELLTEQSTTKDSTTLARIEMERLRLNEKFQESQEEIKSLTKERDNLKTIKEALEVKHDQLKEHIRETLAKIQESQSKQEQSLNMKEKDNETTKIVSEMEQFKPKDSALLRIEIEMLGLSKRLQESHDEMKSVAKEKDDLQRLQEVLQSESDQLKENIKEIVAKHLETEEELKVAHCCLKEQEETINELRVNLSEKETEISTIQKQLEAINDKLQNKIQEIYEKEEQFNIKQISEVQEKVNELKQFKEHRKAKDSALQSIESKMLELTNRLQESQEEIQIMIKEKEEMKRVQEALQIERDQLKENTKEIVAKMKESQEKEYQFLKMTAVNETQEKMCEIEHLKEQFETQKLNLENIETENIRLTQILHENLEEMRSVTKERDDLRSVEETLKVERDQLKENLRETITRDLEKQEELKIVHMHLKEHQETIDKLRGIVSEKTNEISNMQKDLEHSNDALKAQDLKIQEELRIAHMHLKEQQETIDKLRGIVSEKTDKLSNMQKDLENSNAKLQEKIQELKANEHQLITLKKDVNETQKKVSEMEQLKKQIKDQSLTLSKLEIENLNLAQKLHENLEEMKSVMKERDNLRRVEETLKLERDQLKESLQETKARDLEIQQELKTARMLSKEHKETVDKLREKISEKTIQISDIQKDLDKSKDELQKKIQELQKKELQLLRVKEDVNMSHKKINEMEQLKKQFEAQNLSMQSVRMDNFQLTKKLHESLEEIRIVAKERDELRRIKESLKMERDQFIATLREMIARDRQNHQVKPEKRLLSDGQQHLTESLREKCSRIKELLKRYSEMDDHYECLNRLSLDLEKEIEFQKELSMRVKANLSLPYLQTKHIEKLFTANQRCSMEFHRIMKKLKYVLSYVTKIKEEQHESINKFEMDFIDEVEKQKELLIKIQHLQQDCDVPSRELRDLKLNQNMDLHIEEILKDFSESEFPSIKTEFQQVLSNRKEMTQFLEEWLNTRFDIEKLKNGIQKENDRICQVNNFFNNRIIAIMNESTEFEERSATISKEWEQDLKSLKEKNEKLFKNYQTLKTSLASGAQVNPTTQDNKNPHVTSRATQLTTEKIRELENSLHEAKESAMHKESKIIKMQKELEVTNDIIAKLQAKVHESNKCLEKTKETIQVLQDKVALGAKPYKEEIEDLKMKLVKIDLEKMKNAKEFEKEISATKATVEYQKEVIRLLRENLRRSQQAQDTSVISEHTDPQPSNKPLTCGGGSGIVQNTKALILKSEHIRLEKEISKLKQQNEQLIKQKNELLSNNQHLSNEVKTWKERTLKREAHKQVTCENSPKSPKVTGTASKKKQITPSQCKERNLQDPVPKESPKSCFFDSRSKSLPSPHPVRYFDNSSLGLCPEVQNAGAESVDSQPGPWHASSGKDVPECKTQ

SEQ ID NO: 2032 - protein, 1194 aa, Homo sapiens
MEQDRTNHVEGNRLSPFLIPSPPICQTEPLATKLQNGSPLPERAHPEVNGDTKWHSFKSYYGIPCMKGSQNSRVSPDFTQESRGYSKCLQNGGIKRTVSEPSLSGLLQIKKLKQDQKANGERRNFGVSQERNPGESSQPNVSDLSDKKESVSSVAQENAVKDFTSFSTHNCSGPENPELQILNEQEGKSANYHDKNIVLLKNKAVLMPNGATVSASSVEHTHGELLEKTLSQYYPDCVSIAVQKTTSHINAINSQATNELSCEITHPSHTSGQINSAQTSNSELPPKPAAVVSEACDADDADNASKLAAMLNTCSFQKPEQLQQQKSVFEICPSPAENNIQGTTKLASGEEFCSGSSSNLQAPGGSSERYLKQNEMNGAYFKQSSVFTKDSFSATTTPPPPSQLLLSPPPPLPQVPQLPSEGKSTLNGGVLEEHHHYPNQSNTTLLREVKIEGKPEAPPSQSPNPSTHVCSPSPMLSERPQNNCVNRNDIQTAGTMTVPLCSEKTRPMSEHLKHNPPIFGSSGELQDNCQQLMRNKEQEILKGRDKEQTRDLVPPTQHYLKPGWIELKAPRFHQAESHLKRNEASLPSILQYQPNLSNQMTSKQYTGNSNMPGGLPRQAYTQKTTQLEHKSQMYQVEMNQGQSQGTVDQHLQFQKPSHQVHFSKTDHLPKAHVQSLCGTRFHFQQRADSQTEKLMSPVLKQHLNQQASETEPFSNSHLLQHKPHKQAAQTQPSQSSHLPQNQQQQQKLQIKNKEEILQTFPHPQSNNDQQREGSFFGQTKVEECFHGENQYSKSSEFETHNVQMGLEEVQNINRRNSPYSQTMKSSACKIQVSCSNNTHLVSENKEQTTHPELFAGNKTQNLHHMQYFPNNVIPKQDLLHRCFQEQEQKSQQASVLQGYKNRNQDMSGQQAAQLAQQRYLIHNHANVFPVPDQGGSHTQTPPQKDTQKHAALRWHLLQKQEQQQTQQPQTESCHSQMHRPIKVEPGCKPHACMHTAPPENKTWKKVTKQENPPASCDNVQQKSIIETMEQHLKQFHAKSLFDHKALTLKSQKQVKVEMSGPVTVLTRQTTAAELDSHTPALEQQTTSSEKTPTKRTAASVLNNFIESPSKLLDTPIKNLLDTPVKTQYDFPSCRCVGLDRRVKLLGLKESSILVKKAKVLRDVLLLSGWFAEAAVKRSYCVWCGSELATPVRLQ

SEQ ID NO: 2033 - protein, 957 aa, Homo sapiens
MNFAEREGSKRYCIQTKHVAILCAVVVGVGLIVGLAVGLTRSCDSSGDGGPGTAPAPSHLPSSTASPSGPPAQDQDICPASEDESGQWKNFRLPDFVNPVHYDLHVKPLLEEDTYTGTVSISINLSAPTRYLWLHLRETRITRLPELKRPSGDQVQVRRCFEYKKQEYVVVEAEEELTPSSGDGLYLLTMEFAGWLNGSLVGFYRTTYTENGQVKSIVATDHEPTDARKSFPCFDEPNKKATYTISITHPKEYGALSNMPVAKEESVDDKWTRTTFEKSVPMSTYLVCFAVHQFDSVKRISNSGKPLTIYVQPEQKHTAEYAANITKSVFDYFEEYFAMNYSLPKLDKIAIPDFGTGAMENWGLITYRETNLLYDPKESASSNQQRVATVVAHELVHQWFGNIVTMDWWEDLWLNEGFASFFEFLGVNHAETDWQMRDQMLLEDVLPVQEDDSLMSSHPIIVTVTTPDEITSVFDGISYSKGSSILRMLEDWIKPENFQKGCQMYLEKYQFKNAKTSDFWAALEEASRLPVKEVMDTWTRQMGYPVLNVNGVKNITQKRFLLDPRANPSQPPSDLGYTWNIPVKWTEDNITSSVLFNRSEKEGITLNSSNPSGNAFLKINPDHIGFYRVNYEVATWDSIATALSLNHKTFSSADRASLIDDAFALARAQLLDYKVALNLTKYLKREENFLPWQRVISAVTYIISMFEDDKELYPMIEEYFQGQVKPIADSLGWNDAGDHVTKLLRSSVLGFACKMGDREALNNASSLFEQWLNGTVSLPVNLRLLVYRYGMQNSGNEISWNYTLEQYQKTSLAQEKEKLLYGLASVKNVTLLSRYLDLLKDTNLIKTQDVFTVIRYISYNSYGKNMAWNWIQLNWDYLVNRYTLNNRNLGRIVTIAEPFNTELQLWQMESFFAKYPQAGAGEKPREQVLETVKNNIEWLKQHRNTIREWFFNLLESG

SEQ ID NO: 2034 - protein, 399 aa, Homo sapiens
MPQLSGGGGGGGGDPELCATDEMIPFKDEGDPQKEKIFAEISHPEEEGDLADIKSSLVNESEIIPASNGHEVARQAQTSQEPYHDKAREHPDDGKHPDGGLYNKGPSYSSYSGYIMMPNMNNDPYMSNGSLSPPIPRTSNKVPVVQPSHAVHPLTPLITYSDEHFSPGSHPSHIPSDVNSKQGMSRHPPAPDIPTFYPLSPGGVGQITPPLGWQGQPVYPITGGFRQPYPSSLSVDTSMSRFSHHMIPGPPGPHTTGIPHPAIVTPQVKQEHPHTDSDLMHVKPQHEQRKEQEPKRPHIKKPLNAFMLYMKEMRANVVAECTLKESAAINQILGRRWHALSREEQAKYYELARKERQLHMQLYPGWSARDNYGKKKKRKREKLQESASGTGPRMTAAYI

SEQ ID NO: 2035 - protein, 1207 aa, Homo sapiens
MLLTLIILLPVVSKFSFVSLSAPQHWSCPEGTLAGNGNSTCVGPAPFLIFSHGNSIFRIDTEGTNYEQLVVDAGVSVIMDFHYNEKRIYWVDLERQLLQRVFLNGSRQERVCNIEKNVSGMAINWINEEVIWSNQQEGIITVTDMKGNNSHILLSALKYPANVAVDPVERFIFWSSEVAGSLYRADLDGVGVKALLETSEKITAVSLDVLDKRLFWIQYNREGSNSLICSCDYDGGSVHISKHPTQHNLFAMSLFGDRIFYSTWKMKTIWIANKHTGKDMVRINLHSSFVPLGELKVVHPLAQPKAEDDTWEPEQKLCKLRKGNCSSTVCGQDLQSHLCMCAEGYALSRDRKYCEDVNECAFWNHGCTLGCKNTPGSYYCTCPVGFVLLPDGKRCHQLVSCPRNVSECSHDCVLTSEGPLCFCPEGSVLERDGKTCSGCSSPDNGGCSQLCVPLSPVSWECDCFPGYDLQLDEKSCAASGPQPFLLFANSQDIRHMHFDGTDYGTLLSQQMGMVYALDHDPVENKIYFAHTALKWIERANMDGSQRERLIEEGVDVPEGLAVDWIGRRFYWTDRGKSLIGRSDLNGKRSKIITKENISQPRGIAVHPMAKRLFWTDTGINPRIESSSLQGLGRLVIASSDLIWPSGITIDFLTDKLYWCDAKQSVIEMANLDGSKRRRLTQNDVGHPFAVAVFEDYVWFSDWAMPSVMRVNKRTGKDRVRLQGSMLKPSSLVVVHPLAKPGADPCLYQNGGCEHICKKRLGTAWCSCREGFMKASDGKTCLALDGHQLLAGGEVDLKNQVTPLDILSKTRVSEDNITESQHMLVAEIMVSDQDDCAPVGCSMYARCISEGEDATCQCLKGFAGDGKLCSDIDECEMGVPVCPPASSKCINTEGGYVCRCSEGYQGDGIHCLDIDECQLGEHSCGENASCTNTEGGYTCMCAGRLSEPGLICPDSTPPPHLREDDHHYSVRNSDSECPLSHDGYCLHDGVCMYIEALDKYACNCVVGYIGERCQYRDLKWWELRHAGHGQQQKVIVVAVCVVVLVMLLLLSLWGAHYYRTQKLLSKNPKNPYEESSRDVRSRRPADTEDGMSSCPQPWFVVIKEHQDLKNGGQPVAGEDGQAADGSMQPTSWRQEPQLCGMGTEQGCWIPVSSDKGSCPQVMERSFHMPSYGTQTLEGGVEKPHSLLSANPLWQQRALDPPHQMELTQ

SEQ ID NO: 2036 - protein, 624 aa, Homo sapiens
MEIPGSLCKKVKLSNNAQNWGMQRATNVTYQAHHVSRNKRGQVVGTRGGFRGCTVWLTGLSGAGKTTVSMALEEYLVCHGIPCYTLDGDNIRQGLNKNLGFSPEDREENVRRIAEVAKLFADAGLVCITSFISPYTQDRNNARQIHEGASLPFFEVFVDAPLHVCEQRDVKGLYKKARAGEIKGFTGIDSEYEKPEAPELVLKTDSCDVNDCVQQVVELLQERDIVPVDASYEVKELYVPENKLHLAKTDAETLPALKINKVDMQWVQVLAEGWATPLNGFMREREYLQCLHFDCLLDGGVINLSVPIVLTATHEDKERLDGCTAFALMYEGRRVAILRNPEFFEHRKEERCARQWGTTCKNHPYIKMVMEQGDWLIGGDLQVLDRVYWNDGLDQYRLTPTELKQKFKDMNADAVFAFQLRNPVHNGHALLMQDTHKQLLERGYRRPVLLLHPLGGWTKDDDVPLMWRMKQHAAVLEEGVLNPETTVVAIFPSPMMYAGPTEVQWHCRARMVAGANFYIVGRDPAGMPHPETGKDLYEPSHGAKVLTMAPGLITLEIVPFRVAAYNKKKKRMDYYDSEHHEDFEFISGTRMRKLAREGQKPPEGFMAPKAWTVLTEYYKSLEKA

SEQ ID NO: 2037 - protein, 1268 aa, Homo sapiens
MSAPAGSSHPAASARIPPKFGGAAVSGAAAPAGPGAGPAPHQQNGPAQNQMQVPSGYGLHHQNYIAPSGHYSQGPGKMTSLPLDTQCGDYYSALYTVPTQNVTPNTVNQQPGAQQLYSRGPPAPHIVGSTLGSFQGAASSASHLHTSASQPYSSFVNHYNSPAMYSASSSVASQGFPSTCGHYAMSTVSNAAYPSVSYPSLPAGDTYGQMFTSQNAPTVRPVKDNSFSGQNTAISHPSPLPPLPSQQHHQQQSLSGYSTLTWSSPGLPSTQDNLIRNHTGSLAVANNNPTITVADSLSCPVMQNVQPPKSSPVVSTVLSGSSGSSSTRTPPTANHPVEPVTSVTQPSELLQQKGVQYGEYVNNQASSAPTPLSSTSDDEEEEEEDEEAGVDSSSTTSSASPMPNSYDALEGGSYPDMLSSSASSPAPDPAPEPDPASAPAPASAPAPVVPQPSKMAKPFGYGYPTLQPGYQNATAPLISGVQPSNPVYSGFQQYPQQYPGVNQLSSSIGGLSLQSSPQPESLRPVNLTQERNILPMTPVWAPVPNLNADLKKLNCSPDSFRCTLTNIPQTQALLNKAKLPLGLLLHPFRDLTQLPVITSNTIVRCRSCRTYINPFVSFIDQRRWKCNLCYRVNDVPEEFMYNPLTRSYGEPHKRPEVQNSTVEFIASSDYMLRPPQPAVYLFVLDVSHNAVEAGYLTILCQSLLENLDKLPGDSRTRIGFMTFDSTIHFYNLQEGLSQPQMLIVSDIDDVFLPTPDSLLVNLYESKELIKDLLNALPNMFTNTRETHSALGPALQAAFKLMSPTGGRVSVFQTQLPSLGAGLLQSREDPNQRSSTKVVQHLGPATDFYKKLALDCSGQQTAVDLFLLSSQYSDLASLACMSKYSAGCIYYYPSFHYTHNPSQAEKLQKDLKRYLTRKIGFEAVMRIRCTKGLSMHTFHGNFFVRSTDLLSLANINPDAGFAVQLSIEESLTDTSLVCFQTALLYTSSKGERRIRVHTLCLPVVSSLADVYAGVDVQAAICLLANMAVDRSVSSSLSDARDALVNAVVDSLSAYGSTVSNLQHSALMAPSSLKLFPLYVLALLKQKAFRTGTSTRLDDRVYAMCQIKSQPLVHLMKMIHPNLYRIDRLTDEGAVHVNDRIVPQPPLQKLSAEKLTREGAFLMDCGSVFYIWVGKGCDNNFIEDVLGYTNFASIPQKMTHLPELDTLSSERARSFITWLRDSRPLSPILHIVKDESPAKAEFFQHLIEDRTEAAFSYYEFLLHVQQQICK

SEQ ID NO: 2038 - protein, 824 aa, Homo sapiens
MNGEYRGRGFGRGRFQSWKRGRGGGNFSGKWREREHRPDLSKTTGKRTSEQTPQFLLSTKTPQSMQSTLDRFIPYKGWKLYFSEVYSDSSPLIEKIQAFEKFFTRHIDLYDKDEIERKGSILVDFKELTEGGEVTNLIPDIATELRDAPEKTLACMGLAIHQVLTKDLERHAAELQAQEGLSNDGETMVNVPHIHARVYNYEPLTQLKNVRANYYGKYIALRGTVVRVSNIKPLCTKMAFLCAACGEIQSFPLPDGKYSLPTKCPVPVCRGRSFTALRSSPLTVTMDWQSIKIQELMSDDQREAGRIPRTIECELVHDLVDSCVPGDTVTITGIVKVSNAEEANSISNSKGQKTKSSEDGCKHGMLMEFSLKDLYAIQEIQAEENLFKLIVNSLCPVIFGHELVKAGLALALFGGSQKYADDKNRIPIRGDPHILVVGDPGLGKSQMLQAACNVAPRGVYVCGNTTTTSGLTVTLSKDSSSGDFALEAGALVLGDQGICGIDEFDKMGNQHQALLEAMEQQSISLAKAGVVCSLPARTSIIAAANPVGGHYNKAKTVSENLKMGSALLSRFDLVFILLDTPNEHHDHLLSEHVIAIRAGKQRTISSATVARMNSQDSNTSVLEVVSEKPLSERLKVVPGETIDPIPHQLLRKYIGYARQYVYPRLSTEAARVLQDFYLELRKQSQRLNSSPITTRQLESLIRLTEARARLELREEATKEDAEDIVEIMKYSMLGTYSDEFGNLDFERSQHGSGMSNRSTAKRFISALNNVAERTYNNIFQFHQLRQIAKELNIQVADFENFIGSLNDQGYLLKKGPKVYQLQTM

SEQ ID NO: 2039 - protein, 437 aa, Homo sapiens
MTSYMAIDGSALVPLRQKPRRKTQGFLTMSRRRISCKDLGHADCQGWLYKKKEKGSFLSNKWKKFWVILKGSSLYWYSNQMAEKADGFVNLPDFTVERASECKKKHAFKISHPQIKTFYFAAENVQEMNVWLNKLGSAVIHQESTTKDEECYSESEQEDPEIAAETPPPPHASQTQSLTAQQASSSSPSLSGTSYSFSSLENTVKTPSSFPSSLSKERQSLPDTVNSLSAAEDEGQPITFAVQVHSPVPSEAGIHKALENSFVTSESGFLNSLSSDDTSSLSSNHDHLTVPDKPAGSKIMDKEETKVSEDDEMEKLYKSLEQASLSPLGDRRPSTKKELRKSFVKRCKNPSINEKLHKIRTLNSTLKCKEHDLAMINQLLDDPKLTARKYREWKVMNTLLIQDIYQQQRASPAPDDTDDTPQELKKSPSSPSVENSI

SEQ ID NO: 2040 - protein, 443 aa, Homo sapiens
MEEDSLEDSNLPPKVWHSEMTVSVTGEPPSTVEEEGIPKETDIEIIPEIPETLEPLSLPDVLRISAVLEDTTDQLSILNYIMPVQYEGRQSICVKSREMNLEGTNLDKLPMASTITKIPSPLITEEGPNLPEIRHRGRFAVEFNKMQDLVFKKPTRQTIMTTETLKKIQIDRQFFSDVIADTIKELQDSATYNSLLQALSKERENKMHFYDIIAREEKGRKQIISLQKQLINVKKEWQFEVQSQNEYIANLKDQLQEMKAKSNLENRYMKTNTELQIAQTQKKCNRTEELLVEEIEKLRMKTEEEARTHTEIEMFLRKEQQKLEERLEFWMEKYDKDTEMKQNELNALKATKASDLAHLQDLAKMIREYEQVIIEDRIEKERSKKKVKQDLLELKSVIKLQAWWRGTMIRREIGGFKMPKDKVDSKDSKGKGKGKDKRRGKKK

SEQ ID NO: 2041 - protein, 658 aa, Homo sapiens
MGRRRAPAGGSLGRALMRHQTQRSRSHRHTDSWLHTSELNDGYDWGRLNLQSVTEQSSLDDFLATAELAGTEFVAEKLNIKFVPAEARTGLLSFEESQRIKKLHEENKQFLCIPRRPNWNQNTTPEELKQAEKDNFLEWRRQLVRLEEEQKLILTPFERNLDFWRQLWRVIERSDIVVQIVDARNPLLFRCEDLECYVKEMDANKENVILINKADLLTAEQRSAWAMYFEKEDVKVIFWSALAGAIPLNGDSEEEANRDDRQSNTTKFGHSSFDQAEISHSESEHLPARDSPSLSENPTTDEDDSEYEDCPEEEEDDWQTCSEEDGPKEEDCSQDWKESSTADSEARSRKTPQKRQIHNFSHLVSKQELLELFKELHTGRKVKDGQLTVGLVGYPNVGKSSTINTIMGNKKVSVSATPGHTKHFQTLYVEPGLCLCDCPGLVMPSFVSTKAEMTCSGILPIDQMRDHVPPVSLVCQNIPRHVLEATYGINIITPREDEDPHRPPTSEELLTAYGYMRGFMTAHGQPDQPRSARYILKDYVSGKLLYCHPPPGRDPVTFQHQHQRLLENKMNSDEIKMQLGRNKKAKQIENIVDKTFFHQENVRALTKGVQAVMGYKPGSGVVTASTASSENGAGKPWKKHGNRNKKEKSRRLYKHLDM

SEQ ID NO: 2042 - protein, 1060 aa, Homo sapiens
MLIEDVDALKSWLAKLLEPICDADPSALANYVVALVKKDKPEKELKAFCADQLDVFLQKETSGFVDKLFESLYTKNYLPLLEPVKPEPKPLVQEKEEIKEEVFQEPAEEERDGRKKKYPSPQKTRSESSERRTREKKREDGKWRDYDRYYERNELYREKYDWRRGRSKSRSKSRGLSRSRSRSRGRSKDRDPNRNVEHRERSKFKSERNDLESSYVPVSAPPPNSSEQYSSGAQSIPSTVTVIAPAHHSENTTESWSNYYNNHSSSNSFGRNLPPKRRCRDYDERGFCVLGDLCQFDHGNDPLVVDEVALPSMIPFPPPPPGLPPPPPPGMLMPPMPGPGPGPGPGPGPGPGPGPGPGHSMRLPVPQGHGQPPPSVVLPIPRPPITQSSLINSRDQPGTSAVPNLASVGTRLPPPLPQNLLYTVSERQPMYSREHGAAASERLQLGTPPPLLAARLVPPRNLMGSSIGYHTSVSSPTPLVPDTYEPDGYNPEAPSITSSGRSQYRQFFSRTQTQRPNLIGLTSGDMDVNPRAANIVIQTEPPVPVSINSNITRVVLEPDSRKRAMSGLEGPLTKKPWLGKQGNNNQNKPGFLRKNQYTNTKLEVKKIPQELNNITKLNEHFSKFGTIVNIQVAFKGDPEAALIQYLTNEEARKAISSTEAVLNNRFIRVLWHRENNEQPTLQSSAQLLLQQQQTLSHLSQQHHHLPQHLHQQQVLVAQSAPSTVHGGIQKMMSKPQTSGAYVLNKVPVKHRLGHAGGNQSDASHLLNQSGGAGEDCQIFSTPGHPKMIYSSSNLKTPSKLCSGSKSHDVQEVLKKKQEAMKLQQDMRKKRQEVLEKQIECQKMLISKLEKNKNMKPEERANIMKTLKELGEKISQLKDELKTSSAVSTPSKVKTKTEAQKELLDTELDLHKRLSSGEDTTELRKKLSQLQVEAARLGILPVGRGKTMSSQGRGRGRGRGGRGRGSLNHMVVDHRPKALTVGGFIEEEKEDLLQHFSTANQGPKFKDRRLQISWHKPKVPSISTETEEEEVKEEETETSDLFLPDDDDEDEDEYESRSWRR

SEQ ID NO: 2043 - protein, 810 aa, Homo sapiens
MSKKGRNKGEKPEALIVALQAANEDLRTKLTDIQIELHQEKSKVSKLEREKTQEAKRIRELEQRKHTVLVTELKAKLHEEKMKELQAVRENLIKQHEQEMSRTVKVRDGEIQRLKSALCALRDGSSDKVRTALTIEAREEARKLFDTERLKLLQEIADLKTAKKQVDEALSNMIQADKIKAGDLRSEHQSHQEAISKIKWESERDIRRLMDEIKAKDRIIFSLEKELETQTGYVQKLQLQKEALDEQLFLVKEAECNMSSPKREIPGRAGDGSEHCSSPDLRRNQKRIAELNATIRKLEDRNTLLGDERNELLKRVRETEKQCKPLLERNKCLAKRNDELMVSLQRMEEKLKAVTKENSEMREKITSHPPLKKLKSLNDLDQANEEQETEFLKLQVIEQQNIIDELTRDREKLIRRRKHRRSSKPIKRPVLDPFIGYDEDSMDSETSSMASFRTDRTPATPDDDLDESLAAEESELRFRQLTKEYQALQRAYALLQEQTGGIIDAEREAKAQEQLQAEVLRYKAKIEDLEATLAQKGQDSHWVEDKQLFIKRNQELLEKIEKQEAENHRLQQELQDARDQNELLEFRNLELEERERRSPPFNLQIHPFSDGVSALQIYCMKEGVKDVNIPDLIKQLDILGDNGNLRNEEQVAIIQASTVLSLAEKWIQQIEGAEAALHQKMMELESDMEQFCKIKGYLEEELDYRKQALDQAYMRIQELEATLYNALQQETVIKFGELLSEKQQEELRTAVEKLRRQMLRKSREYDCQILQERMELLQQAHQRIRDLEDKTDIQKRQIKDLEEKSNRKHG

SEQ ID NO: 2044 - protein, 828 aa, Homo sapiens
MDESALTLGTIDVSYLPHSSEYSVGRCKHTSEEWGECGFRPTIFRSATLKWKESLMSRKRPFVGRCCYSCTPQSWDKFFNPSIPSLGLRNVIYINETHTRHRGWLARRLSYVLFIQERDVHKGMFATNVTENVLNSSRVQEAIAEVAAELNPDGSAQQQSKAVNKVKKKAKRILQEMVATVSPAMIRLTGWVLLKLFNSFFWNIQIHKGQLEMVKAATETNLPLLFLPVHRSHIDYLLLTFILFCHNIKAPYIASGNNLNIPIFSTLIHKLGGFFIRRRLDETPDGRKDVLYRALLHGHIVELLRQQQFLEIFLEGTRSRSGKTSCARAGLLSVVVDTLSTNVIPDILIIPVGISYDRIIEGHYNGEQLGKPKKNESLWSVARGVIRMLRKNYGCVRVDFAQPFSLKEYLESQSQKPVSALLSLEQALLPAILPSRPSDAADEGRDTSINESRNATDESLRRRLIANLAEHILFTASKSCAIMSTHIVACLLLYRHRQGIDLSTLVEDFFVMKEEVLARDFDLGFSGNSEDVVMHAIQLLGNCVTITHTSRNDEFFITPSTTVPSVFELNFYSNGVLHVFIMEAIIACSLYAVLNKRGLGGPTSTPPNLISQEQLVRKAASLCYLLSNEGTISLPCQTFYQVCHETVGKFIQYGILTVAEHDDQEDISPSLAEQQWDKKLPEPLSWRSDEEDEDSDFGEEQRDCYLKVSQSKEHQQFITFLQRLLGPLLEAYSSAAIFVHNFSGPVPEPEYLQKLHKYLITRTERNVAVYAESATYCLVKNAVKMFKDIGVFKETKQKRVSVLELSSTFLPQCNRQKLLEYILSFVVL

SEQ ID NO: 2045 - protein, 536 aa, Homo sapiens
MSSSLGKEKDSKEKDPKVPSAKEREKEAKASGGFGKESKEKEPKTKGKDAKDGKKDSSAAQPGVAFSVDNTIKRPNPAPGTRKKSSNAEVIKELNKCREENSMRLDLSKRSIHILPSSIKELTQLTELYLYSNKLQSLPAEVGCLVNLMTLALSENSLTSLPDSLDNLKKLRMLDLRHNKLREIPSVVYRLDSLTTLYLRFNRITTVEKDIKNLSKLSMLSIRENKIKQLPAEIGNLSSLSRLGLRYNRLSAIPRSLAKCSALEELNLENNNISTLPESLLSSLVKLNSLTLARNCFQLYPVGGPSQFSTIYSLNMEHNRINKIPFGIFSRAKVLSKLNMKDNQLTSLPLDFGTWTSMVELNLATNQLTKIPEDVSGLVSLEVLILSNNLLKKLPHGLGNLRKLRELDLEENKLESLPNEIAYLKDLQKLVLTNNQLTTLPRGIGHLTNLTHLGLGENLLTHLPEEIGTLENLEELYLNDNPNLHSLPFELALCSKLSIMSIENCPLSHLPPQIVAGGPSFIIQFLKMQGPYRAMV

SEQ ID NO: 2046 - protein, 748 aa, Homo sapiens
MIRDLSKMYPQTRHPAPHQPAQPFKFTISESCDRIKEEFQFLQAQYHSLKLECEKLASEKTEMQRHYVMYYEMSYGLNIEMHKQAEIVKRLNAICAQVIPFLSQEQQLQAQHLSHGHGLPVPLTPHPSGLQPPAIPPIGSSAGLLALSSALGGQSHLPIKDEKKHHDNDHQRDRDSIKSSSVSPSASFRGAEKHRNSADYSSESKKQKTEEKEIAARYDSDGEKSDDNLVVDVSNEDPSSPRGSPAHSPRENGLDKTRLLKKDAPISPASIASSSSTPSSKSKELSLNEKSTTPVSKSNTPTPRTDAPTPGSNSTPGLRPVPGKPPGVDPLASSLRTPMAVPCPYPTPFGIVPHAGMNGELTSPGAAYAGLHNISPQMSAAAAAAAAAAAYGRSPVVGFDPHHHMRVPAIPPNLTGIPGGKPAYSFHVSADGQMQPVPFPPDALIGPGIPRHARQINTLNHGEVVCAVTISNPTRHVYTGGKGCVKVWDISHPGNKSPVSQLDCLNRDNYIRSCRLLPDGRTLIVGGEASTLSIWDLAAPTPRIKAELTSSAPACYALAISPDSKVCFSCCSDGNIAVWDLHNQTLVRQFQGHTDGASCIDISNDGTKLWTGGLDNTVRSWDLREGRQLQQHDFTSQIFSLGYCPTGEWLAVGMENSNVEVLHVTKPDKYQLHLHESCVLSLKFAHCGKWFVSTGKDNLLNAWRTPYGASIFQSKESSSVLSCDISVDDKYIVTGSGDKKATVYEVIY

SEQ ID NO: 2047 - protein, 1113 aa, Homo sapiens
MPRPELPLPEGWEEARDFDGKVYYIDHTNRTTSWIDPRDRYTKPLTFADCISDELPLGWEEAYDPQVGDYFIDHNTKTTQIEDPRVQWRREQEHMLKDYLVVAQEALSAQKEIYQVKQQRLELAQQEYQQLHAVWEHKLGSQVSLVSGSSSSSKYDPEILKAEIATAKSRVNKLKREMVHLQHELQFKERGFQTLKKIDKKMSDAQGSYKLDEAQAVLRETKAIKKAITCGEKEKQDLIKSLAMLKDGFRTDRGSHSDLWSSSSSLESSSFPLPKQYLDVSSQTDISGSFGINSNNQLAEKVRLRLRYEEAKRRIANLKIQLAKLDSEAWPGVLDSERDRLILINEKEELLKEMRFISPRKWTQGEVEQLEMARKRLEKDLQAARDTQSKALTERLKLNSKRNQLVRELEEATRQVATLHSQLKSLSSSMQSLSSGSSPGSLTSSRGSLVASSLDSSTSASFTDLYYDPFEQLDSELQSKVEFLLLEGATGFRPSGCITTIHEDEVAKTQKAEGGGRLQALRSLSGTPKSMTSLSPRSSLSSPSPPCSPLMADPLLAGDAFLNSLEFEDPELSATLCELSLGNSAQERYRLEEPGTEGKQLGQAVNTAQGCGLKVACVSAAVSDESVAGDSGVYEASVQRLGASEAAAFDSDESEAVGATRIQIALKYDEKNKQFAILIIQLSNLSALLQQQDQKVNIRVAVLPCSESTTCLFRTRPLDASDTLVFNEVFWVSMSYPALHQKTLRVDVCTTDRSHLEECLGGAQISLAEVCRSGERSTRWYNLLSYKYLKKQSRELKPVGVMAPASGPASTDAVSALLEQTAVELEKRQEGRSSTQTLEDSWRYEETSENEAVAEEEEEEVEEEEGEEDVFTEKASPDMDGYPALKVDKETNTETPAPSPTVVRPKDRRVGTPSQGPFLRGSTIIRSKTFSPGPQSQYVCRLNRSDSDSSTLSKKPPFVRNSLERRSVRMKRPSSVKSLRSERLIRTSLDLELDLQATRTWHSQLTQEISVLKELKEQLEQAKSHGEKELPQWLREDERFRLLLRMLEKRQMDRAEHKGELQTDKMMRAAAKDVHRLRGQSCKEPPEVQSFREKMAFFTRPRMNIPALSADDV

SEQ ID NO: 2048 - protein, 605 aa, Homo sapiens
MEADIITNLRCRLKEAEEERLKAAQYGLQLVESQNELQNQLDKCRNEMMTMTESYEQEKYTLQREVELKSRMLESLSCECEAIKQQQKMHLEKLEEQLSRSHGQEVNELKTKIEKLKVELDEARLSEKQLKHQVDHQKELLSCKSEELRVMSERVQESMSSEMLALQIELTEMESMKTTLKEEVNELQYRQEQLELLITNLMRQVDRLKEEKEEREKEAVSYYNALEKARVANQDLQVQLDQALQQALDPNSKGNSLFAEVEDRRAAMERQLISMKVKYQSLKKQNVFNREQMQRMKLQIATLLQMKGSQTEFEQQERLLAMLEQKNGEIKHLLGEIRNLEKFKNLYDSMESKPSVDSGTLEDNTYYTDLLQMKLDNLNKEIESTKGELSIQRMKALFESQRALDIERKLFANERCLQLSESENMKLRAKLDELKLKYEPEETVEVPVLKKRREVLPVDITTAKDACVNNSALGGEVYRLPPQKEETQSCPNSLEDNNLQLEKSVSIYTPVVSLSPHKNLPVDMQLKKEKKCVKLIGVPADAEALSERSGNTPNSPRLAAESKLQTEVKEGKETSSKLEKETCKKLHPILYVSSKSTPETQCPQQ

SEQ ID NO: 2049 - protein, 729 aa, Homo sapiens
MGGFLPKAEGPGSQLQKLLPSFLVREQDWDQHLDKLHMLQQKRILESPLLRASKENDLSVLRQLLLDCTCDVRQRGALGETALHIAALYDNLEAALVLMEAAPELVFEPTTCEAFAGQTALHIAVVNQNVNLVRALLTRRASVSARATGTAFRHSPRNLIYFGEHPLSFAACVNSEEIVRLLIEHGADIRAQDSLGNTVLHILILQPNKTFACQMYNLLLSYDGHGDHLQPLDLVPNHQGLTPFKLAGVEGNTVMFQHLMQKRRHIQWTYGPLTSILYDLTEIDSWGEELSFLELVVSSDKREARQILEQTPVKELVSFKWNKYGRPYFCILAALYLLYMICFTTCCVYRPLKFRGGNRTHSRDITILQQKLLQEAYETREDIIRLVGELVSIVGAVIILLLEIPDIFRVGASRYFGKTILGGPFHVIIITYASLVLVTMVMRLTNTNGEVVPMSFALVLGWCSVMYFTRGFQMLGPFTIMIQKMIFGDLMRFCWLMAVVILGFASAFYIIFQTEDPTSLGQFYDYPMALFTTFELFLTVIDAPANYDVDLPFMFSIVNFAFTIIATLLMLNLFIAMMGDTHWRVAQERDELWRAQVVATTVMLERKLPRCLWPRSGICGCEFGLGDRWFLRVENHNDQNPLRVLRYVEVFKNSDKEDDQEHPSEKQPSGAESGTLARASLALPTSSLSRTASQSSSHRGWEILRQNTLGHLNLGLNLSEGDGEEVYHF

SEQ ID NO: 2050 - protein, 842 aa, Homo sapiens
MVTVGNYCEAEGPVGPAWMQDGLSPCFFFTLVPSTRMALGTLALVLALPCRRRERPAGADSLSWGAGPRISPYVLQLLLATLQAALPLAGLAGRVGTARGAPLPSYLLLASVLESLAGACGLWLLVVERSQARQRLAMGIWIKFRHSPGLLLLWTVAFAAENLALVSWNSPQWWWARADLGQQVQFSLWVLRYVVSGGLFVLGLWAPGLRPQSYTLQVHEEDQDVERSQVRSAAQQSTWRDFGRKLRLLSGYLWPRGSPALQLVVLICLGLMGLERALNVLVPIFYRNIVNLLTEKAPWNSLAWTVTSYVFLKFLQGGGTGSTGFVSNLRTFLWIRVQQFTSRRVELLIFSHLHELSLRWHLGRRTGEVLRIADRGTSSVTGLLSYLVFNVIPTLADIIIGIIYFSMFFNAWFGLIVFLCMSLYLTLTIVVTEWRTKFRRAMNTQENATRARAVDSLLNFETVKYYNAESYEVERYREAIIKYQGLEWKSSASLVLLNQTQNLVIGLGLLAGSLLCAYFVTEQKLQVGDYVLFGTYIIQLYMPLNWFGTYYRMIQTNFIDMENMFDLLKEETEVKDLPGAGPLRFQKGRIEFENVHFSYADGRETLQDVSFTVMPGQTLALVGPSGAGKSTILRLLFRFYDISSGCIRIDGQDISQVTQASLRSHIGVVPQDTVLFNDTIADNIRYGRVTAGNDEVEAAAQAAGIHDAIMAFPEGYRTQVGERGLKLSGGEKQRVAIARTILKAPGIILLDEATSALDTSNERAIQASLAKVCANRTTIVVAHRLSTVVNADQILVIKDGCIVERGRHEALLSRGGVYADMWQLQQGQEETSEDTKPQTMER

SEQ ID NO: 2051 - protein, 592 aa, Homo sapiens
MEMYETLGKVGEGSYGTVMKCKHKNTGQIVAIKIFYERPEQSVNKIAMREIKFLKQFHHENLVNLIEVFRQKKKIHLVFEFIDHTVLDELQHYCHGLESKRLRKYLFQILRAIDYLHSNNIIHRDIKPENILVSQSGITKLCDFGFARTLAAPGDIYTDYVATRWYRAPELVLKDTSYGKPVDIWALGCMIIEMATGNPYLPSSSDLDLLHKIVLKVGNLSPHLQNIFSKSPIFAGVVLPQVQHPKNARKKYPKLNGLLADIVHACLQIDPADRISSSDLLHHEYFTRDGFIEKFMPELKAKLLQEAKVNSLIKPKESSKENELRKDERKTVYTNTLLSSSVLGKEIEKEKKPKEIKVRVIKVKGGRGDISEPKKKEYEGGLGQQDANENVHPMSPDTKLVTIEPPNPINPSTNCNGLKENPHCGGSVTMPPINLTNSNLMAANLSSNLFHPSVRLTERAKKRRTSSQSIGQVMPNSRQEDPGPIQSQMEKGIFNERTGHSDQMANENKRKLNFSRSDRKEFHFPELPVTIQSKDTKGMEVKQIKMLKRESKKTESSKIPTLLNVDQNQEKQEGGDGHCEGKNLKRNRFFFW

SEQ ID NO: 2052 - protein, 842 aa, Homo sapiens
MKPGGFWLHLTLLGASLPAALGWMDPGTSRGPDVGVGESQAEEPRSFEVTRREGLSSHNELLASCGKKFCSRGSRCVLSRKTGEPECQCLEACRPSYVPVCGSDGRFYENHCKLHRAACLLGKRITVIHSKDCFLKGDTCTMAGYARLKNVLLALQTRLQPLQEGDSRQDPASQKRLLVESLFRDLDADGNGHLSSSELAQHVLKKQDLDEDLLGCSPGDLLRFDDYNSDSSLTLREFYMAFQVVQLSLAPEDRVSVTTVTVGLSTVLTCAVHGDLRPPIIWKRNGLTLNFLDLEDINDFGEDDSLYITKVTTIHMGNYTCHASGHEQLFQTHVLQVNVPPVIRVYPESQAQEPGVAASLRCHAEGIPMPRITWLKNGVDVSTQMSKQLSLLANGSELHISSVRYEDTGAYTCIAKNEVGVDEDISSLFIEDSARKTLANILWREEGLSVGNMFYVFSDDGIIVIHPVDCEIQRHLKPTEKIFMSYEEICPQREKNATQPCQWVSAVNVRNRYIYVAQPALSRVLVVDIQAQKVLQSIGVDPLPAKLSYDKSHDQVWVLSWGDVHKSRPSLQVITEASTGQSQHLIRTPFAGVDDFFIPPTNLIINHIRFGFIFNKSDPAVHKVDLETMMPLKTIGLHHHGCVPQAMAHTHLGGYFFIQCRQDSPASAARQLLVDSVTDSVLGPNGDVTGTPHTSPDGRFIVSAAADSPWLHVQEITVRGEIQTLYDLQINSGISDLAFQRSFTESNQYNIYAALHTEPDLLFLELSTGKVGMLKNLKEPPAGPAQPWGGTHRIMRDSGLFGQYLLTPARESLFLINGRQNTLRCEVSGIKGGTTVVWVGEV

SEQ ID NO: 2053 - protein, 1163 aa, Homo sapiens
MNREDRNVLRMKERERRNQEIQQGEDAFPPSSPLFAEPYKVTSKEDKLSSRIQSMLGNYDEMKDFIGDRSIPKLVAIPKPTVPPSADEKSNPNFFEQRHGGSHQSSKWTPVGPAPSTSQSQKRSSGLQSGHSSQRTSAGSSSGTNSSGQRHDRESYNNSGSSSRKKGQHGSEHSKSRSSSPGKPQAVSSLNSSHSRSHGNDHHSKEHQRSKSPRDPDANWDSPSRVPFSSGQHSTQSFPPSLMSKSNSMLQKPTAYVRPMDGQESMEPKLSSEHYSSQSHGNSMTELKPSSKAHLTKLKIPSQPLDASASGDVSCVDEILKEMTHSWPPPLTAIHTPCKTEPSKFPFPTKESQQSNFGTGEQKRYNPSKTSNGHQSKSMLKDDLKLSSSEDSDGEQDCDKTMPRSTPGSNSEPSHHNSEGADNSRDDSSSHSGSESSSGSDSESESSSSDSEANEPSQSASPEPEPPPTNKWQLDNWLNKVNPHKVSPASSVDSNIPSSQGYKKEGREQGTGNSYTDTSGPKETSSATPGRDSKTIQKGSESGRGRQKSPAQSDSTTQRRTVGKKQPKKAEKAAAEEPRGGLKIESETPVDLASSMPSSRHKAATKGSRKPNIKKESKSSPRPTAEKKKYKSTSKSSQKSREIIETDTSSSDSDESESLPPSSQTPKYPESNRTPVKPSSVEEEDSFFRQRMFSPMEEKELLSPLSEPDDRYPLIVKIDLNLLTRIPGKPYKETEPPKGEKKNVPEKHTREAQKQASEKVSNKGKRKHKNEDDNRASESKKPKTEDKNSAGHKPSSNRESSKQSAAKEKDLLPSPAGPVPSKDPKTEHGSRKRTISQSSSLKSSSNSNKETSGSSKNSSSTSKQKKTEGKTSSSSKEVKEKAPSSSSNCPPSAPTLDSSKPRRTKLVFDDRNYSADHYLQEAKKLKHNADALSDRFEKAVYYLDAVVSFIECGNALEKNAQESKSPFPMYSETVDLIKYTMKLKNYLAPDATAADKRLTVLCLRCESLLYLRLFKLKKENALKYSKTLTEHLKNSYNNSQAPSPGLGSKAVGMPSPVSPKLSPGNSGNYSSGASSASASGSSVTIPQKIHQMAASYVQVTSNFLYATEIWDQAEQLSKEQKEFFAELDKVMGPLIFNASIMTDLVRYTRQGLHWLRQDAKLIS

SEQ ID NO: 2054 - protein, 894 aa, Homo sapiens
MNSMNPMKPALPPAPHGDGSFAYESVPWQQSATQPAGSLSVVTTVWGVGNATQSQVLGNPMGPAGSPSGSSMMPGVAGGSSALTSPQCLGQQAFAEGGANKGYVQQGVYSRGGYPGAPGFTTGYAGGPGGLGLPSHAARPSTDFTQAAAAAAVAAAAATATATATATVAALQEKQSQELSQYGAMGAGQSFNSQFLQHGGPRGPSVPAGMNPTGIGGVMGPSGLSPLAMNPTRAAGMTPLYAGQRLPQHGYPGPPQAQPLPRQGVKRTYSEVYPGQQYLQGGQYAPSTAQFAPSPGQPPAPSPSYPGHRLPLQQGMTQSLSVPGPTGLHYKPTRSIPGYPSSPLPGNPTPPMTPSSSVPYMSPNQEVKSPFLPDLKPNLNSLHSSPSGSGPCDELRLTFPVRDGVVLEPFRLQHNLAVSNHVFQLRDSVYKTLIMRPDLELQFKCYHHEDRQMNTNWPASVQVSVNATPLTIERGDNKTSHKPLYLKHVCQPGRNTIQITVTACCCSHLFVLQLVHRPSVRSVLQGLLKKRLLPAEHCITKIKRNFSSGTIPGTPGPNGEDGVEQTAIKVSLKCPITFRRIQLPARGHDCRHIQCFDLESYLQLNCERGTWRCPVCNKTALLEGLEVDQYMLGILIYIQNSDYEEITIDPTCSWKPVPVKPDMHIKEEPDGPALKRCRTVSPAHVLMPSVMEMIAALGPGAAPFAPLQPPSVPAPSDYPGQGSSFLGPGTFPESFPPTTPSTPTLAEFTPGPPPISYQSDIPSSLLTSEKSTACLPSQMAPAGHLDPTHNPGTPGLHTSNLGAPPGPQLHHSNPPPASRQSLGQASLGPTGELAFSPATGVMGPPSMSGAGEAPEPALDLLPELTNPDELLSYLGPPDLPTNNNDDLLSLFENN

SEQ ID NO: 2055 - protein, 1204 aa, Homo sapiens
MAMDQVNALCEQLVKAVTVMMDPNSTQRYRLEALKFCEEFKEKCPICVPCGLRLAEKTQVAIVRHFGLQILEHVVKFRWNGMSRLEKVYLKNSVMELIANGTLNILEEENHIKDALSRIVVEMIKREWPQHWPDMLIELDTLSKQGETQTELVMFILLRLAEDVVTFQTLPPQRRRDIQQTLTQNMERIFSFLLNTLQENVNKYQQVKTDTSQESKAQANCRVGVAALNTLAGYIDWVSMSHITAENCKLLEILCLLLNEQELQLGAAECLLIAVSRKGKLEDRKPLMVLFGDVAMHYILSAAQTADGGGLVEKHYVFLKRLCQVLCALGNQLCALLGADSDVETPSNFGKYLESFLAFTTHPSQFLRSSTQMTWGALFRHEILSRDPLLLAIIPKYLRASMTNLVKMGFPSKTDSPSCEYSRFDFDSDEDFNAFFNSSRAQQGEVMRLACRLDPKTSFQMAGEWLKYQLSTFLDAGSVNSCSAVGTGEGSLCSVFSPSFVQWEAMTLFLESVITQMFRTLNREEIPVNDGIELLQMVLNFDTKDPLILSCVLTNVSALFPFVTYRPEFLPQVFSKLFSSVTFETVEESKAPRTRAVRNVRRHACSSIIKMCRDYPQLVLPNFDMLYNHVKQLLSNELLLTQMEKCALMEALVLISNQFKNYERQKVFLEELMAPVASIWLSQDMHRVLSDVDAFIAYVGTDQKSCDPGLEDPCGLNRARMSFCVYSILGVVKRTCWPTDLEEAKAGGFVVGYTSSGNPIFRNPCTEQILKLLDNLLALIRTHNTLYAPEMLAKMAEPFTKALDMLDAEKSAILGLPQPLLELNDSPVFKTVLERMQRFFSTLYENCFHILGKAGPSMQQDFYTVEDLATQLLSSAFVNLNNIPDYRLRPMLRVFVKPLVLFCPPEHYEALVSPILGPLFTYLHMRLSQKWQVINQRSLLCGEDEAADENPESQEMLEEQLVRMLTREVMDLITVCCVSKKGADHSSAPPADGDDEEMMATEVTPSAMAELTDLGKCLMKHEDVCTALLITAFNSLAWKDTLSCQRTTSQLCWPLLKQVLSGTLLADAVTWLFTSVLKGLQMHGQHDGCMASLVHLAFQIYEALRPRYLEIRAVMEQIPEIQKDSLDQFDCKLLNPSLQKVADKRRKDQFKRLIAGCIGKPLGEQFRKEVHIKNLPSLFKKTKPMLETEVLDNDGGGLATIFEP

SEQ ID NO: 2056 - protein, 751 aa, Homo sapiens
MAFRTICVLVGVFICSICVKGSSQPQARVYLTFDELRETKTSEYFSLSHHPLDYRILLMDEDQDRIYVGSKDHILSLNINNISQEALSVFWPASTIKVEECKMAGKDPTHGCGNFVRVIQTFNRTHLYVCGSGAFSPVCTYLNRGRRSEDQVFMIDSKCESGKGRCSFNPNVNTVSVMINEELFSGMYIDFMGTDAAIFRSLTKRNAVRTDQHNSKWLSEPMFVDAHVIPDGTDPNDAKVYFFFKEKLTDNNRSTKQIHSMIARICPNDTGGLRSLVNKWTTFLKARLVCSVTDEDGPETHFDELEDVFLLETDNPRTTLVYGIFTTSSSVFKGSAVCVYHLSDIQTVFNGPFAHKEGPNHQLISYQGRIPYPRPGTCPGGAFTPNMRTTKEFPDDVVTFIRNHPLMYNSIYPIHKRPLIVRIGTDYKYTKIAVDRVNAADGRYHVLFLGTDRGTVQKVVVLPTNNSVSGELILEELEVFKNHAPITTMKISSKKQQLYVSSNEGVSQVSLHRCHIYGTACADCCLARDPYCAWDGHSCSRFYPTGKRRSRRQDVRHGNPLTQCRGFNLKAYRNAAEIVQYGVKNNTTFLECAPKSPQASIKWLLQKDKDRRKEVKLNERIIATSQGLLIRSVQGSDQGLYHCIATENSFKQTIAKINFKVLDSEMVAVVTDKWSPWTWASSVRALPFHPKDIMGAFSHSEMQMINQYCKDTRQQHQQGDESQKMRGDYGKLKALINSRKSRNRRNQLPES

SEQ ID NO: 2057 - protein, 771 aa, Homo sapiens [sequence omitted]

SEQ ID NO: 2058 - protein, 923 aa, Homo sapiens
MERGLPLLCAVLALVLAPAGAFRNDKCGDTIKIESPGYLTSPGYPHSYHPSEKCEWLIQAPDPYQRIMINFNPHFDLEDRDCKYDYVEVFDGENENGHFRGKFCGKIAPPPVVSSGPFLFIKFVSDYETHGAGFSIRYEIFKRGPECSQNYTTPSGVIKSPGFPEKYPNSLECTYIVFVPKMSEIILEFESFDLEPDSNPPGGMFCRYDRLEIWDGFPDVGPHIGRYCGQKTPGRIRSSSGILSMVFYTDSAIAKEGFSANYSVLQSSVSEDFKCMEALGMESGEIHSDQITASSQYSTNWSAERSRLNYPENGWTPGEDSYREWIQVDLGLLRFVTAVGTQGAISKETKKKYYVKTYKIDVSSNGEDWITIKEGNKPVLFQGNTNPTDVVVAVFPKPLITRFVRIKPATWETGISMRFEVYGCKITDYPCSGMLGMVSGLISDSQITSSNQGDRNWMPENIRLVTSRSGWALPPAPHSYINEWLQIDLGEEKIVRGIIIQGGKHRENKVFMRKFKIGYSNNGSDWKMIMDDSKRKAKSFEGNNNYDTPELRTFPALSTRFIRIYPERATHGGLGLRMELLGCEVEAPTAGPTTPNGNLVDECDDDQANCHSGTGDDFQLTGGTTVLATEKPTVIDSTIQSEFPTYGFNCEFGWGSHKTFCHWEHDNHVQLKWSVLTSKTGPIQDHTGDGNFIYSQADENQKGKVARLVSPVVYSQNSAHCMTFWYHMSGSHVGTLRVKLRYQKPEEYDQLVWMAIGHQGDHWKEGRVLLHKSLKLYQVIFEGEIGKGNLGGIAVDDISINNHISQEDCAKPADLDKKNPEIKIDETGSTPGYEGEGEGDKNISRKPGNVLKTLDPILITIIAMSALGVLLGAVCGVVLYCACWHNGMSERNLSALENYNFELVDGVKLKKDKLNTQSTYSEA

SEQ ID NO: 2059 - protein, 2611 aa, Homo sapiens
MKILLIIFVLIIWTETLADQSPGPGPVYADVVFLVDSSDHLGPKSFPFVKTFINKMINSLPIEANKYRVALAQYSDEFHSEFHLSTFKGRSPMLNHLKKNFQFIGGSLQIGKALQEAHRTYFSAPINGRDRKQFPPILVVLASAESEDEVEEASKALQKDGVKIISVGVQKASEENLKAMATSHFHFNLRTIRDLSTFSQNMTQIIKDVTKYKEGAVDADMQVHFPISCQKDSLADLVFLVDESLGTGGNLRHLQTFLENITSSMDVKENCMRLGLMSYSNSAKTISFLKSSTTQSEFQQQIKNLSIQVGKSNTGAAIDQMRRDGFSESYGSRRAQGVPQIAVLVTHRPSDDEVHDAALNLRLEDVNVFALSIQGANNTQLEEIVSYPPEQTISTLKSYADLETYSTKFLKKLQNEIWSQISTYAEQRNLDKTGCVDTKEADIHFLIDGSSSIQEKQFEQIKRFMLEVTEMFSIGPDKVRVGVVQYSDDTEVEFYITDYSNDIDLRKAIFNIKQLTGGTYTGKALDYILQIIKNGMKDRMSKVPCYLIVLTDGMSTDRVVEPAKRLRAEQITVHAVGIGAANKIELQEIAGKEERVSFGQNFDALKSIKNEVVREICAEKGCEDMKADIMFLVDSSWSIGNENFRKMKIFMKNLLTKIQIGADKTQIGVVQFSDKTKEEFQLNRYFTQQEISDAIDRMSLINEGTLTGKALNFVGQYFTHSKGARLGAKKFLILITDGVAQDDVRDPARILRGKDVTIFSVGVYNANRSQLEEISGDSSLVFHVENFDHLKALERKLIFRVCALHDCKRITLLDVVFVLDHSGSIKKQYQDHMINLTIHLVKKADVGRDRVQFGALKYSDQPNILFYLNTYSNRSAIIENLRKRRDTGGNTYTAKALKHANALFTEEHGSRIKQNVKQMLIVITDGESHDHDQLNDTALELRNKGITIFAVGVGKANQKELEGMAGNKNNTIYVDNFDKLKDVFTLVQERMCTEAPEVCHLQEADVIFLCDGSDRVSNSDFVTMTTFLSDLIDNFDIQSQRMKIGMAQFGSNYQSIIELKNSLTKTQWKTQIQNVSKSGGFPRIDFALKKVSNMFNLHAGGRRNAGVPQTLVVITSGDPRYDVADAVKTLKDLGICVLVLGIGDVYKEHLLPITGNSEKIITFQDFDKLKNVDVKKRIIREICQSCGKTNCFMDIVVGFDISTHVQGQPLFQGHPQLESYLPGILEDISSIKGVSCGAGTEAQVSLAFKVNSDQGFPAKFQIYQKAVFDSLLQVNVSGPTHLNAQFLRSLWDTFKDKSASRGQVLLIFSDGLQSESNIMLENQSDRLREAGLDALLVVSLNTTAHHEFSSFEFGKRFDYRTHLTIGMRELGKKLSQYLGNIAERTCCCTFCKCPGIPGPHGTRGLQAMKGSQGLKGSRGHRGEDGNPGVRGDTGPQGDKGIAGCPGAWGQKGLKGFSGPKGGHGDDGIDGLDGEEGCHGFPGIKGEKGDPGSQGSPGSRGAPGQYGEKGFPGDPGNPGQNNNIKGQKGSKGEQGRQGRSGQKGVQGSPSSRGSRGREGQRGLRGVSGEPGNPGPTGTLGAEGLQGPQGSQGNPGRKGEKGSQGQKGPQGSPGLMGAKGSTGRPGLLGKKGEPGLPGDLGPVGQTGQRGRQGDSGIPGYGQMGRKGVKGPRGFPGDAGQKGDIGNPGIPGGPGPKGFRGLALTVGLKGEEGSRGLPGPPGQRGIKGMAGQPVYSQCDLIRFLREHSLFKNAYPTELVFALDNSYDVTEESFNKTRDIITSIVNDLNIRENNCPVGARVAMVSYNSGTSYLIRWSDYNRKKQLLQQLSQIKYQDTTEPRDVGNAMRFVTRNVFKRTYAGANVRRVAVFFSNGQTASRSSIITATMEFSALDISPTVFAFDERVFLEAFGFDNTGTFQVIPVPPNGENQTLERLRRCALCYDKCFPNACIREAFLPEDSYMDVVFLIDNSRNIAKDEFKAVKALVSSVIDNFNIASDPLISDSGDRIALLSYSPWESSRRKMGTVKTEFDFITYDNQLLMKNHIQTSFQQLNGEATIGRALLWTTENLFPETPYLRKHKVIFVVSAGENYERKEFVKMMALRAKCQGYVIFVISLGSTRKDDMEELASYPLDQHLIQLGRIHKPDLNYIAKFLKPFLYSVRRGFNQYPPPMLEDACRLINLGGENIQNDGFQFVTELQEDFLGGNGFIGQELNSGRESPFVKTEDNGSDYLVYLPSQMFEPQKLMINYEKDQKSAEIASLTSGHENYGRKEEPDHTYEPGDVSLQEYYMDVAFLIDASQRVGSDEFKEVKAFITSVLDYFHIAPTPLTSTLGDRVAVLSYSPPGYMPNTEECPVYLEFDLVTYNSIHQMKHHLQDSQQLNGDVFIGHALQWTIDNVFVGTPNLRKNKVIFVISAGETNSLDKDVLRNVSLRAKCQGYSIFVFSFGPKHNDKELEELASHPLDHHLVQLGRTHKPDWNYIIKFVKPFVHLIRRAINKYPTEDMKATCVNMTSPNPENGGTENTVLLLPGIYEIKTENGDLFDEFDSQAQHLLVLGNNHSSGSETATDLMQKLYLLFSTEKLAMKDKEKAHLEEISALVVDKQQEKEDKEMEATDI

SEQ ID NO: 2060 - protein, 837 aa, Homo sapiens
MNHLEGSAEVEVTDEAAGGEVNESVEADLEHPEVEEEQQQPPQQQHYVGRHQRGRALEDLRAQLGQEEEERGECLARSASTESGFHNHTDTAEGDVIAAARDGYDAERAQDPEDESAYAVQYRPEAEEYTEQAEAEHAEATHRRALPNHLHFHSLEHEEAMNAAYSGYVYTHRLFHRGEDEPYSEPYADYGGLQEHVYEEIGDAPELDARDGLRLYEQERDEAAAYRQEALGARLHHYDERSDGESDSPEKEAEFAPYPRMDSYEQEEDIDQIVAEVKQSMSSQSLDKAAEDMPEAEQDLERPPTPAGGRPDSPGLQAPAGQQRAVGPAGGGEAGQRYSKEKRDAISLAIKDIKEAIEEVKTRTIRSPYTPDEPKEPIWVMRQDISPTRDCDDQRPMDGDSPSPGSSSPLGAESSSTSLHPSDPVEASTNKESRKSLASFPTYVEVPGPCDPEDLIDGIIFAANYLGSTQLLSDKTPSKNVRMMQAQEAVSRIKMAQKLAKSRKKAPEGESQPMTEVDLFISTQRIKVLNADTQETMMDHPLRTISYIADIGNIVVLMARRRMPRSNSQENVEASHPSQDGKRQYKMICHVFESEDAQLIAQSIGQAFSVAYQEFLRANGINPEDLSQKEYSDLLNTQDMYNDDLIHFSKSENCKDVFIEKQKGEILGVVIVESGWGSILPTVIIANMMHGGPAEKSGKLNIGDQIMSINGTSLVGLPLSTCQSIIKGLKNQSRVKLNIVRCPPVTTVLIRRPDLRYQLGFSVQNGIICSLMRGGIAERGGVRVGHRIIEINGQSVVATPHEKIVHILSNAVGEIHMKTMPAAMYRLLTAQEQPVYI

SEQ ID NO: 2061 - protein, 540 aa, Homo sapiens
MSSAAENGEAAPGKQNEEKTYKKTASSAIKGAIQLGIGYTVGNLTSKPERDVLMQDFYVVESVFLPSEGSNLTPAHHYPDFRFKTYAPLAFRYFRELFGIKPDDYLYSICSEPLIELSNPGASGSLFFVTSDDEFIIKTVQHKEAEFLQKLLPGYYMNLNQNPRTLLPKFYGLYCMQSGGINIRIVVMNNVLPRSMRMHFTYDLKGSTYKRRASRKEREKSNPTFKDLDFLQDMHEGLYFDTETYNALMKTLQRDCRVLESFKIMDYSLLLGIHFLDHSLKEKEEETPQNVPDAKRTGMQKVLYSTAMESIQGPGKSGDGIITENPDTMGGIPAKSHRGEKLLLFMGIIDILQSYRLMKKLEHSWKALVYDGDTVSVHRPSFYADRFLKFMNSRVFKKIQALKASPSKKRCNSIAALKATSQEIVSSISQEWKDEKRDLLTEGQSFSSLDEEALGSRHRPDLVPSTPSLFEAASLATTISSSSLYVNEHYPHDRPTLYSNSKGLPSSSTFTLEEGTIYLTAEPNTLEVQDDNASVLDVYL

SEQ ID NO: 2062 - protein, 923 aa, Homo sapiens
MEGAKPTLQLVYQAVQALYHDPDPSGKERASFWLGELQRSVHAWEISDQLLQIRQDVESCYFAAQTMKMKIQTSFYELPTDSHASLRDSLLTHIQNLKDLSPVIVTQLALAIADLALQMPSWKGCVQTLVEKYSNDVTSLPFLLEILTVLPEEVHSRSLRIGANRRTEIIEDLAFYSSTVVSLLMTCVEKAGTDEKMLMKVFRCLGSWFNLGVLDSNFMANNKLLALLFEVLQQDKTSSNLHEAASDCVCSALYAIENVETNLPLAMQLFQGVLTLETAYHMAVAREDLDKVLNYCRIFTELCETFLEKIVCTPGQGLGDLRTLELLLICAGHPQYEVVEISFNFWYRLGEHLYKTNDEVIHGIFKAYIQRLLHALARHCQLEPDHEGVPEETDDFGEFRMRVSDLVKDLIFLIGSMECFAQLYSTLKEGNPPWEVTEAVLFIMAAIAKSVDPENNPTLVEVLEGVVRLPETVHTAVRYTSIELVGEMSEVVDRNPQFLDPVLGYLMKGLCEKPLASAAAKAIHNICSVCRDHMAQHFNGLLEIARSLDSFLLSPEAAVGLLKGTALVLARLPLDKITECLSELCSVQVMALKKLLSQEPSNGISSDPTVFLDRLAVIFRHTNPIVENGQTHPCQKVIQEIWPVLSETLNKHRADNRIVERCCRCLRFAVRCVGKGSAALLQPLVTQMVNVYHVHQHSCFLYLGSILVDEYGMEEGCRQGLLDMLQALCIPTFQLLEQQNGLQNHPDTVDDLFRLATRFIQRSPVTLLRSQVVIPILQWAIASTTLDHRDANCSVMRFLRDLIHTGVANDHEEDFELRKELIGQVMNQLGQQLVSQLLHTCCFCLPPYTLPDVAEVLWEIMQVDRPTFCRWLENSLKGLPKETTVGAVTVTHKQLTDFHKQVTSAEECKQVCWALRDFTRLFR

SEQ ID NO: 2063 - protein, 747 aa, Homo sapiens
MTSFQEVPLQTSNFAHVIFQNVAKSYLPNAHLECHYTLTPYIHPHPKDWVGIFKVGWSTARDYYTFLWSPMPEHYVEGSTVNCVLAFQGYYLPNDDGEFYQFCYVTHKGEIRGASTPFQFRASSPVEELLTMEDEGNSDMLVVTTKAGLLELKIEKTMKEKEELLKLIAVLEKETAQLREQVGRMERELNHEKERCDQLQAEQKGLTEVTQSLKMENEEFKKRFSDATSKAHQLEEDIVSVTHKAIEKETELDSLKDKLKKAQHEREQLECQLKTEKDEKELYKVHLKNTEIENTKLMSEVQTLKNLDGNKESVITHFKEEIGRLQLCLAEKENLQRTFLLTTSSKEDTCFLKEQLRKAEEQVQATRQEVVFLAKELSDAVNVRDRTMADLHTARLENEKVKKQLADAVAELKLNAMKKDQDKTDTLEHELRREVEDLKLRLQMAADHYKEKFKECQRLQKQINKLSDQSANNNNVFTKKTGNQQKVNDASVNTDPATSASTVDVKPSPSAAEADFDIVTKGQVCEMTKEIADKTEKYNKCKQLLQDEKAKCNKYADELAKMELKWKEQVKIAENVKLELAEVQDNYKELKRSLENPAERKMEDGADGAFYPDEIQRPPVRVPSWGLEDNVVCSQPARNFSRPDGLEDSEDSKEDENVPTAPDPPSQHLRGHGTGFCFDSSFDVHKKCPLCELMFPPNYDQSKFEEHVESHWKVCPMCSEQFPPDYDQQVFERHVQTHFDQNVLNFD

SEQ ID NO: 2064 - protein, 476 aa, Homo sapiens
MVGAMWKVIVSLVLLMPGPCDGLFRSLYRSVSMPPKGDSGQPLFLTPYIEAGKIQKGRELSLVGPFPGLNMKSYAGFLTVNKTYNSNLFFWFFPAQIQPEDAPVVLWLQGGPGGSSMFGLFVEHGPYVVTSNMTLRDRDFPWTTTLSMLYIDNPVGTGFSFTDDTHGYAVNEDDVARDLYSALIQFFQIFPEYKNNDFYVTGESYAGKYVPAIAHLIHSLNPVREVKINLNGIAIGDGYSDPESIIGGYAEFLYQIGLLDEKQKKYFQKQCHECIEHIRKQNWFEAFEILDKLLDGDLTSDPSYFQNVTGCSNYYNFLRCTEPEDQLYYVKFLSLPEVRQAIHVGNQTFNDGTIVEKYLREDTVQSVKPWLTEIMNNYKVLIYNGQLDIIVAAALTERSLMGMDWKGSQEYKKAEKKVWKIFKSDSEVAGYIRQAGDFHQVIIRGGGHILPYDQPLRAFDMINRFIYGKGWDPYVG

SEQ ID NO: 2065 - protein, 336 aa, Homo sapiens
MAASLRLLGAASGLRYWSRRLRPAAGSFAAVCSRSVASKTPVGFIGLGNMGNPMAKNLMKHGYPLIIYDVFPDACKEFQDAGEQVVSSPADVAEKADRIITMLPTSINAIEAYSGANGILKKVKKGSLLIDSSTIDPAVSKELAKEVEKMGAVFMDAPVSGGVGAARSGNLTFMVGGVEDEFAAAQELLGCMGSNVVYCGAVGTGQAAKICNNMLLAISMIGTAEAMNLGIRLGLDPKLLAKILNMSSGRCWSSDTYNPVPGVMDGVPSANNYQGGFGTTLMAKDLGLAQDSATSTKSPILLGSLAHQIYRMMCAKGYSKKDFSSVFQFLREEETF

SEQ ID NO: 2066 - protein, 528 aa, Homo sapiens
MALKWTTVLLIQLSFYFSSGSCGKVLVWAAEYSLWMNMKTILKELVQRGHEVTVLASSASILFDPNDSSTLKLEVYPTSLTKTEFENIIMQLVKRLSEIQKDTFWLPFSQEQEILWAINDIIRNFCKDVVSNKKLMKKLQESRFDIVFADAYLPCGELLAELFNIPFVYSHSFSPGYSFERHSGGFIFPPSYVPVVMSKLSDQMTFMERVKNMLYVLYFDFWFQIFNMKKWDQFYSEVLGRPTTLSETMRKADIWLMRNSWNFKFPHPFLPNVDFVGGLHCKPAKPLPKEMEEFVQSSGENGVVVFSLGSMVSNMTEERANVIATALAKIPQKVLWRFDGNKPDALGLNTRLYKWIPQNDLLGHPKTRAFITHGGANGIYEAIYHGIPMVGIPLFFDQPDNIAHMKAKGAAVRVDFNTMSSTDLLNALKTVINDPSYKENIMKLSRIQHDQPVKPLDRAVFWIEFVMRHKGAKHLRVAAHNLTWFQYHSLDVIGFLLACVATVLFIITKCCLFCFWKFARKGKKGKRD

SEQ ID NO: 2067 - protein, 1346 aa, Homo sapiens
MKSPRRTTLCLMFIVIYSSKAALNWNYESTIHPLSLHEHEPAGEEALRQKRAVATKSPTAEEYTVNIEISFENASFLDPIKAYLNSLSFPIHGNNTDQITDILSINVTTVCRPAGNEIWCSCETGYGWPRERCLHNLICQERDVFLPGHHCSCLKELPPNGPFCLLQEDVTLNMRVRLNVGFQEDLMNTSSALYRSYKTDLETAFRKGYGILPGFKGVTVTGFKSGSVVVTYEVKTTPPSLELIHKANEQVVQSLNQTYKMDYNSFQAVTINESNFFVTPEIIFEGDTVSLVCEKEVLSSNVSWRYEEQQLEIQNSSRFSIYTALFNNMTSVSKLTIHNITPGDAGEYVCKLILDIFEYECKKKIDVMPIQILANEEMKVMCDNNPVSLNCCSQGNVNWSKVEWKQEGKINIPGTPETDIDSSCSRYTLKADGTQCPSGSSGTTVIYTCEFISAYGARGSANIKVTFISVANLTITPDPISVSEGQNFSIKCISDVSNYDEVYWNTSAGIKIYQRFYTTRRYLDGAESVLTVKTSTREWNGTYHCIFRYKNSYSIATKDVIVHPLPLKLNIMVDPLEATVSCSGSHHIKCCIEEDGDYKVTFHTGSSSLPAAKEVNKKQVCYKHNFNASSVSWCSKTVDVCCHFTNAANNSVWSPSMKLNLVPGENITCQDPVIGVGEPGKVIQKLCRFSNVPSSPESPIGGTITYKCVGSQWEEKRNDCISAPINSLLQMAKALIKSPSQDEMLPTYLKDLSISIDKAEHEISSSPGSLGAIINILDLLSTVPTQVNSEMMTHVLSTVNVILGKPVLNTWKVLQQQWTNQSSQLLHSVERFSQALQSGDSPPLSFSQTNVQMSSMVIKSSHPETYQQRFVFPYFDLWGNVVIDKSYLENLQSDSSIVTMAFPTLQAILAQDIQENNFAESLVMTTTVSHNTTMPFRISMTFKNNSPSGGETKCVFWNFRLANNTGGWDSSGCYVEEGDGDNVTCICDHLTSFSILMSPDSPDPSSLLGILLDIISYVGVGFSILSLAACLVVEAVVWKSVTKNRTSYMRHTCIVNIAASLLVANTWFIVVAAIQDNRYILCKTACVAATFFIHFFYLSVFFWMLTLGLMLFYRLVFILHETSRSTQKAIAFCLGYGCPLAISVITLGATQPREVYTRKNVCWLNWEDTKALLAFAIPALIIVVVNITITIVVITKILRPSIGDKPCKQEKSSLFQISKSIGVLTPLLGLTWGFGLTTVFPGTNLVFHIIFAILNVFQGLFILLFGCLWDLKVQEALLNKFSLSRWSSQHSKSTSLGSSTPVFSMSSPISRRFNNLFGKTGTYNVSTPEATSSSLENSSSASSLLN

SEQ ID NO: 2068 - protein, 922 aa, Homo sapiens
MATASPRSDTSNNHSGRLQLQVTVSSAKLKRKKNWFGTAIYTEVVVDGEITKTAKSSSSSNPKWDEQLTVNVTPQTTLEFQVWSHRTLKADALLGKATIDLKQALLIHNRKLERVKEQLKLSLENKNGIAQTGELTVVLDGLVIEQENITNCSSSPTIEIQENGDALHENGEPSARTTARLAVEGTNGIDNHVPTSTLVQNSCCSYVVNGDNTPSSPSQVAARPKNTPAPKPLASEPADDTVNGESSSFAPTDNASVTGTPVVSEENALSPNCTSTTVEDPPVQEILTSSENNECIPSTSAELESEARSILEPDTSNSRSSSAFEAAKSRQPDGCMDPVRQQSGNANTETLPSGWEQRKDPHGRTYYVDHNTRTTTWERPQPLPPGWERRVDDRRRVYYVDHNTRTTTWQRPTMESVRNFEQWQSQRNQLQGAMQQFNQRYLYSASMLAAENDPYGPLPPGWEKRVDSTDRVYFVNHNTKTTQWEDPRTQGLQNEEPLPEGWEIRYTREGVRYFVDHNTRTTTFKDPRNGKSSVTKGGPQIAYERGFRWKLAHFRYLCQSNALPSHVKINVSRQTLFEDSFQQIMALKPYDLRRRLYVIFRGEEGLDYGGLAREWFFLLSHEVLNPMYCLFEYAGKNNYCLQINPASTINPDHLSYFCFIGRFIAMALFHGKFIDTGFSLPFYKRMLSKKLTIKDLESIDTEFYNSLIWIRDNNIEECGLEMYFSVDMEILGKVTSHDLKLGGSNILVTEENKDEYIGLMTEWRFSRGVQEQTKAFLDGFNEVVPLQWLQYFDEKELEVMLCGMQEVDLADWQRNTVYRHYTRNSKQIIWFWQFVKETDNEVRMRLLQFVTGTCRLPLGGFAELMGSNGPQKFCIEKVGKDTWLPRSHTCFNRLDLPPYKSYEQLKEKLLFAIEETEGFGQE

SEQ ID NO: 2069 - protein, 754 aa, Homo sapiens
MWKLLPAAGPAGGEPYRLLTGVEYVVGRKNCAILIENDQSISRNHAVLTANFSVTNLSQTDEIPVLTLKDNSKYGTFVNEEKMQNGFSRTLKSGDGITFGVFGSKFRIEYEPLVACSSCLDVSGKTALNQAILQLGGFTVNNWTEECTHLVMVSVKVTIKTICALICGRPIVKPEYFTEFLKAVESKKQPPQIESFYPPLDEPSIGSKNVDLSGRQERKQIFKGKTFIFLNAKQHKKLSSAVVFGGGEARLITEENEEEHNFFLAPGTCVVDTGITNSQTLIPDCQKKWIQSIMDMLQRQGLRPIPEAEIGLAVIFMTTKNYCDPQGHPSTGLKTTTPGPSLSQGVSVDEKLMPSAPVNTTTYVADTESEQADTWDLSERPKEIKVSKMEQKFRMLSQDAPTVKESCKTSSNNNSMVSNTLAKMRIPNYQLSPTKLPSINKSKDRASQQQQTNSIRNYFQPSTKKRERDEENQEMSSCKSARIETSCSLLEQTQPATPSLWKNKEQHLSENEPVDTNSDNNLFTDTDLKSIVKNSASKSHAAEKLRSNKKREMDDVAIEDEVLEQLFKDTKPELEIDVKVQKQEEDVNVRKRPRMDIETNDTFSDEAVPESSKISQENEIGKKRELKEDSLWSAKEISNNDKLQDDSEMLPKKLLLTEFRSLVIKNSTSRNPSGINDDYGQLKNFKKFKKVTYPGAGKLPHIIGGSDLIAHHARKNTELEEWLRQEMEVQNQHAKEESLADDLFRYNPYLKRRR

SEQ ID NO: 2070 - protein, 715 aa, Homo sapiens
MMQESATETISNSSMNQNGMSTLSSQLDAGSRDGRSSGDTSSEVSTVELLHLQQQQALQAARQLLLQQQTSGLKSPKSSDKQRPLQVPVSVAMMTPQVITPQQMQQILQQQVLSPQQLQALLQQQQAVMLQQQQLQEFYKKQQEQLHLQLLQQQQQQQQQQQQQQQQQQQQQQQQQQQQQQQQQQQQQQQQHPGKQAKEQQQQQQQQQQLAAQQLVFQQQLLQMQQLQQQQHLLSLQRQGLISIPPGQAALPVQSLPQAGLSPAEIQQLWKEVTGVHSMEDNGIKHGGLDLTTNNSSSTTSSNTSKASPPITHHSIVNGQSSVLSARRDSSSHEETGASHTLYGHGVCKWPGCESICEDFGQFLKHLNNEHALDDRSTAQCRVQMQVVQQLEIQLSKERERLQAMMTHLHMRPSEPKPSPKPLNLVSSVTMSKNMLETSPQSLPQTPTTPTAPVTPITQGPSVITPASVPNVGAIRRRHSDKYNIPMSSEIAPNYEFYKNADVRPPFTYATLIRQAIMESSDRQLTLNEIYSWFTRTFAYFRRNAATWKNAVRHNLSLHKCFVRVENVKGAVWTVDEVEYQKRRSQKITGSPTLVKNIPTSLGYGAALNASLQAALAESSLPLLSNPGLINNASSGLLQAVHEDLNGSLDHIDSNGNSSPGCSPQPHIHSIHVKEEPVIAEDEDCPMSLVTTANHSPELEDDREIEEEPLSEDLE

SEQ ID NO: 2071 - protein, 347 aa, Homo sapiens
MTLDHQIINPTLKWSQPAVPSGGPLVQHAHTTLDSDAGLTENPLTKLLAIGKEDDNAQWHMEDVIEDIIGMESSFKEEGADSPLLMQRTLSGSILDVYSGEQGISPINMGLTSASCPSSLPMKREITETDTRALAKERQKKDNHNLIERRRRYNINYRIKELGTLIPKSNDPDMRWNKGTILKASVEYIKWLQKEQQRARELEHRQKKLEQANRRLLLRIQELEIQARTHGLPTLASLGTVDLGAHVTKQQSHPEQNSVDYCQQLTVSQGPSPELCDQAIAFSDPLSYFTDLSFSAALKEEQRLDGMLLDDTISPFGTDPLLSATSPAVSKESSRRSSFSSDDGDEL

SEQ ID NO: 2072 - protein, 360 aa, Homo sapiens
MNAPLGGIWLWLPLLLTWLTPEVNSSWWYMRATGGSSRVMCDNVPGLVSSQRQLCHRHPDVMRAISQGVAEWTAECQHQFRQHRWNCNTLDRDHSLFGRVLLRSSRESAFVYAISSAGVVFAITRACSQGEVKSCSCDPKKMGSAKDSKGIFDWGGCSDNIDYGIKFARAFVDAKERKGKDARALMNLHNNRAGRKAVKRFLKQECKCHGVSGSCTLRTCWLAMADFRKTGDYLWRKYNGAIQVVMNQDGTGFTVANERFKKPTKNDLVYFENSPDYCIRDREAGSLGTAGRVCNLTSRGMDSCEVMCCGRGYDTSHVTRMTKCGCKFHWCCAVRCQDCLEALDVHTCKAPKNADWTTAT

SEQ ID NO: 2073 - protein, 472 aa, Homo sapiens
MPPIGLDNVATYAGQFNQDYLSGMAANMSGTFGGANMPNLYPGAPGAGYPPVPPGGFGQPPSAQQPVPPYGMYPPPGGNPPSRMPSYPPYPGAPVPGQPMPPPGQQPPGAYPGQPPVTYPGQPPVPLPGQQQPVPSYPGYPGSGTVTPAVPPTQFGSRGTITDAPGFDPLRDAEVLRKAMKGFGTDEQAIIDCLGSRSNKQRQQILLSFKTAYGKDLIKDLKSELSGNFEKTILALMKTPVLFDIYEIKEAIKGVGTDEACLIEILASRSNEHIRELNRAYKAEFKKTLEEAIRSDTSGHFQRLLISLSQGNRDESTNVDMSLAQRDAQELYAAGENRLGTDESKFNAVLCSRSRAHLVAVFNEYQRMTGRDIEKSICREMSGDLEEGMLAVVKCLKNTPAFFAERLNKAMRGAGTKDRTLIRIMVSRSETDLLDIRSEYKRMYGKSLYHDISGDTSGDYRKILLKICGGND

SEQ ID NO: 2074 - protein, 1712 aa, Homo sapiens
MASGSRWRPTPPPLLLLLLLALAARADGLEFGGGPGQWARYARWAGAASSGELSFSLRTNATRALLLYLDDGGDCDFLELLLVDGRLRLRFTLSCAEPATLQLDTPVADDRWHMVLLTRDARRTALAVDGEARAAEVRSKRREMQVASDLFVGGIPPDVRLSALTLSTVKYEPPFRGLLANLKLGERPPALLGSQGLRGATADPLCAPARNPCANGGLCTVLAPGEVGCDCSHTGFGGKFCSEEEHPMEGPAHLTLNSEVGSLLFSEGGAGRGGAGDVHQPTKGKEEFVATFKGNEFFCYDLSHNPIQSSTDEITLAFRTLQRNGLMLHTGKSADYVNLSLKSGAVWLVINLGSGAFEALVEPVNGKFNDNAWHDVRVTRNLRQHAGIGHAMVNKLHYLVTISVDGILTTTGYTQEDYTMLGSDDFFYIGGSPNTADLPGSPVSNNFMGCLKDVVYKNNDFKLELSRLAKEGDPKMKLQGDLSFRCEDVAALDPVTFESPEAFVALPRWSAKRTGSISLDFRTTEPNGLLLFSQGRRAGGGAGSHSSAQRADYFAMELLDGHLYLLLDMGSGGIKLRASSRKVNDGEWCHVDFQRDGRKGSISVNSRSTPFLATGDSEILDLESELYLGGLPEGGRVDLPLPPEVWTAALRAGYVGCVRDLFIDGRSRDLRGLAEAQGAVGVAPFCSRETLKQCASAPCRNGGVCREGWNRFICDCIGTGFLGRVCEREATVLSYDGSMYMKIMLPNAMHTEAEDVSLRFMSQRAYGLMMATTSRESADTLRLELDGGQMKLTVNLDCLRVGCAPSKGPETLFAGHKLNDNEWHTVRVVRRGKSLQLSVDNVTVEGQMAGAHMRLEFHNIETGIMTERRFISVVPSNFIGHLSGLVFNGQPYMDQCKDGDITYCELNARFGLRAIVADPVTFKSRSSYLALATLQAYASMHLFFQFKTTAPDGLLLFNSGNGNDFIVIELVKGYIHYVFDLGNGPSLMKGNSDKPVNDNQWHNVVVSRDPGNVHTLKIDSRTVTQHSNGARNLDLKGELYIGGLSKNMFSNLPKLVASRDGFQGCLASVDLNGRLPDLIADALHRIGQVERGCDGPSTTCTEESCANQGVCLQQWDGFTCDCTMTSYGGPVCNDPGTTYIFGKGGALITYTWPPNDRPSTRMDRLAVGFSTHQRSAVLVRVDSASGLGDYLQLHIDQGTVGVIFNVGTDDITIDEPNAIVSDGKYHVVRFTRSGGNATLQVDSWPVNERYPAGNFDNERLAIARQRIPYRLGRVVDEWLLDKGRQLTIFNSQAAIKIGGRDQGRPFQGQVSGLYYNGLKVLALAAESDPNVRTEGHLRLVGEGPSVLLSAETTATTLLADMATTIMETTTTMATTTTRRGRSPTLRDSTTQNTDDLLVASAECPSDDEDLEECEPSTGGELILPIITEDSLDPPPVATRSPFVPPPPTFYPFLTGVGATQDTLPPPAARRPPSGGPCQAERDDSDCEEPIEASGFASGEVFDSSLPPTDDEDFYTTFPLVTDRTTLLSPRKPAPRPNLRTDGATGAPGVLFAPSAPAPNLPAGKMNHRDPLQPLLENPPLGPGAPTSFEPRRPPPLRPGVTSAPGFPHLPTANPTGPGERGPPGAVEVIRESSSTTGMVVGIVAAAALCILILLYAMYKYRNRDEGSYQVDQSRNYISNSAQSNGAVVKEKAPAAPKTPSKAKKNKDKEYYV

SEQ ID NO: 2075 - protein, 1111 aa, Homo sapiens
MHWLPAGHDINGALEPSNIDTSILEEYISKEDASDLCFPDISAPASSASYSHGQPAMPGSSGVHHLSPPGGGPSPGRHGPLPPPGYGTPLNCNNNNGMGAAPKPFPGGTGPPIKAEPKAPYAPGTLPDSPPDSGSEAYSPQQVNEPHLLRTITPETLCHVGVPSRLEHPPPPPAHLPGPPPPPPPPPHYPVLQRDLYMKAEPPIPHYAAMGQGLVPTDLHHTQQSQMLHQLLQQHGAELPTHPSKKRKHSESPPSTLNAQMLNGMIKQEPGTVTALPLHPTRAPSPPWPPQGPLSPGPGSLPLSIARVQTPPWHPPGAPSPGLLQDSDSLSGSYLDPNYQSIKWQPHQQNKWATLYDANYKELPMLTYRVDADKGFNFSVGDDAFVCQKKNHFQVTVYIGMLGEPKYVKTPEGLKPLDCFYLKLHGVKLEALNQSINIEQSQSDRSKRPFNPVTVNLPPEQVTKVTVGRLHFSETTANNMRKKGKPNPDQRYFMLVVALQAHAQNQNYTLAAQISERIIVRASNPGQFESDSDVLWQRAQVPDTVFHHGRVGINTDRPDEALVVHGNVKVMGSLMHPSDLRAKEHVQEVDTTEQLKRISRMRLVHYRYKPEFAASAGIEATAPETGVIAQEVKEILPEAVKDTGDMVFANGKTIENFLVVNKERIFMENVGAVKELCKLTDNLETRIDELERWSHKLAKLRRLDSLKSTGSSGAFSHAGSQFSRAGSVPHKKRPPKVASKSSSVVPDQACISQRFLQGTIIALVVVMAFSVVSMSTLYVLSLRTEEDLVDTDGRSSQSFGTTQLRQSPLTTGLPGIQPSLLLVTTSLTSSAPGSAVRTLDMCSSHPCPVICCSSPTTNPTTGPSLGPSFNPGHVLSPSPSPSTNRSGPSQMALLPVTNIRAKSWGLSVNGIGHSKHHKSLEPLASPAVPFPGGQGKAKNSPSLGFHGRARRGALQSSVGPAEPTWAQGQSEPVPSLTSIQVLENSMSITSQYCAPGDACRPGNFTYHIPVSSGTPLHLSLTLQMNSSSPVSVVLCSLRSKEEPCEEGSLPQSLHTHQDTQGTSHRWPITILSFREFTYHFRVALLGQANCSSEALAQPATDYHFHFYRLCD

SEQ ID NO: 2076 - protein, 894 aa, Homo sapiens
MILLAVLFLCFISSYSASVKGHTTGLSLNNDRLYKLTYSTEVLLDRGKGKLQDSVGYRISSNVDVALLWRNPDGDDDQLIQITMKDVNVENVNQQRGEKSIFKGKSPSKIMGKENLEALQRPTLLHLIHGKVKEFYSYQNEAVAIENIKRGLASLFQTQLSSGTTNEVDISGNCKVTYQAHQDKVIKIKALDSCKIARSGFTTPNQVLGVSSKATSVTTYKIEDSFVIAVLAEETHNFGLNFLQTIKGKIVSKQKLELKTTEAGPRLMSGKQAAAIIKAVDSKYTAIPIVGQVFQSHCKGCPSLSELWRSTRKYLQPDNLSKAEAVRNFLAFIQHLRTAKKEEILQILKMENKEVLPQLVDAVTSAQTSDSLEAILDFLDFKSDSSIILQERFLYACGFASHPNEELLRALISKFKGSIGSSDIRETVMIITGTLVRKLCQNEGCKLKAVVEAKKLILGGLEKAEKKEDTRMYLLALKNALLPEGIPSLLKYAEAGEGPISHLATTALQRYDLPFITDEVKKTLNRIYHQNRKVHEKTVRTAAAAIILNNNPSYMDVKNILLSIGELPQEMNKYMLAIVQDILRFEMPASKIVRRVLKEMVAHNYDRFSRSGSSSAYTGYIERSPRSASTYSLDILYSGSGILRRSNLNIFQYIGKAGLHGSQVVIEAQGLEALIAATPDEGEENLDSYAGMSAILFDVQLRPVTFFNGYSDLMSKMLSASGDPISVVKGLILLIDHSQELQLQSGLKANIEVQGGLAIDISGAMEFSLWYRESKTRVKNRVTVVITTDITVDSSFVKAGLETSTETEAGLEFISTVQFSQYPFLVCMQMDKDEAPFRQFEKKYERLSTGRGYVSQKRKESVLAGCEFPLHQENSEMCKVVFAPQPDSTSSGWF

SEQ ID NO: 2077 - protein, 296 aa, Homo sapiens
MNAEPERKFGVVVVGVGRAGSVRMRDLRNPHPSSAFLNLIGFVSRRELGSIDGVQQISLEDALSSQEVEVAYICSESSSHEDYIRQFLNAGKHVLVEYPMTLSLAAAQELWELAEQKGKVLHEEHVELLMEEFAFLKKEVVGKDLLKGSLLFTAGPLEEERFGFPAFSGISRLTWLVSLFGELSLVSATLEERKEDQYMKMTVCLETEKKSPLSWIEEKGPGLKRNRYLSFHFKSGSLENVPNVGVNKNIFLKDQNIFVQKLLGQFSEKELAAEKKRILHCLGLAEEIQKYCCSRK

SEQ ID NO: 2078 - protein, 790 aa, Homo sapiens
MGTRKKVHAFVRVKPTDDFAHEMIRYGDDKRSIDIHLKKDIRRGVVNNQQTDWSFKLDGVLHDASQDLVYETVAKDVVSQALDGYNGTIMCYGQTGAGKTYTMMGATENYKHRGILPRALQQVFRMIEERPTHAITVRVSYLEIYNESLFDLLSTLPYVGPSVTPMTIVENPQGVFIKGLSVHLTSQEEDAFSLLFEGETNRIIASHTMNKNSSRSHCIFTIYLEAHSRTLSEEKYITSKINLVDLAGSERLGKSGSEGQVLKEATYINKSLSFLEQAIIALGDQKRDHIPFRQCKLTHALKDSLGGNCNMVLVTNIYGEAAQLEETLSSLRFASRMKLVTTEPAINEKYDAERMVKNLEKELALLKQELAIHDSLTNRTFVTYDPMDEIQIAEINSQVRRYLEGTLDEIDIISLRQIKEVFNQFRVVLSQQEQEVESTLRRKYTLIDRNDFAAISAIQKAGLVDVDGHLVGEPEGQNFGLGVAPFSTKPGKKAKSKKTFKEPLSSLARKEGASSPVNGKDLDYVSTSKTQLVPSSKDGDVKDMLSRDRETSSIEPLPSDSPKEELRPIRPDTPPSKPVAFEEFKNEQGSEINRIFKENKSILNERRKRASETTQHINAIKREIDVTKEALNFQKSLREKQGKYENKGLMIIDEEEFLLILKLKDLKKQYRSEYQDLRDLRAEIQYCQHLVDQCRHRLLMEFDIWYNESFVIPEDMQMALKPGGSIRPGMVPVNRIVSLGEDDQDKFSQLQQRVLPEGPDSISFYNAKVKIEQKHNYLKTMMGLQQAHRK

SEQ ID NO: 2079 - protein, 963 aa, Homo sapiens
MAEGGGCRERPDAETQKSELGPLMRTTLQRGAQWYLIDSRWFKQWKKYVGFDSWDMYNVGEHNLFPGPIDNSGLFSDPESQTLKEHLIDELDYVLVPTEAWNKLLNWYGCVEGQQPIVRKVVEHGLFVKHCKVEVYLLELKLCENSDPTNVLSCHFSKADTIATIEKEMRKLFNIPAERETRLWNKYMSNTYEQLSKLDNTVQDAGLYQGQVLVIEPQNEDGTWPRQTLQSKSSTAPSRNFTTSPKSSASPYSSVSASLIANGDSTSTCGMHSSGVSRGGSGFSASYNCQEPPSSHIQPGLCGLGNLGNTCFMNSALQCLSNTAPLTDYFLKDEYEAEINRDNPLGMKGEIAEAYAELIKQMWSGRDAHVAPRMFKTQVGRFAPQFSGYQQQDSQELLAFLLDGLHEDLNRVKKKPYLELKDANGRPDAVVAKEAWENHRLRNDSVIVDTFHGLFKSTLVCPECAKVSVTFDPFCYLTLPLPLKKDRVMEVFLVPADPHCRPTQYRVTVPLMGAVSDLCEALSRLSGIAAENMVVADVYNHRFHKIFQMDEGLNHIMPRDDIFVYEVCSTSVDGSECVTLPVYFRERKSRPSSTSSASALYGQPLLLSVPKHKLTLESLYQAVCDRISRYVKQPLPDEFGSSPLEPGACNGSRNSCEGEDEEEMEHQEEGKEQLSETEGSGEDEPGNDPSETTQKKIKGQPCPKRLFTFSLVNSYGTADINSLAADGKLLKLNSRSTLAMDWDSETRRLYYDEQESEAYEKHVSMLQPQKKKKTTVALRDCIELFTTMETLGEHDPWYCPNCKKHQQATKKFDLWSLPKILVVHLKRFSYNRYWRDKLDTVVEFPIRGLNMSEFVCNLSARPYVYDLIAVSNHYGAMGVGHYTAYAKNKLNGKWYYFDDSNVSLASEDQIVTKAAYVLFYQRRDDEFYKTPSLSSSGSSDGGTRPSSSQQGFGDDEACSMDTN

SEQ ID NO: 2080 - protein, 1636 aa, Homo sapiens
MEAVPRMPMIWLDLKEAGDFHFQPAVKKFVLKNYGENPEAYNEELKKLELLRQNAVRVPRDFEGCSVLRKYLGQLHYLQSRVPMGSGQEAAVPVTWTEIFSGKSVAHEDIKYEQACILYNLGALHSMLGAMDKRVSEEGMKVSCTHFQCAAGAFAYLREHFPQAYSVDMSRQILTLNVNLMLGQAQECLLEKSMLDNRKSFLVARISAQVVDYYKEACRALENPDTASLLGRIQKDWKKLVQMKIYYFAAVAHLHMGKQAEEQQKFGERVAYFQSALDKLNEAIKLAKGQPDTVQDALRFTMDVIGGKYNSAKKDNDFIYHEAVPALDTLQPVKGAPLVKPLPVNPTDPAVTGPDIFAKLVPMAAHEASSLYSEEKAKLLREMMAKIEDKNEVLDQFMDSMQLDPETVDNLDAYSHIPPQLMEKCAALSVRPDTVRNLVQSMQVLSGVFTDVEASLKDIRDLLEEDELLEQKFQEAVGQAGAISITSKAELAEVRREWAKYMEVHEKASFTNSELHRAMNLHVGNLRLLSGPLDQVRAALPTPALSPEDKAVLQNLKRILAKVQEMRDQRVSLEQQLRELIQKDDITASLVTTDHSEMKKLFEEQLKKYDQLKVYLEQNLAAQDRVLCALTEANVQYAAVRRVLSDLDQKWNSTLQTLVASYEAYEDLMKKSQEGRDFYADLESKVAALLERTQSTCQAREAARQQLLDRELKKKPPPRPTAPKPLLPRREESEAVEAGDPPEELRSLPPDMVAGPRLPDTFLGSATPLHFPPSPFPSSTGPGPHYLSGPLPPGTYSGPTQLIQPRAPGPHAMPVAPGPALYPAPAYTPELGLVPRSSPQHGVVSSPYVGVGPAPPVAGLPSAPPPQFSGPELAMAVRPATTTVDSIQAPIPSHTAPRPNPTPAPPPPCFPVPPPQPLPTPYTYPAGAKQPIPAQHHFSSGIPAGFPAPRIGPQPQPHPQPHPSQAFGPQPPQQPLPLQHPHLFPPQAPGLLPPQSPYPYAPQPGVLGQPPPPLHTQLYPGPAQDPLPAHSGALPFPSPGPPQPPHPPLAYGPAPSTRPMGPQAAPLTIRGPSSAGQSTPSPHLVPSPAPSPGPGPVPPRPPAAEPPPCLRRGAAAADLLSSSPESQHGGTQSPGGGQPLLQPTKVDAAEGRRPQALRLIERDPYEHPERLRQLQQELEAFRGQLGDVGALDTVWRELQDAQEHDARGRSIAIARCYSLKNRHQDVMPYDSNRVVLRSGKDDYINASCVEGLSPYCPPLVATQAPLPGTAADFWLMVHEQKVSVIVMLVSEAEMEKQKVARYFPTERGQPMVHGALSLALSSVRSTETHVERVLSLQFRDQSLKRSLVHLHFPTWPELGLPDSPSNLLRFIQEVHAHYLHQRPLHTPIIVHCSSGVGRTGAFALLYAAVQEVEAGNGIPELPQLVRRMRQQRKHMLQEKLHLRFCYEAVVRHVEQVLQRHGVPPPCKPLASASISQKNHLPQDSQDLVLGGDVPISSIQATIAKLSIRPPGGLESPVASLPGPAEPPGLPPASLPESTPIPSSSPPPLSSPLPEAPQPKEEPPVPEAPSSGPPSSSLELLASLTPEAFSLDSSLRGKQRMSKHNFLQAHNGQGLRATRPSDDPLSLLDPLWTLNKT

SEQ ID NO: 2081 - protein, 1279 aa, Homo sapiens
MTLTERLREKISRAFYNHGLLCASYPIPIILFTGFCILACCYPLLKLPLPGTGPVEFTTPVKDYSPPPVDSDRKQGEPTEQPEWYVGAPVAYVQQIFVKSSVFPWHKNLLAVDVFRSPLSRAFQLVEEIRNHVLRDSSGIRSLEELCLQVTDLLPGLRKLRNLLPEHGCLLLSPGNFWQNDWERFHADPDIIGTIHQHEPKTLQTSATLKDLLFGVPGKYSGVSLYTRKRMVSYTITLVFQHYHAKFLGSLRARLMLLHPSPNCSLRAESLVHVHFKEEIGVAELIPLVTTYIILFAYIYFSTRKIDMVKSKWGLALAAVVTVLSSLLMSVGLCTLFGLTPTLNGGEIFPYLVVVIGLENVLVLTKSVVSTPVDLEVKLRIAQGLSSESWSIMKNMATELGIILIGYFTLVPAIQEFCLFAVVGLVSDFFLQMLFFTTVLSIDIRRMELADLNKRLPPEACLPSAKPVGQPTRYERQLAVRPSTPHTITLQPSSFRNLRLPKRLRVVYFLARTRLAQRLIMAGTVVWIGILVYTDPAGLRNYLAAQVTEQSPLGEGALAPMPVPSGMLPPSHPDPAFSIFPPDAPKLPENQTSPGESPERGGPAEVVHDSPVPEVTWGPEDEELWRKLSFRHWPTLFSYYNITLAKRYISLLPVIPVTLRLNPREALEGRHPQDGRSAWPPPGPIPAGHWEAGPKGPGGVQAHGDVTLYKVAALGLATGIVLVLLLLCLYRVLCPRNYGQLGGGPGRRRRGELPCDDYGYAPPETEIVPLVLRGHLMDIECLASDGMLLVSCCLAGHVCVWDAQTGDCLTRIPRPGRQRRDSGVGSGLEAQESWERLSDGGKAGPEEPGDSPPLRHRPRGPPPPSLFGDQPDLTCLIDTNFSAQPRSSQPTQPEPRHRAVCGRSRDSPGYDFSCLVQRVYQEEGLAAVCTPALRPPSPGPVLSQAPEDEGGSPEKGSPSLAWAPSAEGSIWSLELQGNLIVVGRSSGRLEVWDAIEGVLCCSSEEVSSGITALVFLDKRIVAARLNGSLDFFSLETHTALSPLQFRGTPGRGSSPASPVYSSSDTVACHLTHTVPCAHQKPITALKAAAGRLVTGSQDHTLRVFRLEDSCCLFTLQGHSGAITTVYIDQTMVLASGGQDGAICLWDVLTGSRVSHVFAHRGDVTSLTCTTSCVISSGLDDLISIWDRSTGIKFYSIQQDLGCGASLGVISDNLLVTGGQGCVSFWDLNYGDLLQTVYLGKNSEAQPARQILVLDNAAIVCNFGSELSLVYVPSVLEKLD

SEQ ID NO: 2082 - protein, 380 aa, Homo sapiens
MDSPIQIFRGEPGPTCAPSACLPPNSSAWFPGWAEPDSNGSAGSEDAQLEPAHISPAIPVIITAVYSVVFVVGLVGNSLVMFVIIRYTKMKTATNIYIFNLALADALVTTTMPFQSTVYLMNSWPFGDVLCKIVISIDYYNMFTSIFTLTMMSVDRYIAVCHPVKALDFRTPLKAKIINICIWLLSSSVGISAIVLGGTKVREDVDVIECSLQFPDDDYSWWDLFMKICVFIFAFVIPVLIIIVCYTLMILRLKSVRLLSGSREKDRNLRRITRLVLVVVAVFVVCWTPIHIFILVEALGSTSHSTAALSSYYFCIALGYTNSSLNPILYAFLDENFKRCFRDFCFPLKMRMERQSTSRVRNTVQDPAYLRDIDGMNKPV

SEQ ID NO: 2083 - protein, 1394 aa, Homo sapiens
MKDIDIGKEYIIPSPGYRSVRERTSTSGTHRDREDSKFRRTRPLECQDALETAARAEGLSLDASMHSQLRILDEEHPKGKYHHGLSALKPIRTTSKHQHPVDNAGLFSCMTFSWLSSLARVAHKKGELSMEDVWSLSKHESSDVNCRRLERLWQEELNEVGPDAASLRRVVWIFCRTRLILSIVCLMITQLAGFSGPAFMVKHLLEYTQATESNLQYSLLLVLGLLLTEIVRSWSLALTWALNYRTGVRLRGAILTMAFKKILKLKNIKEKSLGELINICSNDGQRMFEAAAVGSLLAGGPVVAILGMIYNVIILGPTGFLGSAVFILFYPAMMFASRLTAYFRRKCVAATDERVQKMNEVLTYIKFIKMYAWVKAFSQSVQKIREEERRILEKAGYFQSITVGVAPIVVVIASVVTFSVHMTLGFDLTAAQAFTVVTVFNSMTFALKVTPFSVKSLSEASVAVDRFKSLFLMEEVHMIKNKPASPHIKIEMKNATLAWDSSHSSIQNSPKLTPKMKKDKRASRGKKEKVRQLQRTEHQAVLAEQKGHLLLDSDERPSPEEEEGKHIHLGHLRLQRTLHSIDLEIQEGKLVGICGSVGSGKTSLISAILGQMTLLEGSIAISGTFAYVAQQAWILNATLRDNILFGKEYDEERYNSVLNSCCLRPDLAILPSSDLTEIGERGANLSGGQRQRISLARALYSDRSIYILDDPLSALDAHVGNHIFNSAIRKHLKSKTVLFVTHQLQYLVDCDEVIFMKEGCITERGTHEELMNLNGDYATIFNNLLLGETPPVEINSKKETSGSQKKSQDKGPKTGSVKKEKAVKPEEGQLVQLEEKGQGSVPWSVYGVYIQAAGGPLAFLVIMALFMLNVGSTAFSTWWLSYWIKQGSGNTTVTRGNETSVSDSMKDNPHMQYYASIYALSMAVMLILKAIRGVVFVKGTLRASSRLHDELFRRILRSPMKFFDTTPTGRILNRFSKDMDEVDVRLPFQAEMFIQNVILVFFCVGMIAGVFPWFLVAVGPLVILFSVLHIVSRYQELLDDNQAPFFLFTCAMRWLAVRLDLISIALITTTGLMIVLMHGQIPPAYAGLAISYAVQLTGLFQFTVRLASETEARFTSVERINHYIKTLSLEAPARIKNKAPSPDWPQEGEVTFENAEMRYRENLPLVLKKVSFTIKPKEKIGIVGRTGSGKSSLGMALFRLVELSGGCIKIDGVRISDIGLADLRSKLSIIPQEPVLFSGTVRSNLDPFNQYTEDQIWDALERTHMKECIAQLPLKLESEVMENGDNFSVGERQLLCIARALLRHCKILILDEATAAMDTETDLLIQETIREAFADCTMLTIAHRLHTVLGSDRIMVLAQGQVVEFDTPSVLLSNDSSRFYAMFAAAENKVAVKG

SEQ ID NO: 2084 - protein, 898 aa, Homo sapiens
MAAAAAEEGMEPRALQYEQTLMYGRYTQDLGAFAKEEAARIRLGGPEPWKGPPSSRAAPELLEYGRSRCARCRVCSVRCHKFLVSRVGEDWIFLVLLGLLMALVSWVMDYAIAACLQAQQWMSRGLNTSILLQYLAWVTYPVVLITFSAGFTQILAPQAVGSGIPEMKTILRGVVLKEYLTLKTFIAKVIGLTCALGSGMPLGKEGPFVHIASMCAALLSKFLSLFGGIYENESRNTEMLAAACAVGVGCCFAAPIGGVLFSIEVTSTFFAVRNYWRGFFAATFSAFIFRVLAVWNRDEETITALFKTRFRLDFPFDLQELPAFAVIGIASGFGGALFVYLNRKIVQVMRKQKTINRFLMRKRLLFPALVTLLISTLTFPPGFGQFMAGQLSQKETLVTLFDNRTWVRQGLVEELEPPSTSQAWNPPRANVFLTLVIFILMKFWMSALATTIPVPCGAFMPVFVIGAAFGRLVGESMAAWFPDGIHTDSSTYRIVPGGYAVVGAAALAGAVTHTVSTAVIVFELTGQIAHILPVMIAVILANAVAQSLQPSLYDSIIRIKKLPYLPELGWGRHQQYRVRVEDIMVRDVPHVALSCTFRDLRLALHRTKGRMLALVESPESMILLGSIERSQVVALLGAQLSPARRRQHMQERRATQTSPLSDQEGPPTPEASVCFQVNTEDSAFPAARGETHKPLKPALKRGPSVTRNLGESPTGSAESAGIALRSLFCGSPPPEAASEKLESCEKRKLKRVRISLASDADLEGEMSPEEILEWEEQQLDEPVNFSDCKIDPAPFQLVERTSLHKTHTIFSLLGVDHAYVTSIGRLIGIVTLKELRKAIEGSVTAQGVKVRPPLASFRDSATSSSDTETTEVHALWGPHSRHGLPREGSPSDSDDKCQ

SEQ ID NO: 2085 - protein, 725 aa, Homo sapiens
MAAASAVSVLLVAAERNRWHRLPSLLLPPRTWVWRQRTMKYTTATGRNITKVLIANRGEIACRVMRTAKKLGVQTVAVYSEADRNSMHVDMADEAYSIGPAPSQQSYLSMEKIIQVAKTSAAQAIHPGCGFLSENMEFAELCKQEGIIFIGPPPSAIRDMGIKSTSKSIMAAAGVPVVEGYHGEDQSDQCLKEHARRIGYPVMIKAVRGGGGKGMRIVRSEQEFQEQLESARREAKKSFNDDAMLIEKFVDTPRHVEVQVFGDHHGNAVYLFERDCSVQRRHQKIIEEAPAPGIKSEVRKKLGEAAVRAAKAVNYVGAGTVEFIMDSKHNFCFMEMNTRLQVEHPVTEMITGTDLVEWQLRIAAGEKIPLSQEEITLQGHAFEARIYAEDPSNNFMPVAGPLVHLSTPRADPSTRIETGVRQGDEVSVHYDPMIAKLVVWAADRQAALTKLRYSLRQYNIVGLHTNIDFLLNLSGHPEFEAGNVHTDFIPQHHKQLLLSRKAAAKESLCQAALGLILKEKAMTDTFTLQAHDQFSPFSSSSGRRLNISYTRNMTLKDGKNNVAIAVTYNHDGSYSMQIEDKTFQVLGNLYSEGDCTYLKCSVNGVASKAKLIILENTIYLFSKEGSIEIDIPVPKYLSSVSSQETQGGPLAPMTGTIEKVFVKAGDKVKAGDSLMVMIAMKMEHTIKSPKDGTVKKVFYREGAQANRHTPLVEFEEEESDKRESE

SEQ ID NO: 2086 - protein, 1196 aa, Homo sapiens
MPTAESEAKVKTKVRFEELLKTHSDLMREKKKLKKKLVRSEENISPDTIRSNLHYMKETTSDDPDTIRSNLPHIKETTSDDVSAANTNNLKKSTRVTKNKLRNTQLATENPNGDASVEEDKQGKPNKKVIKTVPQLTTQDLKPETPENKVDSTHQKTHTKPQPGVDHQKSEKANEGREETDLEEDEELMQAYQCHVTEEMAKEIKRKIRKKLKEQLTYFPSDTLFHDDKLSSEKRKKKKEVPVFSKAETSTLTISGDTVEGEQKKESSVRSVSSDSHQDDEISSMEQSTEDSMQDDTKPKPKKTKKKTKAVADNNEDVDGDGVHEITSRDSPVYPKCLLDDDLVLGVYIHRTDRLKSDFMISHPMVKIHVVDEHTGQYVKKDDSGRPVSSYYEKENVDYILPIMTQPYDFKQLKSRLPEWEEQIVFNENFPYLLRGSDESPKVILFFEILDFLSVDEIKNNSEVQNQECGFRKIAWAFLKLLGANGNANINSKLRLQLYYPPTKPRSPLSVVEAFEWWSKCPRNHYPSTLYVTVRGLKVPDCIKPSYRSMMALQEEKGKPVHCERHHESSSVDTEPGLEESKEVIKWKRLPGQACRIPNKHLFSLNAGERGCFCLDFSHNGRILAAACASRDGYPIILYEIPSGRFMRELCGHLNIIYDLSWSKDDHYILTSSSDGTARIWKNEINNTNTFRVLPHPSFVYTAKFHPAVRELVVTGCYDSMIRIWKVEMREDSAILVRQFDVHKSFINSLCFDTEGHHMYSGDCTGVIVVWNTYVKINDLEHSVHHWTINKEIKETEFKGIPISYLEIHPNGKRLLIHTKDSTLRIMDLRILVARKFVGAANYREKIHSTLTPCGTFLFAGSEDGIVYVWNPETGEQVAMYSDLPFKSPIRDISYHPFENMVAFCAFGQNEPILLYIYDFHVAQQEAEMFKRYNGTFPLPGIHQSQDALCTCPKLPHQGSFQIDEFVHTESSSTKMQLVKQRLETVTEVIRSCAAKVNKNLSFTSPPAVSSQQSKLKQSNMLTAQEILHQFGFTQTGIISIERKPCNHQVDTAPTVVALYDYTANRSDELTIHRGDIIRVFFKDNEDWWYGSIGKGQEGYFPANHVASETLYQELPPEIKERSPPLSPEEKTKIEKSPAPQKQSINKNKSQDFRLGSESMTHSEMRKEQSHEDQGHIMDTRMRKNKQAGRKVTLIE

SEQ ID NO: 2087 - protein, 379 aa, Homo sapiens
MGCLGNSKTEDQRNEEKAQREANKKIEKQLQKDKQVYRATHRLLLLGAGESGKSTIVKQMRILHVNGFNGDEKATKVQDIKNNLKEAIETIVAAMSNLVPPVELANPENQFRVDYILSVMNVPDFDFPPEFYEHAKALWEDEGVRACYERSNEYQLIDCAQYFLDKIDVIKQADYVPSDQDLLRCRVLTSGIFETKFQVDKVNFHMFDVGGQRDERRKWIQCFNDVTAIIFVVASSSYNMVIREDNQTNRLQEALNLFKSIWNNRWLRTISVILFLNKQDLLAEKVLAGKSKIEDYFPEFARYTTPEDATPEPGEDPRVTRAKYFIRDEFLRISTASGDGRHYCYPHFTCAVDTENIRRVFNDCRDIIQRMHLRQYELL

SEQ ID NO: 2088 - protein, 354 aa, Homo sapiens
MGKLVALVLLGVGLSLVGEMFLAFRERVNASREVEPVEPENCHLIEELESGSEDIDILPSGLAFISSGLKYPGMPNFAPDEPGKIFLMDLNEQNPRAQALEISGGFDKELFNPHGISIFIDKDNTVYLYVVNHPHMKSTVEIFKFEEQQRSLVYLKTIKHELLKSVNDIVVLGPEQFYATRDHYFTNSLLSFFEMILDLRWTYVLFYSPREVKVVAKGFCSANGITVSADQKYVYVADVAAKNIHIMEKHDNWDLTQLKVIQLGTLVDNLTVDPATGDILAGCHPNPMKLLNYNPEDPPGSEVLRIQNVLSEKPRVSTVYANNGSVLQGTSVASVYHGKILIGTVFHKTLYCEL

SEQ ID NO: 2089 - protein, 675 aa, Homo sapiens
MAAAKVALTKRADPAELRTIFLKYASIEKNGEFFMSPNDFVTRYLNIFGESQPNPKTVELLSGVVDQTKDGLISFQEFVAFESVLCAPDALFMVAFQLFDKAGKGEVTFEDVKQVFGQTTIHQHIPFNWDSEFVQLHFGKERKRHLTYAEFTQFLLEIQLEHAKQAFVQRDNARTGRVTAIDFRDIMVTIRPHVLTPFVEECLVAAAGGTTSHQVSFSYFNGFNSLLNNMELIRKIYSTLAGTRKDVEVTKEEFVLAAQKFGQVTPMEVDILFQLADLYEPRGRMTLADIERIAPLEEGTLPFNLAEAQRQKASGDSARPVLLQVAESAYRFGLGSVAGAVGATAVYPIDLVKTRMQNQRSTGSFVGELMYKNSFDCFKKVLRYEGFFGLYRGLLPQLLGVAPEKAIKLTVNDFVRDKFMHKDGSVPLAAEILAGGCAGGSQVIFTNPLEIVKIRLQVAGEITTGPRVSALSVVRDLGFFGIYKGAKACFLRDIPFSAIYFPCYAHVKASFANEDGQVSPGSLLLAGAIAGMPAASLVTPADVIKTRLQVAARAGQTTYSGVIDCFRKILREEGPKALWKGAGARVFRSSPQFGVTLLTYELLQRWFYIDFGGVKPMGSEPVPKSRINLPAPNPDHVGGYKLAVATFAGIENKFGLYLPLFKPSVSTSKAIGGGP

SEQ ID NO: 2090 - protein, 431 aa, Homo sapiens
MLALLAASVALAVAAGAQDSPAPGSRFVCTALPPEAVHAGCPLPAMPMQGGAQSPEEELRAAVLQLRETVVQQKETLGAQREAIRELTGKLARCEGLAGGKARGAGATGKDTMGDLPRDPGHVVEQLSRSLQTLKDRLESLEHQLRANVSNAGLPGDFREVLQQRLGELERQLLRKVAELEDEKSLLHNETSAHRQKTESTLNALLQRVTELERGNSAFKSPDAFKVSLPLRTNYLYGKIKKTLPELYAFTICLWLRSSASPGIGTPFSYAVPGQANEIVLIEWGNNPIELLINDKVAQLPLFVSDGKWHHICVTWTTRDGMWEAFQDGEKLGTGENLAPWHPIKPGGVLILGQEQDTVGGRFDATQAFVGELSQFNIWDRVLRAQEIVNIANCSTNMPGNIIPWVDNNVDVFGGASKWPVETCEERLLDL

SEQ ID NO: 2091 - protein, 793 aa, Homo sapiens
MFWKFDLHSSSHIDTLLEREDVTLKELMDEEDVLQECKAQNRKLIEFLLKAECLEDLVSFIIEEPPQDMDEKIRYKYPNISCELLTSDVSQMNDRLGEDESLLMKLYSFLLNDSPLNPLLASFFSKVLSILISRKPEQIVDFLKKKHDFVDLIIKHIGTSAIMDLLLRLLTCIEPPQPRQDVLNWLNEEKIIQRLVEIVHPSQEEDRHSNASQSLCEIVRLSRDQMLQIQNSTEPDPLLATLEKQEIIEQLLSNIFHKEKNESAIVSAIQILLTLLETRRPTFEGHIEICPPGMSHSACSVNKSVLEAIRGRLGSFHELLLEPPKNMFFKYTWNNFLHTQVEICIALILASPFENTENATITDQDSTGDNLLLKHLFQKCQLIERILEAWEMNEKKQAEGGRRHGYMGHLTRIANCIVHSTDKGPNSALVQQLIKDLPDEVRERWETFCTSSLGETNKRNTVDLAFSDYQMQQMTSNFIDQFGFNDEKFADQDDIGNVSFDRVSDINFTLNTNESGNIALFEACCKERIQQFDDGGSDEEDIWEEKHIAFTPESQRRSSSGSTDSEESTDSEEEDGAKQDLFEPSSANTEDKMEVDLSEPPNWSANFDVPMETTHGAPLDSVGSDVWSTEEPMPTKETGWASFSEFTSSLSTKDSLRSNSPVEMETSTEPMDPLTPSAAALAVQPEAAGSVAMEASSDGEEDAESTDKVTETVMNGGMKETLSLTVDAKTETAVFKSEEGKLSTSQDAACKDAEECPETAEAKCAAPRPPSSSPEQRTGQPSAPGDTSVNGPV

SEQ ID NO: 2092 - protein, 827 aa, Homo sapiens
MFWKFDLHSSSHIDTLLEREDVTLKELMDEEDVLQECKAQNRKLIEFLLKAECLEDLVSFIIEEPPQDMDEKIRYKYPNISCELLTSDVSQMNDRLGEDESLLMKLYSFLLNDSPLNPLLASFFSKVLSILISRKPEQIVDFLKKKHDFVDLIIKHIGTSAIMDLLLRLLTCIEPPQPRQDVLNWLNEEKIIQRLVEIVHPSQEEDRHSNASQSLCEIVRLSRDQMLQIQNSTEPDPLLATLEKQEIIEQLLSNIFHKEKNESAIVSAIQILLTLLETRRPTFEGHIEICPPGMSHSACSVNKSVLEAIRGRLGSFHELLLEPPKKSVMKTTWGVLDPPVGNTRLNVIRLISSLLQTNTSSINGDLMELNSIGVILNMFFKYTWNNFLHTQVEICIALILASPFENTENATITDQDSTGDNLLLKHLFQKCQLIERILEAWEMNEKKQAEGGRRHGYMGHLTRIANCIVHSTDKGPNSALVQQLIKDLPDEVRERWETFCTSSLGETNKRNTVDLFGFNDEKFADQDDIGNVSFDRVSDINFTLNTNESGNIALFEACCKERIQQFDDGGSDEEDIWEEKHIAFTPESQRRSSSGSTDSEESTDSEEEDGAKQDLFEPSSANTEDKMEVDLSEPPNWSANFDVPMETTHGAPLDSVGSDVWSTEEPMPTKETGWASFSEFTSSLSTKDSLRSNSPVEMETSTEPMDPLTPSAAALAVQPEAAGSVAMEASSDGEEDAESTDKVTETVMNGGMKETLSLTVDAKTETAVFKSEEGKLSTSQDAACKDAEECPETAEAKCAAPRPPSSSPEQRTGQPSAPGDTSVNGPV

SEQ ID NO: 2093 - protein, 773 aa, Homo sapiens
MAEAHQAVAFQFTVTPDGIDLRLSHEALRQIYLSGLHSWKKKFIRFKNGIITGVYPASPSSWLIVVVGVMTTMYAKIDPSLGIIAKINRTLETANCMSSQTKNVVSGVLFGTGLWVALIVTMRYSLKVLLSYHGWMFTEHGKMSRATKIWMGMVKIFSGRKPMLYSFQTSLPRLPVPAVKDTVNRYLQSVRPLMKEEDFKRMTALAQDFAVGLGPRLQWYLKLKSWWATNYVSDWWEEYIYLRGRGPLMVNSNYYAMDLLYILPTHIQAARAGNAIHAILLYRRKLDREEIKPIRLLGSTIPLCSAQWERMFNTSRIPGEETDTIQHMRDSKHIVVYHRGRYFKVWLYHDGRLLKPREMEQQMQRILDNTSEPQPGEARLAALTAGDRVPWARCRQAYFGRGKNKQSLDAVEKAAFFVTLDETEEGYRSEDPDTSMDSYAKSLLHGRCYDRWFDKSFTFVVFKNGKMGLNAEHSWADAPIVAHLWEYVMSIDSLQLGYAEDGHCKGDINPNIPYPTRLQWDIPGECQEVIETSLNTANLLANDVDFHSFPFVAFGKGIIKKCRTSPDAFVQLALQLAHYKDMGKFCLTYEASMTRLFREGRTETVRSCTTESCDFVRAMVDPAQTVEQRLKLFKLASEKHQHMYRLAMTGSGIDRHLFCLYVVSKYLAVESPFLKEVLSEPWRLSTSQTPQQQVELFDLENNPEYVSSGGGFGPVADDGYGVSYILVGENLINFHISSKFSCPETDSHRFGRHLKEAMTDIITLFGLSSNSKK

SEQ ID NO: 2094 - protein, 471 aa, Homo sapiens
MAAMETETAPLTLESLPTDPLLLILSFLDYRDLINCCYVSRRLSQLSSHDPLWRRHCKKYWLISEEEKTQKNQCWKSLFIDTYSDVGRYIDHYAAIKKAWDDLKKYLEPRCPRMVLSLKEGAREEDLDAVEAQIGCKLPDDYRCSYRIHNGQKLVVPGLLGSMALSNHYRSEDLLDVDTAAGGFQQRQGLKYCLPLTFCIHTGLSQYIAVEAAEGRNKNEVFYQCPDQMARNPAAIDMFIIGATFTDWFTSYVKNVVSGGFPIIRDQIFRYVHDPECVATTGDITVSVSTSFLPELSSVHPPHYFFTYRIRIEMSKDALPEKACQLDSRYWRITNAKGDVEEVQGPGVVGEFPIISPGRVYEYTSCTTFSTTSGYMEGYYTFHFLYFKDKIFNVAIPRFHMACPTFRVSIARLEMGPDEYEEMEEEEEEEEEEDEDDDSADMDESDEDDEEERRRRVFDVPIRRRRCSRLF

SEQ ID NO: 2095 - protein, 1276 aa, Homo sapiens
HSIISEPAEQSPKVLLVPQTAPADPSLGQNIANPLIPFSDEMDHTASQNAQDLIGIPHLGVSGSSTKWHSELSPTEGPHSAGSSTPGFLSPMAELSHPSPPPPALGSLLQLPDGSPSWSMLEVASGPASTQQIKAGVPGRVHNGVSLPTFKNTETATHEAEPPLFQTAESGAIEMTSRKLASATANDSANPLHLSAAPENSRGPALSAEHTSSLVPSLHITTLGQEQAILSGAVPASPSTGTADFPSILTFLQPTENHASPSPVPEMPTLPAEGSDGSPPATRDLLLSSKVPNLLSTSWTFPRWKKDSVTAILGKNEEANVTIPLQAFPRKEVLSLHTVNGFVSDFSTGSVSSPIITAPRTNPLPSGPPLPSILSIQATQTVFPSLGFSSTKPEAYAAAVDHSGLPASASKQVRASPSSMDVYDSLTIGDMKKPATTDVFWSSLSAETGSLSTESIISGLQQQTNYDLNGHTISTTSWETHLAPTAPPNGLTSAADAIKSQDFKDTAGHSVTAEGFSIQDLVLGTSIEQPVQQSDMTMVGSHIDLWPTSNNNHSRDFQTAEVAYYSPTTRHSVSHPQLQLPNQPAHPLLLTSPGPTSTGSLQEMLSDGTDTGSEISSDINSSPERNASTPFQNILGYHSAAESSISTSVFPRTSSRVLRASQHPKKWTGAATNAADTVSSKVQPTAAAAVTLFLRKSSPPALSAALVAKGTSSSPLAVASGPAKSSSMTTLAKNVTNKAASGPKRTPGAVHTAFPFTPTYMYARTGHTTSTHTAMQGNMDTASGLLSTTYLPRKPQAMHTGLPNPTNLEMPRASTPRPLTVTAALTSITASVKATRLPPLRAENTDAVLPAASAAVVTTGKMASNLECQMSSKLLVKTVLFLTQRRVQISESLKFSIAKGLTQALRKAFHQNDVSAHVDILEYSHNVTVGYYATKGKLVYLPAVVIEMLGVYGVSNVTADLKQHTPHLQSVAVLASPWNPQPAGYFQLKTVLQFVSQADNIQSCKFAQTMEQRLQKAFQDAERKVLNTKSNLTIQIVSTSNASQAVTLVYVVGNQSTFLNGTVASSLLSQLSAELVGFYLTYPPLTIAEPLEYPNLDISETTRDYWVITVLQGVDNSLVGLHNQSFARVMEQRLAQLFMMSQQQGRRFKRATTLGSYTVQMVKMQRVPGPKDPAELTYYTLYNGKPLLGTAAAKILSTIDSQRMALTLHHVVLLQADPVVKNPPNNLWIIAAVLAPIAVVTVIIIIITAVLCRKNKNDFKPDTMINLPQRAKQVAQ

SEQ ID NO: 2096 - protein, 2436 aa, Homo sapiens [sequence omitted]

SEQ ID NO: 2097 - protein, 528 aa, Homo sapiens
MGAAASRRRALRSEAMSSVAAKVRAARAFGEYLSQSHPENRNGADHLLADAYSGHDGSPEMQPAPQNKRRLSLVSNGCYEGSLSEEPSIRKPAGEGPQPRVYTISGEPALLPSPEAEAIELAVVKGRRQRHPHHHSQPLRASPGGSREDVSRPCQSWAGSRQGSKECPGCAQLAPGPTPRAFGLDQPPLPETSGRRKKLERMYSVDRVSDDIPIRTWFPKENLFSFQTATTTMQAVFRGYAERKRRKRENDSASVIQRNFRKHLRMVGSRRVKAQTFAERRERSFSRSWSDPTPMKADTSHDSRDSSDLQSSHCTLDEAFEDLDWDTEKGLEAVACDTEGFVPPKVMLISSKVPKAEYIPTIIRRDDPSIIPILYDHEHATFEDILEEIERKLNVYHKGAKIWKMLIFCQGGPGHLYLLKNKVATFAKVEKEEDMIHFWKRLSRLMSKVNPEPNVIHIMGCYILGNPNGEKLFQNLRTLMTPYRVTFESPLELSAQGKQMIETYFDFRLYRLWKSRQHSKLLDFDDVL

SEQ ID NO: 2098 - protein, 830 aa, Homo sapiens
MGSMFRSEEVALVQLFLPTAAAYTCVSRLGELGLVEFRDLNASVSAFQRRFVVDVRRCEELEKTFTFLQEEVRRAGLVLPPPKGRLPAPPPRDLLRIQEETERLAQELRDVRGNQQALRAQLHQLQLHAAVLRQGHEPQLAAAHTDGASERTPLLQAPGGPHQDLRVNFVAGAVEPHKAPALERLLWRACRGFLIASFRELEQPLEHPVTGEPATWMTFLISYWGEQIGQKIRKITDCFHCHVFPFLQQEEARLGALQQLQQQSQELQEVLGETERFLSQVLGRVLQLLPPGQVQVHKMKAVYLALNQCSVSTTHKCLIAEAWCSVRDLPALQEALRDSSMEEGVSAVAHRIPCRDMPPTLIRTNRFTASFQGIVDAYGVGRYQEVNPAPYTIITFPFLFAVMFGDVGHGLLMFLFALAMVLAENRPAVKAAQNEIWQTFFRGRYLLLLMGLFSIYTGFIYNECFSRATSIFPSGWSVAAMANQSGWSDAFLAQHTMLTLDPNVTGVFLGPYPFGIDPIWSLAANHLSFLNSFKMKMSVILGVVHMAFGVVLGVFNHVHFGQRHRLLLETLPELTFLLGLFGYLVFLVIYKWLCVWAARAASAPSILIHFINMFLFSHSPSNRLLYPRQEVVQATLVVLALAMVPILLLGTPLHLLHRHRRRLRRRPADRQEENKAGLLDLPDASVNGWSSDEEKAGGLDDEEEAELVPSEVLMHQAIHTIEFCLGCVSNTASYLRLWALSLAHAQLSEVLWAMVMRIGLGLGREVGVAAVVLVPIFAAFAVMTVAILLVMEGLSAFLHALRLHWVEFQNKFYSGTGYKLSPFTFAATDD

SEQ ID NO: 2099 - protein, 739 aa, Homo sapiens
MFLLLALLTELGRLQAHEGSEGIFLHVTVPRKIKSNDSEVSERKMIYIITIDGQPYTLHLGKQSFLPQNFLVYTYNETGSLHSVSPYFMMHCHYQGYAAEFPNSFVTLSICSGLRGFLQFENISYGIEPVESSARFEHIIYQMKNNDPNVSILAVNYSHIWQKDQPYKVPLNSQIKNLSKLLPQYLEIYIIVEKALYDYMGSEMMAVTQKIVQVIGLVNTMFTQFKLTVILSSLELWSNENQISTSGDADDILQRFLAWKRDYLILRPHDIAYLLVYRKHPKYVGATFPGTVCNKSYDAGIAMYPDAIGLEGFSVIIAQLLGLNVGLTYDDITQCFCLRATCIMNHEAVSASGRKIFSNCSMHDYRYFVSKFETKCLQKLSNLQPLHQNQPVCGNGILESNEECDCGNKNECQFKKCCDYNTCKLKGSVKCGSGPCCTSKCELSIAGTPCRKSIDPECDFTEYCNGTSSNCVPDTYALNGRLCKLGTAYCYNGQCQTTDNQCAKIFGKGAQGAPFACFKEVNSLHERSENCGFKNSQPLPCERKDVLCGKLACVQPHKNANKSDAQSTVYSYIQDHVCVSIATGSSMRSDGTDNAYVADGTMCGPEMYCVNKTCRKVHLMGYNCNATTKCKGKGICNNFGNCQCFPGHRPPDCKFQFGSPGGSIDDGNFQKSGDFYTEKGYNTHWNNWFILSFCIFLPFFIVFTTVIFKRNEISKSCNRENAEYNRNSSVVSESDDVGH

SEQ ID NO: 2100 - protein, 735 aa, Homo sapiens
MWRVLFLLSGLGGLRMDSNFDSLPVQITVPEKIRSIIKEGIESQASYKIVIEGKPYTVNLMQKNFLPHNFRVYSYSGTGIMKPLDQDFQNFCHYQGYIEGYPKSVVMVSTCTGLRGVLQFENVSYGIEPLESSVGFEHVIYQVKHKKADVSLYNEKDIESRDLSFKLQSVEPQQDFAKYIEMHVIVEKQLYNHMGSDTTVVAQKVFQLIGLTNAIFVSFNITIILSSLELWIDENKIATTGEANELLHTFLRWKTSYLVLRPHDVAFLLVYREKSNYVGATFQGKMCDANYAGGVVLHPRTISLESLAVILAQLLSLSMGITYDDINKCQCSGAVCIMNPEAIHFSGVKIFSNCSFEDFAHFISKQKSQCLHNQPRLDPFFKQQAVCGNAKLEAGEECDCGTEQDCALIGETCCDIATCRFKAGSNCAEGPCCENCLFMSKERMCRPSFEECDLPEYCNGSSASCPENHYVQTGHPCGLNQWICIDGVCMSGDKQCTDTFGKEVEFGPSECYSHLNSKTDVSGNCGISDSGYTQCEADNLQCGKLICKYVGKFLLQIPRATIIYANISGHLCIAVEFASDHADSQKMWIKDGTSCGSNKVCRNQRCVSSSYLGYDCTTDKCNDRGVCNNKKHCHCSASYLPPDCSVQSDLWPGGSIDSGNFPPVAIPARLPERRYIENIYHSKPMRWPFFLFIPFFIIFCVLIAIMVKVNFQRKKWRTEDYSSDEQPESESEPKG

SEQ ID NO: 2101 - protein, 1897 aa, Homo sapiens
MAQAAKQLKKIKDIEAQALQEQKEKEESNRKRRNRSRDRKKKADAATSFLRAARSGNLDKALDHLRNGVDINTCNQNGLNGLHLASKEGHVKMVVELLHKEIILETTTKKGNTALHIAALAGQDEVVRELVNYGANVNAQSQKGFTPLYMAAQENHLEVVKFLLENGANQNVATEDGFTPLAVALQQGHENVVAHLINYGTKGKVRLPALHIAARNDDTRTAAVLLQNDPNPDVLSKTGFTPLHIAAHYENLNVAQLLLNRGASVNFTPQNGITPLHIASRRGNVIMVRLLLDRGAQIETKTKDELTPLHCAARNGHVRISEILLDHGAPIQAKTKNGLSPIHMAAQGDHLDCVRLLLQYDAEIDDITLDHLTPLHVAAHCGHHRVAKVLLDKGAKPNSRALNGFTPLHIACKKNHVRVMELLLKTGASIDAVTESGLTPLHVASFMGHLPIVKNLLQRGASPNVSNVKVETPLHMAARAGHTEVAKYLLQNKAKVNAKAKDDQTPLHCAARIGHTNMVKLLLENNANPNLATTAGHTPLHIAAREGHVETVLALLEKEASQACMTKKGFTPLHVAAKYGKVRVAELLLERDAHPNAAGKNGLTPLHVAVHHNNLDIVKLLLPRGGSPHSPAWNGYTPLHIAAKQNQVEVARSLLQYGGSANAESVQGVTPLHLAAQEGHAEMVALLLSKQANGNLGNKSGLTPLHLVAQEGHVPVADVLIKHGVMVDATTRMGYTPLHVASHYGNIKLVKFLLQHQADVNAKTKLGYSPLHQAAQQGHTDIVTLLLKNGASPNEVSSDGTTPLAIAKRLGYISVTDVLKVVTDETSFVLVSDKHRMSFPETVDEILDVSEDEGTAHITIMGEELISFKAERRDSRDVDEEKELLDFVPKLDQVVESPAIPRIPCAMPETVVIRSEEQEQASKEYDEDSLIPSSPATETSDNISPVASPVHTGFLVSFMVDARGGSMRGSRHNGLRVVIPPRTCAAPTRITCRLVKPQKLSTPPPLAEEEGLASRIIALGPTGAQFLSPVIVEIPHFASHGRGDRELVVLRSENGSVWKEHRSRYGESYLDQILNGMDEELGSLEELEKKRVCRIITTDFPLYFVIMSRLCQDYDTIGPEGGSLKSKLVPLVQATFPENAVTKRVKLALQAQPVPDELVTKLLGNQATFSPIVTVEPRRRKFHRPIGLRIPLPPSWTDNPRDSGEGDTTSLRLLCSVIGGTDQAQWEDITGTTKLVYANECANFTTNVSARFWLSDCPRTAEAVNFATLLYKELTAVPYMAKFVIFAKMNDPREGRLRCYCMTDDKVDKTLEQHENFVEVARSRDIEVLEGMSLFAELSGNLVPVKKAAQQRSFHFQSFRENRLAMPVKVRDSSREPGGSLSFLRKAMKYEDTQHILCHLNITMPPCAKGSGAEDRRRTPTPLALRYSILSESTPGSLSGTEQAEMKMAVISEHLGLSWAELARELQFSVEDINRIRVENPNSLLEQSVALLNLWVIREGQNANMENLYTALQSIDRGEIVNMLEGSGRQSRNLKPDRRHTDRDYSLSPSQMNGYSSLQDELLSPASLGCALSSPLRADQYWNEVAVLDAIPLAATEHDTMLEMSDMQVWSAGLTPSLVTAEDSSLECSKAEDSDATGHEWKLEGALSEEPRGPELGSLELVEDDTVDSDATNGLIDLLEQEEGQRSEEKLPGSKRQDDATGAGQDSENEVSLVSGHQRGQARITHSPTVSQVTERSQDRLQDWDADGSIVSYLQDAAQGSWQEEVTQGPHSFQGTSTMTEGLEPGGSQEYEKVLVSVSEHTWTEQPEAESSQADRDRRQQGQEEQVQEAKNTFTQVVQGNEFQNIPGEQVTEEQFTDEQGNIVTKKIIRKVVRQIDLSSADAAQEHEEDHTSTPNP

SEQ ID NO: 2102 - protein, 2004 aa, Homo sapiens
MVKLANPLYTEWILEAIKKVKKQKQRPSEERICNAVSSSHGLDRKTVLEQLELSVKDGTILKVSNKGLNSYKDPDNPGRIALPKPRNHGKLDNKQNVDWNKLIKRAVEGLAESGGSTLKSIERFLKGQKDVSALFGGSAASGFHQQLRLAIKRAIGHGRLLKDGPLYRLNTKATNVDGKESCESLSCLPPVSLLPHEKDKPVAEPIPICSFCLGTKEQNREKKPEELISCADCGNSGHPSCLKFSPELTVRVKALRWQCIECKTCSSCRDQGKNADNMLFCDSCDRGFHMECCDPPLTRMPKGMWICQICRPRKKGRKLLQKKAAQIKRRYTNPIGRPKNRLKKQNTVSKGPFSKVRTGPGRGRKRKITLSSQSASSSSEEGYLERIDGLDFCRDSNVSLKFNKKTKGLIDGLTKFFTPSPDGRKARGEVVDYSEQYRIRKRGNRKSSTSDWPTDNQDGWDGKQENEERLFGSQEIMTEKDMELFRDIQEQALQKVGVTGPPDPQVRCPSVIEFGKYEIHTWYSSPYPQEYSRLPKLYLCEFCLKYMKSRTILQQHMKKCGWFHPPANEIYRKNNISVFEVDGNVSTIYCQNLCLLAKLFLDHKTLYYDVEPFLFYVLTQNDVKGCHLVGYFSKEKHCQQKYNVSCIMILPQYQRKGYGRFLIDFSYLLSKREGQAGSPEKPLSDLGRLSYMAYWKSVILECLYHQNDKQISIKKLSKLTGICPQDITSTLHHLRMLDFRSDQFVIIRREKLIQDHMAKLQLNLRPVDVDPECLRWTPVIVSNSVVSEEEEEEAEEGENEEPQCQERELEISVGKSVSHENKEQDSYSVESEKKPEVMAPVSSTRLSKQVLPHDSLPANSQPSRRGRWGRKNRKTQERFGDKDSKLLLEETSSAPQEQYGECGEKSEATQEQYTESEEQLVASEEQPSQDGKPDLPKRRLSEGVEPWRGQLKKSPEALKCRLTEGSERLPRRYSEGDRAVLRGFSESSEEEEEPESPRSSSPPILTKPTLKRKKPFLHRRRRVRKRKHHNSSVVTETISETTEVLDEPFEDSDSERPMPRLEPTFEIDEEEEEEDENELFPREYFRRLSSQDVLRCQSSSKRKSKDEEEDEESDDADDTPILKPVSLLRKRDVKNSPLEPDTSTPLKKKKGWPKGKSRKPIHWKKRPGRKPGFKLSREIMPVSTQACVIEPIVSIPKAGRKPKIQESEETVEPKEDMPLPEERKEEEEMQAEAEEAEEGEEEDAASSEVPAASPADSSNSPETETKEPEVEEEEEKPRVSEEQRQSEEEQQELEEPEPEEEEDAAAETAQNDDHDADDEDDGHLESTKKKELEEQPTREDVKEEPGVQESFLDANMQKSREKIKDKEETELDSEEEQPSHDTSVVSEQMAGSEDDHEEDSHTKEELIELKEEEEIPHSELDLETVQAVQSLTQEESSEHEGAYQDCEETLAACQTLQSYTQADEDPQMSMVEDCHASEHNSPISSVQSHPSQSVRSVSSPNVPALESGYTQISPEQGSLSAPSMQNMETSPMMDVPSVSDHSQQVVDSGFSDLGSIESTTENYENPSSYDSTMGGSICGNSSSQSSCSYGGLSSSSSLTQSSCVVTQQMASMGSSCSMMQQSSVQPAANCSIKSPQSCVVERPPSNQQQQPPPPPPQQPQPPPPQPQPAPQPPPPQQQPQQQPQPQPQQPPPPPPPQQQPPLSQCSMNNSFTPAPMIMEIPESGSTGNISIYERIPGDFGAGSYSQPSATFSLAKLQQLTNTIMDPHAMPYSHSPAVTSYATSVSLSNTGLAQLAPSHPLAGTPQAQATMTPPPNLASTTMNLTSPLLQCNMSATNIGIPHTQRLQGQMPVKGHISIRSKSAPLPSAAAHQQQLYGRSPSAVAMQAGPRALAVQRGMNMGVNLMPTPAYNVNSMNMNTLNAMNSYRMTQPMMNSSYHSNPAYMNQTAQYPMQMQMGMMGSQAYTQQPMQPNPHGNMMYTGPSHHSYMNAAGVPKQSLNGPYMRR

SEQ ID NO: 2103 - protein, 317 aa, Homo sapiens
MKSDCMQTTICQERKKDPIEMFHSGQLVKVCAPMVRYSKLAFRTLVRKYSCDLCYTPMIVAADFVKSIKARDSEFTTNQGDCPLIVQFAANDARLLSDAARIVCPYANGIDINCGCPQRWAMAEGYGACLINKPELVQDMVKQVRNQVETPGFSVSIKIRIHDDLKRTVDLCQKAEATGVSWITVHGRTAEERHQPVHYDSIKIIKENMSIPVIANGDIRSLKEAENVWRITGTDGVMVARGLLANPAMFAGYEETPLKCIWDWVDIALELGTPYMCFHQHLMYMMEKITSRQEKRVFNALSSTSAIIDYLTDHYGI

SEQ ID NO: 2104 - protein, 1286 aa, Homo sapiens
MDLEAAKNGTAWRPTSAEGDFELGISSKQKRKKTKTVKMIGVLTLFRYSDWQDKLFMSLGTIMAIAHGSGLPLMMIVFGEMTDKFVDTAGNFSFPVNFSLSLLNPGKILEEEMTRYAYYYSGLGAGVLVAAYIQVSFWTLAAGRQIRKIRQKFFHAILRQEIGWFDINDTTELNTRLTDDISKISEGIGDKVGMFFQAVATFFAGFIVGFIRGWKLTLVIMAISPILGLSAAVWAKILSAFSDKELAAYAKAGAVAEEALGAIRTVIAFGGQNKELERYQKHLENAKEIGIKKAISANISMGIAFLLIYASYALAFWYGSTLVISKEYTIGNAMTVFFSILIGAFSVGQAAPCIDAFANARGAAYVIFDIIDNNPKIDSFSERGHKPDSIKGNLEFNDVHFSYPSRANVKILKGLNLKVQSGQTVALVGSSGCGKSTTVQLIQRLYDPDEGTINIDGQDIRNFNVNYLREIIGVVSQEPVLFSTTIAENICYGRGNVTMDEIKKAVKEANAYEFIMKLPQKFDTLVGERGAQLSGGQKQRIAIARALVRNPKILLLDEATSALDTESEAEVQAALDKAREGRTTIVIAHRLSTVRNADVIAGFEDGVIVEQGSHSELMKKEGVYFKLVNMQTSGSQIQSEEFELNDEKAATRMAPNGWKSRLFRHSTQKNLKNSQMCQKSLDVETDGLEANVPPVSFLKVLKLNKTEWPYFVVGTVCAIANGGLQPAFSVIFSEIIAIFGPGDDAVKQQKCNIFSLIFLFLGIISFFTFFLQGFTFGKAGEILTRRLRSMAFKAMLRQDMSWFDDHKNSTGALSTRLATDAAQVQGATGTRLALIAQNIANLGTGIIISFIYGWQLTLLLLAVVPIIAVSGIVEMKLLAGNAKRDKKELEAAGKIATEAIENIRTVVSLTQERKFESMYVEKLYGPYRNSVQKAHIYGITFSISQAFMYFSYAGCFRFGAYLIVNGHMRFRDVILVFSAIVFGAVALGHASSFAPDYAKAKLSAAHLFMLFERQPLIDSYSEEGLKPDKFEGNITFNEVVFNYPTRANVPVLQGLSLEVKKGQTLALVGSSGCGKSTVVQLLERFYDPLAGTVFVDFGFQLLDGQEAKKLNVQWLRAQLGIVSQEPILFDCSIAENIAYGDNSRVVSQDEIVSAAKAANIHPFIETLPHKYETRVGDKGTQLSGGQKQRIAIARALIRQPQILLLDEATSALDTESEKVVQEALDKAREGRTCIVIAHRLSTIQNADLIVVFQNGRVKEHGTHQQLLAQKGIYFSMVSVQAGTQNL

SEQ ID NO: 2105 - protein, 1280 aa, Homo sapiens
MDLEGDRNGGAKKKNFFKLNNKSEKDKKEKKPTVSVFSMFRYSNWLDKLYMVVGTLAAIIHGAGLPLMMLVFGEMTDIFANAGNLEDLMSNITNRSDINDTGFFMNLEEDMTRYAYYYSGIGAGVLVAAYIQVSFWCLAAGRQIHKIRKQFFHAIMRQEIGWFDVHDVGELNTRLTDDVSKINEGIGDKIGMFFQSMATFFTGFIVGFTRGWKLTLVILAISPVLGLSAAVWAKILSSFTDKELLAYAKAGAVAEEVLAAIRTVIAFGGQKKELERYNKNLEEAKRIGIKKAITANISIGAAFLLIYASYALAFWYGTTLVLSGEYSIGQVLTVFFSVLIGAFSVGQASPSIEAFANARGAAYEIFKIIDNKPSIDSYSKSGHKPDNIKGNLEFRNVHFSYPSRKEVKILKGLNLKVQSGQTVALVGNSGCGKSTTVQLMQRLYDPTEGMVSVDGQDIRTINVRFLREIIGVVSQEPVLFATTIAENIRYGRENVTMDEIEKAVKEANAYDFIMKLPHKFDTLVGERGAQLSGGQKQRIAIARALVRNPKILLLDEATSALDTESEAVVQVALDKARKGRTTIVIAHRLSTVRNADVIAGFDDGVIVEKGNHDELMKEKGIYFKLVTMQTAGNEVELENAADESKSEIDALEMSSNDSRSSLIRKRSTRRSVRGSQAQDRKLSTKEALDESIPPVSFWRIMKLNLTEWPYFVVGVFCAIINGGLQPAFAIIFSKIIGVFTRIDDPETKRQNSNLFSLLFLALGIISFITFFLQGFTFGKAGEILTKRLRYMVFRSMLRQDVSWFDDPKNTTGALTTRLANDAAQVKGAIGSRLAVITQNIANLGTGIIISFIYGWQLTLLLLAIVPIIAIAGVVEMKMLSGQALKDKKELEGSGKIATEAIENFRTVVSLTQEQKFEHMYAQSLQVPYRNSLRKAHIFGITFSFTQAMMYFSYAGCFRFGAYLVAHKLMSFEDVLLVFSAVVFGAMAVGQVSSFAPDYAKAKISAAHIIMIIEKTPLIDSYSTEGLMPNTLEGNVTFGEVVFNYPTRPDIPVLQGLSLEVKKGQTLALVGSSGCGKSTVVQLLERFYDPLAGKVLLDGKEIKRLNVQWLRAHLGIVSQEPILFDCSIAENIAYGDNSRVVSQEEIVRAAKEANIHAFIESLPNKYSTKVGDKGTQLSGGQKQRIAIARALVRQPHILLLDEATSALDTESEKVVQEALDKAREGRTCIVIAHRLSTIQNADLIVVFQNGRVKEHGTHQQLLAQKGIYFSMVSVQAGTKRQ

SEQ ID NO: 2106 - protein, 906 aa, Homo sapiens
MQAAVAVSVPFLLLCVLGTCPPARCGQAGDASLMELEKRKENRFVERQSIVPLRLIYRSGGEDESRHDALDTRVRGDLGGPQLTHVDQASFQVDAFGTSFILDVVLNHDLLSSEYIERHIEHGGKTVEVKGGEHCYYQGHIRGNPDSFVALSTCHGLHGMFYDGNHTYLIEPEENDTTQEDFHFHSVYKSRLFEFSLDDLPSEFQQVNITPSKFILKPRPKRSKRQLRRYPRNVEEETKYIELMIVNDHLMFKKHRLSVVHTNTYAKSVVNMADLIYKDQLKTRIVLVAMETWATDNKFAISENPLITLREFMKYRRDFIKEKSDAVHLFSGSQFESSRSGAAYIGGICSLLKGGGVNEFGKTDLMAVTLAQSLAHNIGIISDKRKLASGECKCEDTWSGCIMGDTGYYLPKKFTQCNIEEYHDFLNSGGGACLFNKPSKLLDPPECGNGFIETGEECDCGTPAECVLEGAECCKKCTLTQDSQCSDGLCCKKCKFQPMGTVCREAVNDCDIRETCSGNSSQCAPNIHKMDGYSCDGVQGICFGGRCKTRDRQCKYIWGQKVTASDKYCYEKLNIEGTEKGNCGKDKDTWIQCNKRDVLCGYLLCTNIGNIPRLGELDGEITSTLVVQQGRTLNCSGGHVKLEEDVDLGYVEDGTPCGPQMMCLEHRCLPVASFNFSTCLSSKEGTICSGNGVCSNELKCVCNRHWIGSDCNTYFPHNDDAKTGITLSGNGVAGTNIIIGIIAGTILVLALILGITAWGYKNYREQRQLPQGDYVKKPGDGDSFYSDIPPGVSTNSASSSKKRSNGLSHSWSERIPDTKHISDICENGRPRSNSWQGNLGGNKKKIRGKRFRPRSNSTETLSPAKSPSSSTGSIASSRKYPYPMPPLPDEDKKVNRQSARLWETSI

SEQ ID NO: 2107 - protein, 367 aa, Homo sapiens
MASSGGELGSLFDHHVQRAVCDTRAKYREGRRPRAVKVYTINLESQYLLIQGVPAVGVMKELVERFALYGAIEQYNALDEYPAEDFTEVYLIKFMNLQSARTAKRKMDEQSFFGGLLHVCYAPEFETVEETRKKLQMRKAYVVKTTENKDHYVTKKKLVTEHKDTEDFRQDFHSEMSGFCKAALNTSAGNSNPYLPYSCELPLCYFSSKCMCSSGGPVDRAPDSSKDGRNHHKTMGHYNHNDSLRKTQINSLKNSVACPGAQKAITSSEAVDRFMPRTTQLQERKRRREDDRKLGTFLQTNPTGNEIMIGPLLPDISKVDMHDDSLNTTANLIRHKLKEVISSVPKPPEDKPEDVHTSHPLKQRRRI

SEQ ID NO: 2108 - protein, 451 aa, Homo sapiens
MHGYFGCNAAAEPGYSAFVGTPQICVTKMSTRNCQGMDSVIKPLDTIPEDKKVRVQRTQSTFDPFEKPANQVKRVHSENNACINFKTSSTGKESPKVRRHSSPSSPTSPKFGKADSYEKLEKLGEGSYATVYKGKSKVNGKLVALKVIRLQEEEGTPFTAIREASLLKGLKHANIVLLHDIIHTKETLTLVFEYVHTDLCQYMDKHPGGLHPDNVKLFLFQLLRGLSYIHQRYILHRDLKPQNLLISDTGELKLADFGLARAKSVPSHTYSNEVVTLWYRPPDVLLGSTEYSTCLDMWGVGCIFVEMIQGVAAFPGMKDIQDQLERIFLVLGTPNEDTWPGVHSLPHFKPERFTLYSSKNLRQAWNKLSYVNHAEDLASKLLQCSPKNRLSAQAALSHEYFSDLPPRLWELTDMSSIFTVPNVRLQPEAGESMRAFGKNNSYGKSLSNSKH

SEQ ID NO: 2109 - protein, 1089 aa, Homo sapiens
MGNTTTKFRKALINGDENLACQIYENNPQLKESLDPNTSYGEPYQHNTPLHYAARHGMNKILGTFLGRDGNPNKRNVHNETSMHLLCMGPQIMISEGALHPRLARPTEDDFRRADCLQMILKWKGAKLDQGEYERAAIDAVDNKKNTPLHYAAASGMKACVELLVKHGGDLFAENENKDTPCDCAEKQHHKDLALNLESQMVFSRDPEAEEIEAEYAALDKREPYEGLRPQDLRRLKDMLIVETADMLQAPLFTAEALLRAHDWDREKLLEAWMSNPENCCQRSGVQMPTPPPSGYNAWDTLPSPRTPRTTRSSVTSPDEISLSPGDLDTSLCDICMCSISVFEDPVDMPCGHDFCRGCWESFLNLKIQEGEAHNIFCPAYDCFQLVPVDIIESVVSKEMDKRYLQFDIKAFVENNPAIKWCPTPGCDRAVRLTKQGSNTSGSDTLSFPLLRAPAVDCGKGHLFCWECLGEAHEPCDCQTWKNWLQKITEMKPEELVGVSEAYEDAANCLWLLTNSKPCANCKSPIQKNEGCNHMQCAKCKYDFCWICLEEWKKHSSSTGGYYRCTRYEVIQHVEEQSKEMTVEAEKKHKRFQELDRFMHYYTRFKNHEHSYQLEQRLLKTAKEKMEQLSRALKETEGGCPDTTFIEDAVHVLLKTRRILKCSYPYGFFLEPKSTKKEIFELMQTDLEMVTEDLAQKVNRPYLRTPRHKIIKAACLVQQKRQEFLASVARGVAPADSPEAPRRSFAGGTWDWEYLGFASPEEYAEFQYRRRHRQRRRGDVHSLLSNPPDPDEPSESTLDIPEGGSSSRRPGTSVVSSASMSVLHSSSLRDYTPASRSENQDSLQALSSLDEDDPNILLAIQLSLQESGLALDEETRDFLSNEASLGAIGTSLPSRLDSVPRNTDSPRAALSSSELLELGDSLMRLGAENDPFSTDTLSSHPLSEARSDFCPSSSDPDSAGQDPNINDNLLGNIMAWFHDMNPQSIALIPPATTEISADSQLPCIKDGSEGVKDVELVLPEDSMFEDASVSEGRGTQIEENPLEENILAGEAASQAGDSGNEAANRGDGSDVSSQTPQTSSDWLEQVHLV

SEQ ID NO: 2110 - protein, 1124 aa, Homo sapiens
MDPFTEKLLERTRARRENLQRKMAERPTAAPRSMTHAKRARQPLSEASNQQPLSGGEEKSCTKPSPSKKRCSDNTEVEVSNLENKQPVESTSAKSCSPSPVSPQVQPQAADTISDSVAVPASLLGMRRGLNSRLEATAASSVKTRMQKLAEQRRRWDNDDMTDDIPESSLFSPMPSEEKAASPPRPLLSNASATPVGRRGRLANLAATICSWEDDVNHSFAKQNSVQEQPGTACLSKFSSASGASARINSSSVKQEATFCSQRDGDASLNKALSSSADDASLVNASISSSVKATSPVKSTTSITDAKSCEGQNPELLPKTPISPLKTGVSKPIVKSTLSQTVPSKGELSREICLQSQSKDKSTTPGGTGIKPFLERFGERCQEHSKESPARSTPHRTPIITPNTKAIQERLFKQDTSSSTTHLAQQLKQERQKELACLRGRFDKGNIWSAEKGGNSKSKQLETKQETHCQSTPLKKHQGVSKTQSLPVTEKVTENQIPAKNSSTEPKGFTECEMTKSSPLKITLFLEEDKSLKVTSDPKVEQKIEVIREIEMSVDDDDINSSKVINDLFSDVLEEGELDMEKSQEEMDQALAESSEEQEDALNISSMSLLAPLAQTVGVVSPESLVSTPRLELKDTSRSDESPKPGKFQRTRVPRAESGDSLGSEDRDLLYSIDAYRSQRFKETERPSIKQVIVRKEDVTSKLDEKNNAFPCQVNIKQKMQELNNEINMQQTVIYQASQALNCCVDEEHGKGSLEEAEAERLLLIATGKRTLLIDELNKLKNEGPQRKNKASPQSEFMPSKGSVTLSEIRLPLKADFVCSTVQKPDAANYYYLIILKAGAENMVATPLASTSNSLNGDALTFTTTFTLQDVSNDFEINIEVYSLVQKKDPSGLDKKKKTSKSKAITPKRLLTSITTKSNIHSSVMASPGGLSAVRTSNFALVGSYTLSLSSVGNTKFVLDKVPFLSSLEGHIYLKIKCQVNSSVEERGFLTIFEDVSGFGAWHRRWCVLSGNCISYWTYPDDEKRKNPIGRINLANCTSRQIEPANREFCARRNTFELITVRPQREDDRETLVSQCRDTLCVTKNWLSADTKEERDLWMQKLNQVLVDIRLWQPDACYKPIGKP

SEQ ID NO: 2111 - protein, 959 aa, Homo sapiens
MALLGKRCDVPTNGCGPDRWNSAFTRKDEIITSLVSALDSMCSALSKLNAEVACVAVHDESAFVVGTEKGRMFLNARKELQSDFLRFCRGPPWKDPEAEHPKKVQRGEGGGRSLPRSSLEHGSDVYLLRKMVEEVFDVLYSEALGRASVVPLPYERLLREPGLLAVQGLPEGLAFRRPAEYDPKALMAILEHSHRIRFKLKRPLEDGGRDSKALVELNGVSLIPKGSRDCGLHGQAPKVPPQDLPPTATSSSMASFLYSTALPNHAIRELKQEAPSCPLAPSDLGLSRPMPEPKATGAQDFSDCCGQKPTGPGGPLIQNVHASKRILFSIVHDKSEKWDAFIKETEDINTLRECVQILFNSRYAEALGLDHMVPVPYRKIACDPEAVEIVGIPDKIPFKRPCTYGVPKLKRILEERHSIHFIIKRMFDERIFTGNKFTKDTTKLEPASPPEDTSAEVSRATVLDLAGNARSDKGSMSEDCGPGTSGELGGLRPIKIEPEDLDIIQVTVPDPSPTSEEMTDSMPGHLPSEDSGYGMEMLTDKGLSEDARPEERPVEDSHGDVIRPLRKQVELLFNTRYAKAIGISEPVKVPYSKFLMHPEELFVVGLPEGISLRRPNCFGIAKLRKILEASNSIQFVIKRPELLTEGVKEPIMDSQGTASSLGFSPPALPPERDSGDPLVDESLKRQGFQENYDARLSRIDIANTLREQVQDLFNKKYGEALGIKYPVQVPYKRIKSNPGSVIIEGLPPGIPFRKPCTFGSQNLERILAVADKIKFTVTRPFQGLIPKPDEDDANRLGEKVILREQVKELFNEKYGEALGLNRPVLVPYKLIRDSPDAVEVTGLPDDIPFRNPNTYDIHRLEKILKAREHVRMVIINQLQPFAEICNDAKVPAKDSSIPKRKRKRVSEGNSVSSSSSSSSSSSSNPDSVASANQISLVQWPMYMVDYAGLNVQLPGPLNY

SEQ ID NO: 2112 - protein, 775 aa, Homo sapiens
MLQGLLPVSLLLSVAVSAIKELPGVKKYEVVYPIRLHPLHKREAKEPEQQEQFETELKYKMTINGKIAVLYLKKNKNLLAPGYTETYYNSTGKEITTSPQIMDDCYYQGHILNEKVSDASISTCRGLRGYFSQGDQRYFIEPLSPIHRDGQEHALFKYNPDEKNYDSTCGMDGVLWAHDLQQNIALPATKLVKLKDRKVQEHEKYIEYYLVLDNGEFKRYNENQDEIRKRVFEMANYVNMLYKKLNTHVALVGMEIWTDKDKIKITPNASFTLENFSKWRGSVLSRRKRHDIAQLITATELAGTTVGLAFMSTMCSPYSVGVVQDHSDNLLRVAGTMAHEMGHNFGMFHDDYSCKCPSTICVMDKALSFYIPTDFSSCSRLSYDKFFEDKLSNCLFNAPLPTDIISTPICGNQLVEMGEDCDCGTSEECTNICCDAKTCKIKATFQCALGECCEKCQFKKAGMVCRPAKDECDLPEMCNGKSGNCPDDRFQVNGFPCHHGKGHCLMGTCPTLQEQCTELWGPGTEVADKSCYNRNEGGSKYGYCRRVDDTLIPCKANDTMCGKLFCQGGSDNLPWKGRIVTFLTCKTFDPEDTSQEIGMVANGTKCGDNKVCINAECVDIEKAYKSTNCSSKCKGHAVCDHELQCQCEEGWIPPDCDDSSVVFHFSIVVGVLFPMAVIFVVVAMVIRHQSSREKQKKDQRPLSTTGTRPHKQKRKPQMVKAVQPQEMSQMKPHVYDLPVEGNEPPASFHKDTNALPPTVFKDNPVSTPKDSNPKA

SEQ ID NO: 2113 - protein, 1590 aa, Homo sapiens
MSTPTDPGAMPHPGPSPGPGPSPGPILGPSPGPGPSPGSVHSMMGPSPGPPSVSHPMPTMGSTDFPQEGMHQMHKPIDGIHDKGIVEDIHCGSMKGTGMRPPHPGMGPPQSPMDQHSQGYMSPHPSPLGAPEHVSSPMSGGGPTPPQMPPSQPGALIPGDPQAMSQPNRGPSPFSPVQLHQLRAQILAYKMLARGQPLPETLQLAVQGKRTLPGLQQQQQQQQQQQQQQQQQQQQQQQPQQQPPQPQTQQQQQPALVNYNRPSGPGPELSGPSTPQKLPVPAPGGRPSPAPPAAAQPPAAAVPGPSVPQPAPGQPSPVLQLQQKQSRISPIQKPQGLDPVEILQEREYRLQARIAHRIQELENLPGSLPPDLRTKATVELKALRLLNFQRQLRQEVVACMRRDTTLETALNSKAYKRSKRQTLREARMTEKLEKQQKIEQERKRRQKHQEYLNSILQHAKDFKEYHRSVAGKIQKLSKAVATWHANTEREQKKETERIEKERMRRLMAEDEEGYRKLIDQKKDRRLAYLLQQTDEYVANLTNLVWEHKQAQAAKEKKKRRRRKKKAEENAEGGESALGPDGEPIDESSQMSDLPVKVTHTETGKVLFGPEAPKASQLDAWLEMNPGYEVAPRSDSEESDSDYEEEDEEEESSRQETEEKILLDPNSEEVSEKDAKQIIETAKQDVDDEYSMQYSARGSQSYYTVAHAISERVEKQSALLINGTLKHYQLQGLEWMVSLYNNNLNGILADEMGLGKTIQTIALITYLMEHKRLNGPYLIIVPLSTLSNWTYEFDKWAPSVVKISYKGTPAMRRSLVPQLRSGKFNVLLTTYEYIIKDKHILAKIRWKYMIVDEGHRMKNHHCKLTQVLNTHYVAPRRILLTGTPLQNKLPELWALLNFLLPTIFKSCSTFEQWFNAPFAMTGERVDLNEEETILIIRRLHKVLRPFLLRRLKKEVESQLPEKVEYVIKCDMSALQKILYRHMQAKGILLTDGSEKDKKGKGGAKTLMNTIMQLRKICNHPYMFQHIEESFAEHLGYSNGVINGAELYRASGKFELLDRILPKLRATNHRVLLFCQMTSLMTIMEDYFAFRNFLYLRLDGTTKSEDRAALLKKFNEPGSQYFIFLLSTRAGGLGLNLQAADTVVIFDSDWNPHQDLQAQDRAHRIGQQNEVRVLRLCTVNSVEEKILAAAKYKLNVDQKVIQAGMFDQKSSSHERRAFLQAILEHEEENEEEDEVPDDETLNQMIARREEEFDLFMRMDMDRRREDARNPKRKPRLMEEDELPSWIIKDDAEVERLTCEEEEEKIFGRGSRQRRDVDYSDALTEKQWLRAIEDGNLEEMEEEVRLKKRKRRRNVDKDPAKEDVEKAKKRRGRPPAEKLSPNPPKLTKQMNAIIDTVINYKDRCNVEKVPSNSQLEIEGNSSGRQLSEVFIQLPSRKELPEYYELIRKPVDFKKIKERIRNHKYRSLGDLEKDVMLLCHNAQTFNLEGSQIYEDSIVLQSVFKSARQKIAKEEESEDESNEEEEEEDEEESESEAKSVKVKIKLNKKDDKGRDKGKGKKRPNRGKAKPVVSDFDSDEEQDEREQSEGSGTDDE

SEQ ID NO: 2114 - protein, 493 aa, Homo sapiens
MLRTILDAPQRLLKEGRASRQLVLVVVFVALLLDNMLFTVVVPIVPTFLYDMEFKEVNSSLHLGHAGSSPHALASPAFSTIFSFFNNNTVAVEESVPSGIAWMNDTASTIPPPATEAISAHKNNCLQGTGFLEEEITRVGVLFASKAVMQLLVNPFVGPLTNRIGYHIPMFAGFVIMFLSTVMFAFSGTYTLLFVARTLQGIGSSFSSVAGLGMLASVYTDDHERGRAMGTALGGLALGLLVGAPFGSVMYEFVGKSAPFLILAFLALLDGALQLCILQPSKVSPESAKGTPLFMLLKDPYILVAAGLAFLPASVSYLIGTNLFGVLANKMGRWLCSLIGMLVVGTSLLCVPLAHNIFGLIGPNAGLGLAIGMVDSSMMPIMGHLVDLRHTSVYGSVYAIADVAFCMGFAIGPSTGGAIVKAIGFPWLMVITGVINIVYAPLCYYLRSPPAKEEKLAILSQDCPMETRMYATQKPTKEFPLGEDSDEEPDHEE

SEQ ID NO: 2115 - protein, 604 aa, Homo sapiens
MISVKRNTWRALSLVIGDCRKKGNFEYCQDRTEKHSTMPDSPVDVKTQSRLTPPTMPPPPTTQGAPRTSSFTPTTLTNGTSHSPTALNGAPSPPNGFSNGPSSSSSSSLANQQLPPACGARQLSKLKRFLTTLQQFGNDISPEIGERVRTLVLGLVNSTLTIEEFHSKLQEATNFPLRPFVIPFLKANLPLLQRELLHCARLAKQNPAQYLAQHEQLLLDASTTSPVDSSELLLDVNENGKRRTPDRTKENGFDREPLHSEHPSKRPCTISPGQRYSPNNGLSYQPNGLPHPTPPPPQHYRLDDMAIAHHYRDSYRHPSHRDLRDRNRPMGLHGTRQEEMIDHRLTDREWAEEWKHLDHLLNCIMDMVEKTRRSLTVLRRCQEADREELNYWIRRYSDAEDLKKGGGSSSSHSRQQSPVNPDPVALDAHREFLHRPASGYVPEEIWKKAEEAVNEVKRQAMTELQKAVSEAERKAHDMITTERAKMERTVAEAKRQAAEDALAVINQQEDSSESCWNCGRKASETCSGCNTARYCGSFCQHKDWEKHHHICGQTLQAQQQGDTPAVSSSVTPNSGAGSPMDTPPAATPRSTTPGTPSTIETTPR

SEQ ID NO: 2116 - protein, 498 aa, Homo sapiens
MDETEWIHRHPKAEDLRVGLISWAGTYLTFEACKNTVTATAKSLGRRQTWEILVSNEHETQAVVRLKSVQGLYLLCECDGTVCYGRPRTSHHGCFLLRFHRNSKWTLQCLISGRYLESNGKDVFCTSHVLSAYHMWTPRPALHVHVILYSPIHRCYARADPTMGRIWVDAAVPCLEECGFLLHFRDGCYHLETSTHHFLSHVDRLFSQPSSQTAFHMQVRPGGLVALCDGEGGMLYPQGTHLLLGMGCNPMRGEEWFILQHCPTWVSLRSKTGRFISVIYDGEVRAASERLNRMSLFQFECDSESPTVQLRSANGYYLSQRRHRAVMADGHPLESDTFFRMHWNCGRIILQSCRGRFLGIAPNSLLMANVILPGPNEEFGILFANRSFLVLRGRYGYVGSSSGHDLIQCNQDQPDRIHLLPCRPGIYHFQAQGGSFWSITSFGTFRPWGKFALNFCIELQGSNLLTVLAPNGFYMRADQSGTLLADSEDITRECIWEF

SEQ ID NO: 2117 - protein, 664 aa, Homo sapiens
MPLRDKYCQTDHHHHGCCEPVYILEPGDPPLLQQPLQTSKSGIQQIIECFRSGTKQLKHILLKDVDTIFECKLCRSLFRGLPNLITHKKFYCPPSLQMDDNLPDVNDKQSQAINDLLEAIYPSVDKREYIIKLEPIETNQNAVFQYISRTDNPIEVTESSSTPEQTEVQIQETSTEQSKTVPVTDTEVETVEPPPVEIVTDEVAPTSDEQPQESQADLETSDNSDFGHQLICCLCRKEFNSRRGVRRHIRKVHKKKMEELKKYIETRKNPNQSSKGRSKNVLVPLSRSCPVCCKSFATKANVRRHFDEVHRGLRRDSITPDIATKPGQPLFLDSISPKKSFKTRKQKSSSKAEYNLTACKCLLCKRKYSSQIMLKRHMQIVHKITLSGTNSKREKGPNNTANSSEIKVKVEPADSVESSPPSITHSPQNELKGTNHSNEKKNTPAAQKNKVKQDSESPKSTSPSAAGGQQKTRKPKLSAGFDFKQLYCKLCKRQFTSKQNLTKHIELHTDGNNIYVKFYKCPLCTYETRRKRDVIRHITVVHKKSSRYLGKITASLEIRAIKKPIDFVLNKVAKRGPSRDEAKHSDSKHDGTSNSPSKKYEVADVGIEVKVTKNFSLHRCNKCGKAFAKKTYLEHHKKTHKANASNSPEGNKTKGRSTRSKALV

SEQ ID NO: 2118 - protein, 334 aa, Homo sapiens
MKHFLRMLIQVCLYFYCKFLWRCLKFVMRKLTGRCELQRICYNTKPGASRTMKIETSLRDSKSKLLQTSVSVHPDAIEKTIEDIMELKKINPDVNPQLGISLQACLLQIVGYRNLIADVEKLRREAYDSDNPQHEEMLLKLWKFLKPNTPLESRISKQWCEIGFQGDDPKTDFRGMGLLGLYNLQYFAERDATAAQQVLSDSLHPKCRDITKEEISKFSKAEWEKKRMDKAIGYSFAIVGINITDLAYNLLVSGALKTHFYNIAPEAPTLSHFQQTFCYLMHEFHKFWIEEDPMDIMEFNRVREKFRKRIIKQLQNPDMALCPHFAASEGLINM

SEQ ID NO: 2119 - protein, 1989 aa, Homo sapiens
MTKVPPAFDFSFLNDEEARKILQVLERNEELQRAEKDRISKLQKTKRDIRWLQGVTGEWFEEIQRKKFCNETDVSQMLKQPLTYRLSKEMAKNDPIELPTSRSKNVTNQKKPTPFSSRMSFRSSFASLFSFRKSGKETSKLPSLGQKGCDGHAGPPMPVRGAAVQAKIYNSPLENHLVDSTFVPKPAVMREESGMPPPWDASLLENEFFQVLDDLDSKLAQEQSASSVNTRTPLNYGSRTQFGHFYSSGNRHGNITERHKKHYNETSNMSIYDILRPGTPREGFKTFSPRTSTIYDMYRTREPRVFKEDYVQKNTFGSTSLCFDSRQRSALPATGHFTARSLHFPATTQSKSGFIPPRHQQSPKRTPLSSIIWNRSDSSRDRENQEEFLRAPSPMEIDPADKYVYPRGFQENKRYESYHSQNVYQRVSLNAPMENAMSPDTFENSENMPFYHQSNTFTRSFFSNTFGRSGEQRRFGQGPFWGQEKGHSFWSDFHRSRKSFSSSDRDFEMISMEANSVSAIHGHNVSSEHWESFSSGYGTDVSRGQEEPHPWQFDFQRSTLDSMVVSHGNETQLTPHFGTPNVCSMTGSSYHVKSSELVSQQDSSPVEVHINKEASSFGIAQTLASSFKTSFSQISDDRRNPQSPNLQNPTVTLQKIFPNKPASHPMRSHTEVTVTSSNSVDSLPLAKSQPNILVTEVNNEKDLNESISEEDKQLSKMDQTNKAGEIPQPVSQTGISNSLPDFQNPLSQDSAKSNGFGFNASTIISSKKSPRVFSRKDTSKMYIPHTDKSNDIKQDKRFTENRKLGSTASLPFIQEHRTPPSFPRTDQGCHQELTVNNEDISRIITNNHWSSALTDTQNAQYSKCKLTPGHKTSCDSLDLSSAALPDSSPSKNSSLDAPVVPSTTVFSRRSPSDKDPSLGEREEKDNAGKNQKNQFIVSHSENQERNDSPVPTHDEVVDVKCHSHSPFRNERGKGKIRHHISCIEKLSKTESISVPTSDHRSLIEANQSNSKVSELDTIYCTLPRKSSSFLIHGRQSGSKIMAASLRNGPPPFQIKNNVEDAMGNYMLNKFSPSSPESANECSKVLSDSALEAPEATERMTNVKSSGSTSVRKGPLPFLINRAMSCPSGEPHASTGREGRKKPLTSGMDASELTPRAWERIISPVESDSSVRDCSLTKRQHQKENFQEYTEKEGKMAASRRSVFALSNEDPLPFCSDLSGKERGKTLHKVKTTSTFSVSGDEDNVKCLEVVSIYYTLPRKPSKKFCNLLQQYTQNTNLLIESPQVETETFPNALEKDKQNYSTREQSGTPSCENLKMSVNSDQTLTTENMTAFRLSNRGPLAPTLQEMASVEAAVSLPEEESKAREIFSDNLAKTPLGDSENKKERGKKLQSETLHTSLMLQRKNVSEEKSENCQQSINSSNSGPSSLPALSEVNIGNSQTRRSSWECTGSGRAIPFTGSGKCPQKDHTSTAVGDGSSGSQPREGRGDIGTNCQKMTNKTLSHSESQVFALTPALHKLQLGEETQSDEPNLESLQSEPRELPQRSQEANMTESRKAEDEMQKSAWDQPSLPEGNKNKTNLDDLVKGENRSSVKHRLAAMSKASRKFPAKDVSPRRHVATIFPQSGSRSGFDHLSLGTVECNPLFPEPTPKSAESIGESRLSENGKHVKKSENLLPITVLPNREPSTHVSNQKSNSISQRHQNEFKNVSESPSKHENSKDVTAAQNLVRESGAPSPITFTSLREAEFSDNQRRLSPPFPLEPAQKSRVSSPLASFLQQQRSASSLEWEPEPHLYRSKSLKSINVHGDLLRKSHPPKVRERHFSESTSIDNALSRLTLGNEFSVNNGYSRRFRSFSELPSCDGNESWAYRSGTKTGPRSAISIYRPIDYGIFGKEQQLAFLENVKRSLTQGRLWKPSFLKNPGFLKDDLRNPPNPSESLSSNSPSSQVPEDGLSPSEPLNIYEDDPVDSDCDTDTTTDDEYYLDENDKESEL

SEQ ID NO: 2120 - protein, 862 aa, Homo sapiens
MERAESSSTEPAKAIKPIDRKSVHQICSGQVVLSLSTAVKELVENSLDAGATNIDLKLKDYGVDLIEVSDNGCGVEEENFEGLTLKHHTSKIQEFADLTQVETFGFRGEALSSLCALSDVTISTCHASAKVGTRLMFDHNGKIIQKTPYPRPRGTTVSVQQLFSTLPVRHKEFQRNIKKEYAKMVQVLHAYCIISAGIRVSCTNQLGQGKRQPVVCTGGSPSIKENIGSVFGQKQLQSLIPFVQLPPSDSVCEEYGLSCSDALHNLFYISGFISQCTHGVGRSSTDRQFFFINRRPCDPAKVCRLVNEVYHMYNRHQYPFVVLNISVDSECVDINVTPDKRQILLQEEKLLLAVLKTSLIGMFDSDVNKLNVSQQPLLDVEGNLIKMHAADLEKPMVEKQDQSPSLRTGEEKKDVSISRLREAFSLRHTTENKPHSPKTPEPRRSPLGQKRGMLSSSTSGAISDKGVLRPQKEAVSSSHGPSDPTDRAEVEKDSGHGSTSVDSEGFSIPDTGSHCSSEYAASSPGDRGSQEHVDSQEKAPKTDDSFSDVDCHSNQEDTGCKFRVLPQPTNLATPNTKRFKKEEILSSSDICQKLVNTQDMSASQVDVAVKINKKVVPLDFSMSSLAKRIKQLHHEAQQSEGEQNYRKFRAKICPGENQAAEDELRKEISKTMFAEMEIIGQFNLGFIITKLNEDIFIVDQHATDEKYNFEMLQQHTVLQGQRLIAPQTLNLTAVNEAVLIENLEIFRKNGFDFVIDENAPVTERAKLISLPTSKNWTFGPQDVDELIFMLSDSPGVMCRPSRVKQMFASRACRKSVMIGTALNTSEMKKLITHMGEMDHPWNCPHGRPTMRHIANLGVISQN

SEQ ID NO: 2121 - protein, 718 aa, Homo sapiens
MEDLGENTMVLSTLRSLNNFISQRVEGGSGLDISTSAPGSLQMQYQQSMQLEERAEQIRSKSHLIQVEREKMQMELSHKRARVELERAASTSARNYEREVDRNQELLTRIRQLQEREAGAEEKMQEQLERNRQCQQNLDAASKRLREKEDSLAQAGETINALKGRISELQWSVMDQEMRVKRLESEKQELQEQLDLQHKKCQEANQKIQELQASQEARADHEQQIKDLEQKLSLQEQDAAIVKNMKSELVRLPRLERELKQLREESAHLREMRETNGLLQEELEGLQRKLGRQEKMQETLVGLELENERLLAKLQSWERLDQTMGLSIRTPEDLSRFVVELQQRELALKDKNSAVTSSARGLEKARQQLQEELRQVSGQLLEERKKRETHEALARRLQKRVLLLTKERDGMRAILGSYDSELTPAEYSPQLTRRMREAEDMVQKVHSHSAEMEAQLSQALEELGGQKQRADMLEMELKMLKSQSSSAEQSFLFSREEADTLRLKVEELEGERSRLEEEKRMLEAQLERRALQGDYDQSRTKVLHMSLNPTSVARQRLREDHSQLQAECERLRGLLRAMERGGTVPADLEAAAASLPSSKEVAELKKQVESAELKNQRLKEVFQTKIQEFRKACYTLTGYQIDITTENQYRLTSLYAEHPGDCLIFKATSPSGSKMQLLETEFSHTVGELIEVHLRRQDSIPAFLSSLTLELFSRQTVA

SEQ ID NO: 2122 - protein, 346 aa, Homo sapiens
MDWVMKHNGPNDASDGTVRLRGLPFGCSKEEIVQFFQGLEIVPNGITLTMDYQGRSTGEAFVQFASKEIAENALGKHKERIGHRYIEIFRSSRSEIKGFYDPPRRLLGQRPGPYDRPIGGRGGYYGAGRGSMYDRMRRGGDGYDGGYGGFDDYGGYNNYGYGNDGFDDRMRDGRGMGGHGYGGAGDASSGFHGGHFVHMRGLPFRATENDIANFFSPLNPIRVHIDIGADGRATGEADVEFVTHEDAVAAMSKDKNNMQHRYIELFLNSTPGGGSGMGGSGMGGYGRDGMDNQGGYGSVGRMGMGNNYSGGYGTPDGLGGYGRGGGGSGGYYGQGGMSGGGWRGMY

SEQ ID NO: 2123 - protein, 1150 aa, Homo sapiens
MAQFGGQKNPPWATQFTATAVSQPAALGVQQPSLLGASPTIYTQQTALAAAGLTTQTPANYQLTQTAALQQQAAAAAAALQQQYSQPQQALYSVQQQLQQPQQTLLTQPAVALPTSLSLSTPQPTAQITVSYPTPRSSQQQTQPQKQRVFTGVVTKLHDTFGFVDEDVFFQLSAVKGKTPQVGDRVLVEATYNPNMPFKWNAQRIQTLPNQNQSQTQPLLKTPPAVLQPIAPQTTFGVQTQPQPQSLLQAQISAASITPLLQTQPQPLLQQPQQKAGLLQPPVRIVSQPQPARRLDPPSRFSGRNDRGDQVPNRKDDRSRERERERRRSRERSPQRKRSRERSPRRERERSPRRVRRVVPRYTVQFSKFSLDCPSCDMMELRRRYQNLYIPSDFFDAQFTWVDAFPLSRPFQLGNYCNFYVMHREVESLEKNMAILDPPDADHLYSAKVMLMASPSMEDLYHKSCALAEDPQELRDGFQHPARLVKFLVGMKGKDEAMAIGGHWSPSLDGPDPEKDPSVLIKTAIRCCKALTGIDLSVCTQWYRFAEIRYHRPEETHKGRTVPAHVETVVLFFPDVWHCLPTRSEWETLSRGYKQQLVEKLQGERKEADGEQDEEEKDDGEAKEISTPTHWSKLDPKTMKVNDLRKELESRALSSKGLKSQLIARLTKQLKVEEQKEEQKELEKSEKEEDEDDDRKSEDDKEEEERKRQEEIERQRRERRYILPDEPAIIVHPNWAAKSGKFDCSIMSLSVLLDYRLEDNKEHSFEVSLFAELFNEMLQRDFGVRIYKSLLSLPEKEDKKEKDKKSKKDERKDKKEERDDETDEPKPKRRKSGDDKDKKEDRDERKKEDKRKDDSKDDDETEEDNNQDEYDPMEAEEAEDEEDDRDEEEMTKRDDKRDINRYCKERPSKDKEKEKTQMITINRDLLMAFVYFDQSHCGYLLEKDLEEILYTLGLHLSRAQVKKLLNKVVLRESCFYRKLTDTSKDEENHEESESLQEDMLGNRLLLPTPTVKQESKDVEENVGLIVYNGAMVDVGSLLQKLEKSEKVRAEVEQKLQLLEEKTDEDEKTILNLENSNKSLSGELREVKKDLSQLQENLKISENMNLQFENQMNKTIRNLSTVMDEIHTVLKKDNVKNEDKDQKSKENGASV

SEQ ID NO: 2124 - protein, 574 aa, Homo sapiens
MWTFLGIATFTYFYKKFGDFITLANREVLLCVLVFLSLGLVLSYRCRHRNGGLLGRQQSGSQFALFSDILSGLPFIGFFWAKSPPESENKEQLEARRRRKGTNISETSLIGTAACTSTSSQNDPEVIIVGAGVLGSALAAVLSRDGRKVTVIERDLKEPDRIVGEFLQPGGYHVLKDLGLGDTVEGLDAQVVNGYMIHDQESKSEVQIPYPLSENNQVQSGRAFHHGRFIMSLRKAAMAEPNAKFIEGVVLQLLEEDDVVMGVQYKDKETGDIKELHAPLTVVADGLFSKFRKSLVSNKVSVSSHFVGFLMKNAPQFKANHAELILANPSPVLIYQISSSETRVLVDIRGEMPRNLREYMVEKIYPQIPDHLKEPFLEATDNSHLRSMPASFLPPSSVKKRGVLLLGDAYNMRHPLTGGGMTVAFKDIKLWRKLLKGIPDLYDDAAIFEAKKSFYWARKTSHSFVVNILAQALYELFSATDDSLHQLRKACFLYFKLGGECVAGPVGLLSVLSPNPLVLIGHFFAVAIYAVYFCFKSEPWITKPRALLSSGAVLYKACSVIFPLIYSEMKYMVH

SEQ ID NO: 2125 - protein, 992 aa, Homo sapiens
MKTETVPPFQETPAGSSCHLNNLLSSRKLMAVGVLLGWLLVIHLLVNVWLLCLLSALLVVLGGWLGSSLAGVASGRLHLERFIPLATCPPCPEAERQLEREINRTIQMIIRDFVLSWYRSVSQEPAFEEEMEAAMKGLVQELRRRMSVMDSHAVAQSVLTLCGCHLQSYIQAKEATAGKNGPVEPSHLWEAYCRATAPHPAVHSPSAEVTYTRGVVNLLLQGLVPKPHLETRTGRHVVVELITCNVILPLISRLSDPDWIHLVLVGIFSKARDPAPCPASAPEQPSVPTSLPLIAEVEQLPEGRASPVAAPVFLSYSEPEGSAGPSPEVEEGHEAVEGDLGGMCEERKVGNNSSHFLQPNVRGPLFLCEDSELESPLSELGKETIMLMTPGSFLSDRIQDALCALESSQALEPKDGEASEGAEAEEGPGTETETGLPVSTLNSCPEIHIDTADKEIEQGDVTASVTALLEGPEKTCPSRPSCLEKDLTNDVSSLDPTLPPVLLSSSPPGPLSSATFSFEPLSSPDGPVIIQNLRITGTITAREHSGTGFHPYTLYTVKYETALDGENSSGLQQLAYHTVNRRYREFLNLQTRLEEKPDLRKFIKNVKGPKKLFPDLPLGNMDSDRVEARKSLLESFLKQLCAIPEIANSEEVQEFLALNTDARIAFVKKPFMVSRIDKMVVSAIVDTLKTAFPRSEPQSPTEELSEAETESKPQTEGKKASKSRLRFSSSKISPALSVTEAQDKILYCLQEGNVESETLSMSAMESFIEKQTKLLEMQPTKAPEKDPEQPPKGRVDSCVSDAAVPAQDPSNSDPGTETELADTALDLLLLLLTEQWKWLCTENMQKFLRLIFGTLVQRWLEVQVANLTSPQRWVQYLLLLQESIWPGGVLPKFPRPVRTQEQKLAAEKQALQSLMGVLPDLVVEILGVNKCRLSWGLVLESLQQPLINRHLIYCLGDIILEFLDLSASVEESAATTSASDTPGNSKRMGVSS

SEQ ID NO: 2126 - protein, 761 aa, Homo sapiens
MNWRFVELLYFLFIWGRISVQPSHQEPAGTDQHVSKEFDWLISDRGPFHHSRSYLSFVERHRQGFTTRYKIYREFARWKVRNTAIERRDLVRHPVPLMPEFQRSIRLLGRRPTTQQFIDTIIKKYGTHLLISATLGGEEALTMYMDKSRLDRKSGNATQSVEALHQLASSYFVDRDGTMRRLHEIQISTGAIKVTETRTGPLGCNSYDNLDSVSSVLLQSTESKLHLQGLQIIFPQYLQEKFVQSALSYIMCNGEGEYLCQNSQCRCQCAEEFPQCNCPITDIQIMEYTLANMAKSWAEAYKDLENSDEFKSFMKRLPSNHFLTIGSIHQHWGNDWDLQNRYKLLQSATEAQRQKIQRTARKLFGLSVRCRHNPNHQLPRERTIQQWLARVQSLLYCNENGFWGTFLESQRSCVCHGSTTLCQRPIPCVIGGNNSCAMCSLANISLCGSCNKGYKLYRGRCEPQNVDSERSEQFISFETDLDFQDLELKYLLQKMDSRLYVHTTFISNEIRLDTFFDPRWRKRMSLTLKSNKNRMDFIHMVIGMSMRICQMRNSSLDPMFFVYVNPFSGSHSEGWNMPFGEFGYPRWEKIRLQNSQCYNWTLLLGNRWKTFFETVHIYLRSRTRLPTLLRNETGQGPVDLSDPSKRQFYIKISDVQVFGYSLRFNADLLRSAVQQVNQSYTQGGQFYSSSSVMLLLLDIRDRINRLAPPVAPGKPQLDLFSCMLKHRLKLTNSEIIRVNHALDLYNTEILKQSDQMTAKLC

SEQ ID NO: 2127 - protein, 194 aa, Homo sapiens
MPNWGGGAKCGACEKTVYHAEEIQCNGRSFHKTCFHCMACRKALDSTTVAAHESEIYCKVCYGRRYGPKGIGYGQGAGCLSTDTGEHLGLQFQQSPKPARSVTTSNPSKFTAKFGESEKCPRCGKSVYAAEKVMGGGKPWHKTCFRCAICGKSLESTNVTDKDGELYCKVCYAKNFGPTGIGFGGLTQQVEKKE

SEQ ID NO: 2128 - protein, 585 aa, Homo sapiens
MGQGDESERIVINVGGTRHQTYRSTLRTLPGTRLAWLAEPDAHSHFDYDPRADEFFFDRHPGVFAHILNYYRTGKLHCPADVCGPLYEEELAFWGIDETDVEPCCWMTYRQHRDAEEALDSFGGAPLDNSADDADADGPGDSGDGEDELEMTKRLALSDSPDGRPGGFWRRWQPRIWALFEDPYSSRYARYVAFASLFFILVSITTFCLETHERFNPIVNKTEIENVRNGTQVRYYREAETEAFLTYIEGVCVVWFTFEFLMRVIFCPNKVEFIKNSLNIIDFVAILPFYLEVGLSGLSSKAAKDVLGFLRVVRFVRILRIFKLTRHFVGLRVLGHTLRASTNEFLLLIIFLALGVLIFATMIYYAERIGAQPNDPSASEHTHFKNIPIGFWWAVVTMTTLGYGDMYPQTWSGMLVGALCALAGVLTIAMPVPVIVNNFGMYYSLAMAKQKLPKKKKKHIPRPPQLGSPNYCKSVVNSPHHSTQSDTCPLAQEEILEINRADSKLNGEVAKAALANEDCPHIDQALTPDEGLPFTRSGTRERYGPCFLLSTGEYACPPGGGMRKDLCKESPVIAKYMPTEAVRVT

SEQ ID NO: 2129 - protein, 1686 aa, Homo sapiens
MAQISSNSGFKECPSSHPEPTRAKDVDKEEALQMEAEALAKLQKDRQVTDNQRGFELSSSTRKKAQVYNKQDYDLMVFPESDSQKRALDIDVEKLTQAELEKLLLDDSFETKKTPVLPVTPILSPSFSAQLYFRPTIQRGQWPPGLPGPSTYALPSIYPSTYSKQAAFQNGFNPRMPTFPSTEPIYLSLPGQSPYFSYPLTPATPFHPQGSLPIYRPVVSTDMAKLFDKIASTSEFLKNGKARTDLEITDSKVSNLQVSPKSEDISKFDWLDLDPLSKPKVDNVEVLDHEEEKNVSSLLAKDPWDAVLLEERSTANCHLERKVNGKSLSVATVTRSQSLNIRTTQLAKAQGHISQKDPNGTSSLPTGSSLLQEVEVQNEEMAAFCRSITKLKTKFPYTNHRTNPGYLLSPVTAQRNICGENASVKVSIDIEGFQLPVTFTCDVSSTVEIIIMQALCWVHDDLNQVDVGSYVLKVCGQEEVLQNNHCLGSHEHIQNCRKWDTEIRLQLLTFSAMCQNLARTAEDDETPVDLNKHLYQIEKPCKEAMTRHPVEELLDSYHNQVELALQIENQHRAVDQVIKAVRKICSALDGVETLAITESVKKLKRAVNLPRSKTADVTSLFGGEDTSRSSTRGSLNPENPVQVSINQLTAAIYDLLRLHANSGRSPTDCAQSSKSVKEAWTTTEQLQFTIFAAHGISSNWVSNYEKYYLICSLSHNGKDLFKPIQSKKVGTYKNFFYLIKWDELIIFPIQISQLPLESVLHLTLFGILNQSSGSSPDSNKQRKGPEALGKVSLPLFDFKRFLTCGTKLLYLWTSSHTNSVPGTVTKKGYVMERIVLQVDFPSPAFDIIYTTPQVDRSIIQQHNLETLENDIKGKLLDILHKDSSLGLSKEDKAFLWEKRYYCFKHPNCLPKILASAPNWKWVNLAKTYSLLHQWPALYPLIALELLDSKFADQEVRSLAVTWIEAISDDELTDLLPQFVQALKYEIYLNSSLVQFLLSRALGNIQIAHNLYWLLKDALHDVQFSTRYEHVLGALLSVGGKRLREELLKQTKLVQLLGGVAEKVRQASGSARQVVLQRSMERVQSFFQKNKCRLPLKPSLVAKELNIKSCSFFSSNAVPLKVTMVNADPMGEEINVMFKVGEDLRQDMLALQMIKIMDKIWLKEGLDLRMVIFKCLSTGRDRGMVELVPASDTLRKIQVEYGVTGSFKDKPLAEWLRKYNPSEEEYEKASENFIYSCAGCCVATYVLGICDRHNDNIMLRSTGHMFHIDFGKFLGHAQMFGSFKRDRAPFVLTSDMAYVINGGEKPTIRFQLFVDLCCQAYNLIRKQTNLFLNLLSLMIPSGLPELTSIQDLKYVRDALQPQTTDAEATIFFTRLIESSLGSIATKFNFFIHNLAQLRFSGLPSNDEPILSFSPKTYSFRQDGRIKEVSVFTYHKKYNPDKHYIYVVRILREGQIEPSFVFRTFDEFQELHNKLSIIFPLWKLPGFPNRMVLGRTHIKDVAAKRKIELNSYLQSLMNASTDVAECDLVCTFFHPLLRDEKAEGIARSADAGSFSPTPGQIGGAVKLSISYRNGTLFIMVMHIKDLVTEDGADPNPYVKTYLLPDNHKTSKRKTKISRKTRNPTFNEMLVYSGYSKETLRQRELQLSVLSAESLRENFFLGGVTLPLKDFNLSKETVKWYQLTAATYL

SEQ ID NO: 2130 - protein, 986 aa, Homo sapiens
MERMNWLSRLASRGPGHRIPQGANLQTPVMADPETCLMVFKNHWSQVVRILERQGPRAAPGGADDLSAVRNHTYQMLTLLAEDRAVPSAPTGPGPLLEFALHEDLLTRVLTWQLQWDELGDGVEERRAEQLKLFEMLVSEARQPLLRHGPVREALLTLLDACGRPVPSSPALDEGLVLLLSQLCVCVAQEPSLLEFFLQPPPEPGAAPRLLLFSRLVPFVHREGTLGQQARDALLLLMALSAGSPTVGRYIADHSYFCPVLATGLSALYSSLPRKIEVPGDDWHCLRREDWLGVPALALFMSSLEFCNAVIQVAHPLVQKQLVDYIHNGFLVPVMGPALHKTSVEEMIASTAYLELFLRSISEPALLRTFLRFLLLHRHDTHTILDTLVARIGSNSRLCMVSLSLFRTLLNLSCEDVLLQLVLRYLVPCNHVMLSQKPAVRDVDLYGRAADKFLSLIPRCCRHHAPSPPRPEHASWARGGPSRETGRREDITGPGSPSVDSSSVTTVPRPSTPSRLALFLRQQSLGGSESPGPAPCSPGLSASPASSPGRRPTPAEEPGELEDNYLEYLREARRGVDRCVRACRTWSAPYDGERPSPEPSPFGSRTKKRSLLPEEDRNNVGEGEEEELGRRGRAGGAGEGPGHLPPPQLNGVPGSWPEGAKKVRLVPKEGAGELLEGISEGMAGLEGFGQELRELEVALSNGGTGSESPLEPPLPLEEEEAYESFTCPPEPPGPFLSSPLRTLNQLPSQPFTGPFMAVLFAKLENMLQNSVYVNFLLTGLVAQLACHPQPLLRSFLLNTNMVFQPSVKSLLQVLGSVKNKIENFAASQEDFPALLSKAKKYLIARGKLDWAEGPAAGPAPRRSDPLVKSRRPSLGELLLRHAHSPTRARQAAQLVLQPGRDGAGLGLSGGSPGASTPVLLTRGGAPERQGEALRVKNAVYCAVIFPEFLKELAAISQAHAVTSPFLLETSEEGSGPLISGCGPLNP

SEQ ID NO: 2131 - protein, 462 aa, Homo sapiens
MARVLGAPVALGLWSLCWSLAIATPLPPTSAHGNVAEGETKPDPDVTERCSDGWSFDATTLDDNGTMLFFKGEFVWKSHKWDRELISERWKNFPSPVDAAFRQGHNSVFLIKGDKVWVYPPEKKEKGYPKLLQDEFPGIPSPLDAAVECHRGECQAEGVLFFQGDREWFWDLATGTMKERSWPAVGNCSSALRWLGRYYCFQGNQFLRFDPVRGEVPPRYPRDVRDYFMPCPGRGHGHRNGTGHGNSTHHGPEYMRCSPHLVLSALTSDNHGATYAFSGTHYWRLDTSRDGWHSWPIAHQWPQGPSAVDAAFSWEEKLYLVQGTQVYVFLTKGGYTLVSGYPKRLEKEVGTPHGIILDSVDAAFICPGSSRLHIMAGRRLWWLDLKSGAQATWTELPWPHEKVDGALCMEKSLGPNSCSANGPGLYLIHGPNLYCYSDVEKLNAAKALPQPQNVTSLLGCTH

SEQ ID NO: 2132 - protein, 1849 aa, Homo sapiens
MAVSRLDRLFILLDTGTTPVTRKAAAQQLGEVVKLHPHELNNLLSKVLIYLRSANWDTRIAAGQAVEAIVKNVPEWNPVPRTRQEPTSESSMEDSPTTERLNFDRFDICRLLQHGASLLGSAGAEFEVQDEKSGEVDPKERIARQRKLLQKKLGLNMGEAIGMSTEELFNDEDLDYTPTSASFVNKQPTLQAAELIDSEFRAGMSNRQKNKAKRMAKLFAKQRSRDAVETNEKSNDSTDGEPEEKRRKIANVVINQSANDSKVLIDNIPDSSSLIEETNEWPLESFCEELCNDLFNPSWEVRHGAGTGLREILKAHGKSGGKMGDSTLEEMIQQHQEWLEDLVIRLLCVFALDRFGDFVSDEVVAPVRETCAQTLGVVLKHMNETGVHKTVDVLLKLLTQEQWEVRHGGLLGIKYALAVRQDVINTLLPKVLTRIIEGLQDLDDDVRAVAAASLVPVVESLVYLQTQKVPFIINTLWDALLELDDLTASTNSIMTLLSSLLTYPQVQQCSIQQSLTVLVPRVWPFLHHTISSVRRAALETLFTLLSTQDQNSSSWLIPILPDMLRHIFQFCVLESSQEILDLIHKVWMELLSKASVQYVVAAACPWMGAWLCLMMQPSHLPIDLNMLLEVKARAKEKTGGKVRQGQSQNKEVLQEYIAGADTIMEDPATRDFVVMRARMMAAKLLGALCCCICDPGVNVVTQEIKPAESLGQLLLFHLNSKSALQRISVALVICEWAALQKECKAVTLAVQPRLLDILSEHLYYDEIAVPFTRMQNECKQLISSLADVHIEVGNRVNNNVLTIDQASDLVTTVFNEATSSFDLNPQVLQQLDSKRQQVQMTVTETNQEWQVLQLRVHTFAACAVVSLQQLPEKLNPIIKPLMETIKKEENTLVQNYAAQCIAKLLQQCTTRTPCPNSKIIKNLCSSLCVDPYLTPCVTCPVPTQSGQENSKGSTSEKDGMHHTVTKHRGIITLYRHQKAAFAITSRRGPTPKAVKAQIADLPAGSSGNILVELDEAQKPYLVQRRGAEFALTTIVKHFGGEMAVKLPHLWDAMVGPLRNTIDINNFDGKSLLDKGDSPAQELVNSLQVFETAAASMDSELHPLLVQHLPHLYMCLQYPSTAVRHMAARCVGVMSKIATMETMNIFLEKVLPWLGAIDDSVKQEGAIEALACVMEQLDVGIVPYIVLLVVPVLGRMSDQTDSVRFMATQCFATLIRLMPLEAGIPDPPNMSAELIQLKAKERHFLEQLLDGKKLENYKIPVPINAELRKYQQDGVNWLAFLNKYKLHGILCDDMGLGKTLQSICILAGDHCHRAQEYARSKLAECMPLPSLVVCPPTLTGHWVDEVGKFCSREYLNPLHYTGPPTERIRLQHQVKRHNLIVASYDVVRNDIDFFRNIKFNYCILDEGHVIKNGKTKLSKAVKQLTANYRIILSGTPIQNNVLELWSLFDFLMPGFLGTERQFAARYGKPILASRDARSSSREQEAGVLAMDALHRQVLPFLLRRMKEDVLQDLPPKIIQDYYCTLSPLQVQLYEDFAKSRAKCDVDETVSSATLSEETEKPKLKATGHVFQALQYLRKLCNHPALVLTPQHPEFKTTAEKLAVQNSSLHDIQHAPKLSALKQLLLDCGLGNGSTSESGTESVVAQHRILIFCQLKSMLDIVEHDLLKPHLPSVTYLRLDGSIPPGQRHSIVSRFNNDPSIDVLLLTTHVGGLGLNLTGADTVVFVEHDWNPMRDLQAMDRAHRIGQKRVVNVYRLITRGTLEEKIMGLQKFKMNIANTVISQENSSLQSMGTDQLLDLFTLDKDGKAEKADTSTSGKASMKSILENLSDLWDQEQYDSEYSLENFMHSLK

SEQ ID NO: 2133 - protein, 625 aa, Homo sapiens
MRLETAEAYVGPGGPECPMRTPQLALLQVFFLVFPDGVRPQPSSSPSGAVPTSLELQRGTDGGTLQSPSEATATRPAVPGLPTVVPTLVTPSAPGNRTVDLFPVLPICVCDLTPGACDINCCCDRDCYLLHPRTVFSFCLPGSVRSSSWVCVDNSVIFRSNSPFPSRVFMDSNGIRQFCVHVNNSNLNYFQKLQKVNATNFQALAAEFGGESFTSTFQTQSPPSFYRAGDPILTYFPKWSVISLLRQPAGVGAGGLCAESNPAGFLESKSTTCTRFFKNLASSCTLDSALNAASYYNFTVLKVPRSMTDPQNMEFQVPVILTSQANAPLLAGNTCQNVVSQVTYEIETNGTFGIQKVSVSLGQTNLTVEPGASLQQHFILRFRAFQQSTAASLTSPRSGNPGYIVGKPLLALTDDISYSMTLLQSQGNGSCSVKRHEVQFGVNAISGCKLRLKKADCSHLQQEIYQTLHGRPRPEYVAIFGNADPAQKGGWTRILNRHCSISAINCTSCCLIPVSLEIQVLWAYVGLLSNPQAHVSGVRFLYQCQSIQDSQQVTEVSLTTLVNFVDITQKPQPPRGQPKMDWKWPFDFFPFKVAFSRGVFSQKCSVSPILILCLLLLGVLNLETM

SEQ ID NO: 2134 - protein, 698 aa, Homo sapiens
MQDDLLMDKSKTQPQPQQQQRQQQQPQPESSVSEAPSTPLSSETPKPEENSAVPALSPAAAPPAPNGPDKMQMESPLLPGLSFHQPPQQPPPPQEPAAPGASLSPSFGSTWSTGTTNAVEDSFFQGITPVNGTMLFQNFPHHVNPVFGGTFSPQIGLAQTQHHQQPPPPAPAPQPAQPAQPPQAQPPQQRRSPASPSQAPYAQRSAAAAYGHQPIMTSKPSSSSAVAAAAAAAAASSASSSWNTHQSVNAAWSAPSNPWGGLQAGRDPRRAVGVGVGVGVGVPSPLNPISPLKKPFSSNVIAPPKFPRAAPLTSKSWMEDNAFRTDNGNNLLPFQDRSRPYDTFNLHSLENSLMDMIRTDHEPLKGKHYPPSGPPMSFADIMWRNHFAGRMGINFHHPGTDNIMALNNAFLDDSHGDQALSSGLSSPTRCQNGERVERYSRKVFVGGLPPDIDEDEITASFRRFGPLVVDWPHKAESKSYFPPKGYAFLLFQEESSVQALIDACLEEDGKLYLCVSSPTIKDKPVQIRPWNLSDSDFVMDGSQPLDPRKTIFVGGVPRPLRAVELAMIMDRLYGGVCYAGIDTDPELKYPKGAGRVAFSNQQSYIAAISARFVQLQHNDIDKRVEVKPYVLDDQMCDECQGTRCGGKFAPFFCANVTCLQYYCEYCWASIHSRAGREFHKPLVKEGGDRPRHVPFRWS

SEQ ID NO: 2135 - protein, 371 aa, Homo sapiens
MSFRKVNIIILVLAVALFLLVLHHNFLSLSSLLRNEVTDSGIVGPQPIDFVPNALRHAVDGRQEEIPVVIAASEDRLGGAIAAINSIQHNTRSNVIFYIVTLNNTADHLRSWLNSDSLKSIRYKIVNFDPKLLEGKVKEDPDQGESMKPLTFARFYLPILVPSAKKAIYMDDDVIVQGDILALYNTALKPGHAAAFSEDCDSASTKVVIRGAGNQYNYIGYLDYKKERIRKLSMKASTCSFNPGVFVANLTEWKRQNITNQLEKWMKLNVEEGLYSRTLAGSITTPPLLIVFYQQHSTIDPMWNVRHLGSSAGKRYSPQFVKAAKLLHWNGHLKPWGRTASYTDVWEKWYIPDPTGKFNLIRRYTEISNIK

SEQ ID NO: 2136 - protein, 1123 aa, Homo sapiens
MWGDSRPANRTGPFRGSQEERFAPGWNRDYPPPPLKSHAQERHSGNFPGRDSLPFDFQGHSGPPFANVEEHSFSYGARDGPHGDYRGGEGPGHDFRGGDFSSSDFQSRDSSQLDFRGRDIHSGDFRDREGPPMDYRGGDGTSMDYRGREAPHMNYRDRDAHAVDFRGRDAPPSDFRGRGTYDLDFRGRDGSHADFRGRDLSDLDFRAREQSRSDFRNRDVSDLDFRDKDGTQVDFRGRGSGTTDLDFRDRDTPHSDFRGRHRSRTDQDFRGREMGSCMEFKDREMPPVDPNILDYIQPSTQDREHSGMNVNRREESTHDHTIERPAFGIQKGEFEHSETREGETQGVAFEHESPADFQNSQSPVQDQDKSQLSGREEQSSDAGLFKEEGGLDFLGRQDTDYRSMEYRDVDHRLPGSQMFGYGQSKSFPEGKTARDAQRDLQDQDYRTGPSEEKPSRLIRLSGVPEDATKEEILNAFRTPDGMPVKNLQLKEYNTGYDYGYVCVEFSLLEDAIGCMEANQGTLMIQDKEVTLEYVSSLDFWYCKRCKANIGGHRSSCSFCKNPREVTEAKQELITYPQPQKTSIPAPLEKQPNQPLRPADKEPEPRKREEGQESRLGHQKREAERYLPPSRREGPTFRRDRERESWSGETRQDGESKTIMLKRIYRSTPPEVIVEVLEPYVRLTTANVRIIKNRTGPMGHTYGFIDLDSHAEALRVVKILQNLDPPFSIDGKMVAVNLATGKRRNDSGDHSDHMHYYQGKKYFRDRRGGGRNSDWSSDTNRQGQQSSSDCYIYDSATGYYYDPLAGTYYDPNTQQEVYVPQDPGLPEEEEIKEKKPTSQGKSSSKKEMSKRDGKEKKDRGVTRFQENASEGKAPAEDVFKKPLPPTVKKEESPPPPKVVNPLIGLLGEYGGDSDYEEEEEEEQTPPPQPRTAQPQKREEQTKKENEEDKLTDWNKLACLLCRRQFPNKEVLIKHQQLSDLHKQNLEIHRKIKQSEQELAYLERREREGKFKGRGNDRREKLQSFDSPERKRIKYSRETDSDRKLVDKEDIDTSSKGGCVQQATGWRKGTGLGYGHPGLASSEEAEGRMRGPSVGASGRTSKRQSNETYRDAVRRVMFARYKELD

SEQ ID NO: 2137 - protein, 303 aa, Homo sapiens
MKIIHEDGYSEEECRQYRAVVYSNTIQSIMAIVKAMGNLQIDFADPSRADDARQLFALSCTAEEQGVLPDDLSGVIRRLWADHGVQACFGRSREYQLNDSAAYYLNDLERIAQSDYIPTQQDVLRTRVKTTGIVETHFTFKDLHFKMFDVGGQRSERKKWIHCFEGVTAIIFCVALSAYDLVLAEDEEMNRMHESMKLFDSICNNKWFTDTSIILFLNKKDLFEEKITHSPLTICFPEYTGANKYDEAASYIQSKFEDLNKRKDTKEIYTHFTCATDTKNVQFVFDAVTDVIIKNNLKDCGLF

SEQ ID NO: 2138 - protein, 2030 aa, Homo sapiens
MWTPTEEEKYGVVICSFRGSVPQGLVLEIGETVQILEKCEGWYRGVSTKKPNVKGIFPANYIHLKKAIVSNRGQYETVVPLEDSIVTEVTATLQEWASLWKQLYVKHKVDLFYKLRHVMNELIDLRRQLLSGHLTQDQVREVKRHITVRLDWGNEHLGLDLVPRKDFEVVDSDQISVSDLYKMHLSSRQSVQQSTSQVDTMRPRHGETCRMPVPHHFFLSLKSFTYNTIGEDTDVFFSLYDMREGKQISERFLVRLNKNGGPRNPEKIERMCALFTDLSSKDMKRDLYIVAHVIRIGRMLLNDSKKGPPHLHYRRPYGCAVLSILDVLQSLTEVKEEKDFVLKVYTCNNESEWSQIHENIIRKSSAKYSAPSASHGLIISLQLLRGDMEQIRRENPMIFNRGLAITRKLGFPDVIMPGDIRNDLYLTLEKGDFERGGKSVQKNIEVTMYVLYADGEILKDCISLGSGEPNRSSYHSFVLYHSNSPRWGEIIKLPIPIDRFRGSHLRFEFRHCSTKDKGEKKLFGFAFSTLMRDDGTTLSDDIHELYVYKCDENSTFNNHALYLGLPCCKEDYNGCPNIPSSLIFQRSTKESFFISTQLSSTKLTQNVDLLALLKWKAFPDRIMDVLGRLRHVSGEEIVKFLQDILDTLFVILDDNTEKYGLLVFQSLVFIINLLRDIKYFHFRPVMDTYIQKHFAGALAYKELIRCLKWYMDCSAELIRQDHIQEAMRALEYLFKFIVQSRILYSRATCGMEEEQFRSSIQELFQSIRFVLSLDSRNSETLLFTQAALLNSFPTIFDELLQMFTVQEVAEFVRGTLGSMPSTVHIGQSMDVVKLQSIARTVDSRLFSFSESRRILLPVVLHHIHLHLRQQKELLICSGILGSIFSIVKTSSLEADVMEEVEMMVESLLDVLLQTLLTIMSKSHAQEAVRGQRCPQCTAEITGEYVSCLLSLLRQMCDTHFQHLLDNFQSKDELKEFLLKIFCVFRNLMKMSVFPRDWMVMRLLTSNIIVTTVQYLSSALHKNFTETDFDFKVWNSYFSLAVLFINQPSLQLEIITSAKRKKILDKYGDMRVMMAYELFSMWQNLGEHKIHFIPGMIGPFLGVTLVPQPEVRNIMIPIFHDMMDWEQRKNGNFKQVEAELIDKLDSMVSEGKGDESYRELFSLLTQLFGPYPSLLEKVEQETWRETGISFVTSVTRLMERLLDYRDCMKGEETENKKIGCTVNLMNFYKSEINKEEMYIRYIHKLCDMHLQAENYTEAAFTLLLYCELLQWEDRPLREFLHYPSQTEWQRKEGLCRKIIHYFNKGKSWEFGIPLCRELACQYESLYDYQSLSWIRKMEASYYDNIMEQQRLEPEFFRVGFYGRKFPFFLRNKEYVCRGHDYERLEAFQQRMLSEFPQAVAMQHPNHPDDAILQCDAQYLQIYAVTPIPDYVDVLQMDRVPDRVKSFYRVNNVRKFRYDRPFHKGPKDKENEFKSLWIERTTLTLTHSLPGISRWFEVERRELVEVSPLENAIQVVENKNQELRSLISQYQHKQVHGNINLLSMCLNGVIDAAVNGGIARYQEAFFDKDYINKHPGDAEKITQLKELMQEQVHVLGVGLAVHEKFVHPEMRPLHKKLIDQFQMMRASLYHEFPGLDKLSPACSGTSTPRGNVLASHSPMSPESIKMTHRHSPMNLMGTGRHSSSSLSSHASSEAGNMVMLGDGSMGDAPEDLYHHMQLAYPNPRYQGSVTNVSVLSSSQASPSSSSLSSTHSAPSQMITSAPSSARGSPSLPDKYRHAREMMLLLPTYRDRPSSAMYPAAILENGQPPNFQRALFQQVVGACKPCSDPNLSVAEKGHYSLHFDAFHHPLGDTPPALPARTLRKSPLHPIPASPTSPQSGLDGSNSTLSGSASSGVSSLSESNFGHSSEAPPRTDTMDSMPSQAWNADEDLEPPYLPVHYSLSESAVLDSIKAQPCRSHSAPGCVIPQDPMDPPALPPKPYHPRLPALEHDEGVLLREETERPRGLHRKAPLPPGSAKEEQARMAWEHGRGEQ

SEQ ID NO: 2139 - protein, 1145 aa, Homo sapiens
MAVPARTCGASRPGPARTARPWPGCGPHPGPGTRRPTSGPPRPLWLLLPLLPLLAAPGASAYSFPQQHTMQHWARRLEQEVDGVMRIFGGVQQLREIYKDNRNLFEVQENEPQKLVEKVAGDIESLLDRKVQALKRLADAAENFQKAHRWQDNIKEEDIVYYDAKADAELDDPESEDVERGSKASTLRLDFIEDPNFKNKVNYSYAAVQIPTDIYKGSTVILNELNWTEALENVFMENRRQDPTLLWQVFGSATGVTRYYPATPWRAPKKIDLYDVRRRPWYIQGASSPKDMVIIVDVSGSVSGLTLKLMKTSVCEMLDTLSDDDYVNVASFNEKAQPVSCFTHLVQANVRNKKVFKEAVQGMVAKGTTGYKAGFEYAFDQLQNSNITRANCNKMIMMFTDGGEDRVQDVFEKYNWPNRTVRVFTFSVGQHNYDVTPLQWMACANKGYYFEIPSIGAIRINTQEYLDVLGRPMVLAGKEAKQVQWTNVYEDALGLGLVVTGTLPVFNLTQDGPGEKKNQLILGVMGIDVALNDIKRLTPNYTLGANGYVFAIDLNGYVLLHPNLKPQTTNFREPVTLDFLDAELEDENKEEIRRSMIDGNKGHKQIRTLVKSLDERYIDEVTRNYTWVPIRSTNYSLGLVLPPYSTFYLQANLSDQILQVKYFEFLLPSSFESEGHVFIAPREYCKDLNASDNNTEFLKNFIELMEKVTPDSKQCNNFLLHNLILDTGITQQLVERVWRDQDLNTYSLLAVFAATDGGITRVFPNKAAEDWTENPEPFNASFYRRSLDNHGYVFKPPHQDALLRPLELENDTVGILVSTAVELSLGRRTLRPAVVGVKLDLEAWAEKFKVLASNRTHQDQPQKCGPNSHCEMDCEVNNEDLLCVLIDDGGFLVLSNQNHQWDQVGRFFSEVDANLMLALYNNSFYTRKESYDYQAACAPQPPGNLGAAPRGVFVPTVADFLNLAWWTSAAAWSLFQQLLYGLIYHSWFQADPAEAEGSPETRESSCVMKQTQYYFGSVNASYNAIIDCGNCSRLFHAQRLTNTNLLFVVAEKPLCSQCEAGRLLQKETHCPADGPEQCELVQRPRYRRGPHICFDYNATEDTSDCGRGASFPPSLGVLVSLQLLLLLGLPPRPQPQVLVHASRRL

SEQ ID NO: 2140 - protein, 930 aa, Homo sapiens
MKPPRPVRTCSKVLVLLSLLAIHQTTTAEKNGIDIYSLTVDSRVSSRFAHTVVTSRVVNRANTVQEATFQMELPKKAFITNFSMIIDGMTYPGIIKEKAEAQAQYSAAVAKGKSAGLVKATGRNMEQFQVSVSVAPNAKITFELVYEELLKRRLGVYELLLKVRPQQLVKHLQMDIHIFEPQGISFLETESTFMTNQLVDALTTWQNKTKAHIRFKPTLSQQQKSPEQQETVLDGNLIIRYDVDRAISGGSIQIENGYFVHYFAPEGLTTMPKNVVFVIDKSGSMSGRKIQQTREALIKILDDLSPRDQFNLIVFSTEATQWRPSLVPASAENVNKARSFAAGIQALGGTNINDAMLMAVQLLDSSNQEERLPEGSVSLIILLTDGDPTVGETNPRSIQNNVREAVSGRYSLFCLGFGFDVSYAFLEKLALDNGGLARRIHEDSDSALQLQDFYQEVANPLLTAVTFEYPSNAVEEVTQNNFRLLFKGSEMVVAGKLQDRGPDVLTATVSGKLPTQNITFQTESSVAEQEAEFQSPKYIFHNFMERLWAYLTIQQLLEQTVSASDADQQALRNQALNLSLAYSFVTPLTSMVVTKPDDQEQSQVAEKPMEGESRNRNVHSGSTFFKYYLQGAKIPKPEASFSPRRGWNRQAGAAGSRMNFRPGVLSSRQLGLPGPPDVPDHAAYHPFRRLAILPASAPPATSNPDPAVSRVMNMKIEETTMTTQTPAPIQAPSAILPLPGQSVERLCVDPRHRQGPVNLLSDPEQGVEVTGQYEREKAGFSWIEVTFKNPLVWVHASPEHVVVTRNRRSSAYKWKETLFSVMPGLKMTMDKTGLLLLSDPDKVTIGLLFWDGRGEGLRLLLRDTDRFSSHVGGTLGQFYQEVLWGSPAASDDGRRTLRVQGNDHSATRERRLDYQEGPPGVEISCWSVEL

SEQ ID NO: 2141 - protein, 1534 aa, Homo sapiens
MALTPGWGSSAGPVRPELWLLLWAAAWRLGASACPALCTCTGTTVDCHGTGLQAIPKNIPRNTERLELNGNNITRIHKNDFAGLKQLRVLQLMENQIGAVERGAFDDMKELERLRLNRNQLHMLPELLFQNNQALSRLDLSENAIQAIPRKAFRGATDLKNLQLDKNQISCIEEGAFRALRGLEVLTLNNNNITTIPVSSFNHMPKLRTFRLHSNHLFCDCHLAWLSQWLRQRPTIGLFTQCSGPASLRGLNVAEVQKSEFSCSGQGEAGRVPTCTLSSGSCPAMCTCSNGIVDCRGKGLTAIPANLPETMTEIRLELNGIKSIPPGAFSPYRKLRRIDLSNNQIAEIAPDAFQGLRSLNSLVLYGNKITDLPRGVFGGLYTLQLLLLNANKINCIRPDAFQDLQNLSLLSLYDNKIQSLAKGTFTSLRAIQTLHLAQNPFICDCNLKWLADFLRTNPIETSGARCASPRRLANKRIGQIKSKKFRCSAKEQYFIPGTEDYQLNSECNSDVVCPHKCRCEANVVECSSLKLTKIPERIPQSTAELRLNNNEISILEATGMFKKLTHLKKINLSNNKVSEIEDGAFEGAASVSELHLTANQLESIRSGMFRGLDGLRTLMLRNNRISCIHNDSFTGLRNVRLLSLYDNQITTVSPGAFDTLQSLSTLNLLANPFNCNCQLAWLGGWLRKRKIVTGNPRCQNPDFLRQIPLQDVAFPDFRCEEGQEEGGCLPRPQCPQECACLDTVVRCSNKHLRALPKGIPKNVTELYLDGNQFTLVPGQLSTFKYLQLVDLSNNKISSLSNSSFTNMSQLTTLILSYNALQCIPPLAFQGLRSLRLLSLHGNDISTLQEGIFADVTSLSHLAIGANPLYCDCHLRWLSSWVKTGYKEPGIARCAGPQDMEGKLLLTTPAKKFECQGPPTLAVQAKCDLCLSSPCQNQGTCHNDPLEVYRCACPSGYKGRDCEVSLDSCSSGPCENGGTCHAQEGEDAPFTCSCPTGFEGPTCGVNTDDCVDHACANGGVCVDGVGNYTCQCPLQYEGKACEQLVDLCSPDLNPCQHEAQCVGTPDGPRCECMPGYAGDNCSENQDDCRDHRCQNGAQCMDEVNSYSCLCAEGYSGQLCEIPPHLPAPKSPCEGTECQNGANCVDQGNRPVCQCLPGFGGPECEKLLSVNFVDRDTYLQFTDLQNWPRANITLQVSTAEDNGILLYNGDNDHIAVELYQGHVRVSYDPGSYPSSAIYSAETINDGQFHTVELVAFDQMVNLSIDGGSPMTMDNFGKHYTLNSEAPLYVGGMPVDVNSAAFRLWQILNGTGFHGCIRNLYINNELQDFTKTQMKPGVVPGCEPCRKLYCLHGICQPNATPGPMCHCEAGWVGLHCDQPADGPCHGHKCVHGQCVPLDALSYSCQCQDGYSGALCNQAGALAEPCRGLQCLHGHCQASGTKGAHCVCDPGFSGELCEQESECRGDPVRDFHQVQRGYAICQTTRPLSWVECRGSCPGQGCCQGLRLKRRKFTFECSDGTSFAEEVEKPTKCGCALCA

SEQ ID NO: 2142 - protein, 530 aa, Homo sapiens
MATPDVSVHMEEVVVVTTPDTAVDGSGVEGVKTVLVTTNLAPHGGDLTEDNMETENAAAAAAAAFTASSQLKEAVLVKMAEEGENLEAEIVYPITCGDSRANLIWRKFVCPGINVKCVQYDEHVISPKEFVHLAGKSTLKDWKRAIRMNGIMLRKIMDSGELDFYQHDKVCSNTCRSTKIDLSGARVSLSSPTSAEYIPLTPAAADVNGSPATITIETCEDPGDWTAAIGDDTFTFWRGLKDAGLLDEVIQEFHQELVETMRGLQQRVQDPPLQLRDAVLLNNIVQNFGMLDLVKKVLASHKCQMDRSREQYARDLAALEQQCDEHRRRAKELKHKSQHLSNVLMTLTPVSLPPPVKRPRLARATSGPAAMASQVLTQSAQLALGPGVPVPQLTSVPLGKVVSTLPSTVLGKGSLQAPPASSPASPLLGGYTVLASSGSTYPSTVEIHPDASSLTVLSTAAVQDGSTVFKVVSPLQLLTLPGLGPTLQNVAQASPGSSTIVTVPAGAAPGPEEHTATIEVAAMAEDHERK

SEQ ID NO: 2143 - protein, 2240 aa, Homo sapiens
MDDKGDPSNEEAPKAIKPTSKEFRKTWGFRRTTIAKREGAGDAEADPLEPPPPQQQLGLSLRRSGRQPKRTERVEQFLTIARRRGRRSMPVSLEDSGEPTSCPATDAETASEGSVESASETRSGPQSASTAVKERPASSEKVKGGDDHDDTSDSDSDGLTLKELQNRLRRKREQEPTERPLKGIQSRLRKKRREEGPAETVGSEASDTVEGVLPSKQEPENDQGVVSQAGKDDRESKLEGKAAQDIKDEEPGDLGRPKPECEGYDPNALYCICRQPHNNRFMICCDRCEEWFHGDCVGISEARGRLLERNGEDYICPNCTILQVQDETHSETADQQEAKWRPGDADGTDCTSIGTIEQKSSEDQGIKGRIEKAANPSGKKKLKIFQPVIEAPGASKCIGPGCCHVAQPDSVYCSNDCILKHAAATMKFLSSGKEQKPKPKEKMKMKPEKPSLPKCGAQAGIKISSVHKRPAPEKKETTVKKAVVVPARSEALGKEAACESSTPSWASDHNYNAVKPEKTAAPSPSLLYKSTKEDRRSEEKAAAMAASKKTAPPGSAVGKQPAPRNLVPKKSSFANVAAATPAIKKPPSGFKGTIPKRPWLSATPSSGASAARQAGPAPAAATAASKKFPGSAALVGAVRKPVVPSVPMASPAPGRLGAMSAAPSQPNSQIRQNIRRSLKEILWKRVNDSDDLIMTENEVGKIALHIEKEMFNLFQVTDNRYKSKYRSIMFNLKDPKNQGLFHRVLREEISLAKLVRLKPEELVSKELSTWKERPARSVMESRTKLHNESKKTAPRQEAIPDLEDSPPVSDSEEQQESARAVPEKSTAPLLDVFSSMLKDTTSQHRAHLFDLNCKICTGQVPSAEDEPAPKKQKLSASVKKEDLKSKHDSSAPDPAPDSADEVMPEAVPEVASEPGLESASHPNVDRTYFPGPPGDGHPEPSPLEDLSPCPASCGSGVVTTVTVSGRDPRTAPSSSCTAVASAASRPDSTHMVEARQDVPKPVLTSVMVPKSILAKPSSSPDPRYLSVPPSPNISTSESRSPPEGDTTLFLSRLSTIWKGFINMQSVAKFVTKAYPVSGCFDYLSEDLPDTIHIGGRIAPKTVWDYVGKLKSSVSKELCLIRFHPATEEEEVAYISLYSYFSSRGRFGVVANNNRHVKDLYLIPLSAQDPVPSKLLPFEGPGLESPRPNIILGLVICQKIKRPANSGELDKMDEKRTRLQPEEADVPAYPKVATVPQSEKKPSKYPLCSADAAVSTTPPGSPPPPPPLPEPPVLKVLSSLKPAAPSPATAATTAAAASTAASSTASSASKTASPLEHILQTLFGKKKSFDPSAREPPGSTAGLPQEPKTTAEDGVPAPPLLDPIVQQFGQFSKDKALEEEEDDRPYDPEEEYDPERAFDTQLVERGRRHEVERAPEAAAAEREEVAYDPEDETILEEAKVTVDDLPNRMCADVRRNSVERPAEPVAGAATPSLVEQQKMLEELNKQIEEQKRQLEEQEEALRQQRAAVGVSMAHFSVSDALMSPPPKSSLPKAELFQQEQQSADKPASLPPASQASNHRDPRQARRLATETGEGEGEPLSRLSARGAQGALPERDASRGGLVGQAPMPVPEEKEPASSPWASGEKPPAGSEQDGWKAEPGEGTRPATVGDSSARPARRVLLPTPPCGALQPGFPLQHDGERDPFTCPGFASQDKALGSAQYEDPRNLHSAGRSSSPAGETEGDREPQARPGEGTAPLPPPGQKVGGSQPPFQGQREPGPHALGMSGLHGPNFPGPRGPAPPFPEENIASNDGPRGPPPARFGAQKGPIPSLFSGQHGPPPYGDSRGPSPSYLGGPRGVAPSQFEERKDPHGEKREFQDAPYNEVTGAPAQFEGTEQAPFLGSRGGAPFQFGGQRRPLLSQLKGPRGGPPPSQFGGQRGPPPGHFVGPRGPHPSQFETARGPHPNQFEGPRGQAPNFMPGPRGIQPQQFEDQRVHSPPRFTNQRAPAPLQFGGLRGSAPFSEKNEQTPSRFHFQGQAPQVMKPGPRPLLELPSHPPQHRKDRWEEAGPPSALSSSAPGQGPEADGQWASADFREGKGHEYRNQTFEGRQRERFDVGPKEKPLEEPDAQGRASEDRRRERERGRNWSRERDWDRPREWDRHRDKDSSRDWDRNRERSANRDREREADRGKEWDRSRERSRNRERERDRRRDRDRSRSRERDRDKARDRERGRDRKDRSKSKESARDPKPEASRASDAGTASQA

SEQ ID NO: 2144 - protein, 941 aa, Homo sapiens
MNKKKKPFLGMPAPLGYVPGLGRGATGFTTRSDIGPARDANDPVDDRHAPPGKRTVGDQMKKNQAADDDDEDLNDTNYDEFNGYAGSLFSSGPYEKDDEEADAIYAALDKRMDERRKERREQREKEEIEKYRMERPKIQQQFSDLKRKLAEVTEEEWLSIPEVGDARNKRQRNPRYEKLTPVPDSFFAKHLQTGENHTSVDPRQTQFGGLNTPYPGGLNTPYPGGMTPGLMTPGTGELDMRKIGQARNTLMDMRLSQVSDSVSGQTVVDPKGYLTDLNSMIPTHGGDINDIKKARLLLKSVRETNPHHPPAWIASARLEEVTGKLQVARNLIMKGTEMCPKSEDVWLEAARLQPGDTAKAVVAQAVRHLPQSVRIYIRAAELETDIRAKKRVLRKALEHVPNSVRLWKAAVELEEPEDARIMLSRAVECCPTSVELWLALARLETYENARKVLNKARENIPTDRHIWITAAKLEEANGNTQMVEKIIDRAITSLRANGVEINREQWIQDAEECDRAGSVATCQAVMRAVIGIGIEEEDRKHTWMEDADSCVAHNALECARAIYAYALQVFPSKKSVWLRAAYFEKNHGTRESLEALLQRAVAHCPKAEVLWLMGAKSKWLAGDVPAARSILALAFQANPNSEEIWLAAVKLESENDEYERARRLLAKARSSAPTARVFMKSVKLEWVQDNIRAAQDLCEEALRHYEDFPKLWMMKGQIEEQKEMMEKAREAYNQGLKKCPHSTPLWLLLSRLEEKIGQLTRARAILEKSRLKNPKNPGLWLESVRLEYRAGLKNIANTLMAKALQECPNSGILWSEAIFLEARPQRRTKSVDALKKCEHDPHVLLAVAKLFWSQRKITKAREWFHRTVKIDSDLGDAWAFFYKFELQHGTEEQQEEVRKRCESAEPRHGELWCAVSKDIANWQKKIGDILRLVAGRIKNTF

SEQ ID NO: 2145 - protein, 211 aa, Homo sapiens
MTPWLGLIVLLGSWSLGDWGAEACTCSPSHPQDAFCNSDIVIRAKVVGKKLVKEGPFGTLVYTIKQMKMYRGFTKMPHVQYIHTEASESLCGLKLEVNKYQYLLTGRVYDGKMYTGLCNFVERWDQLTLSQRKGLNYRYHLGCNCKIKSCYYLPCFVTSKNECLWTDMLSNFGYPGYQSKHYACIRQKGGYCSWYRGWAPPDKSIINATDP

SEQ ID NO: 2146 - protein, 659 aa, Homo sapiens
MASTVSPSTIAETPEPPPLSDHIRNAADISVIVIYFLVVMAVGLWAMLKTNRGTIGGFFLAGRDMAWWPMGASLFASNIGSNHYVGLAGTGAASGVATVTFEWTSSVMLLILGWIFVPIYIKSGVMTMPEYLKKRFGGERLQVYLSILSLFICVVLLISADIFAGAIFIKLALGLDLYLAIFILLAMTAVYTTTGGLASVIYTDTLQTIIMLIGSFILMGFAFNEVGGYESFTEKYVNATPSVVEGDNLTISASCYTPRADSFHIFRDAVTGDIPWPGIIFGMPITALWYWCTNQVIVQRCLCGKDMSHVKAACIMCAYLKLLPMFLMVMPGMISRILYTDMVACVVPSECVKHCGVDVGCTNYAYPTMVLELMPQGLRGLMLSVMLASLMSSLTSIFNSASTLFTIDLYTKMRKQASEKELLIAGRIFVLLLTVVSIVWVPLVQVSQNGQLIHYTESISSYLGPPIAAVFVLAIFCKRVNEQGAFWGLMVGLAMGLIRMITEFAYGTGSCLAPSNCPKIICGVHYLYFSIVLFFGSMLVTLGISLLTKPIPDVHLYRLCWVLRNSTEERIDIDAEEKSQEETDDGVEEDYPEKSRGCLKKAYDLFCGLQKGPKLTKEEEEALSKKLTDTSERPSWRTIVNINAILLLAVVVFIHGYYA

SEQ ID NO: 2147 - protein, 664 aa, Homo sapiens
MDSSTWSPKTTAVTRPVETHELIRNAADISIIVIYFVVVMAVGLWAMFSTNRGTVGGFFLAGRSMVWWPIGASLFASNIGSGHFVGLAGTGAASGIAIGGFEWNALVLVVVLGWLFVPIYIKAGVVTMPEYLRKRFGGQRIQVYLSLLSLLLYIFTKISADIFSGAIFINLALGLNLYLAIFLLLAITALYTITGGLAAVIYTDTLQTVIMLVGSLILTGFAFHEVGGYDAFMEKYMKAIPTIVSDGNTTFQEKCYTPRADSFHIFRDPLTGDLPWPGFIFGMSILTLWYWCTDQVIVQRCLSAKNMSHVKGGCILCGYLKLMPMFIMVMPGMISRILYTEKIACVVPSECEKYCGTKVGCTNIAYPTLVVELMPNGLRGLMLSVMLASLMSSLTSIFNSASTLFTMDIYAKVRKRASEKELMIAGRLFILVLIGISIAWVPIVQSAQSGQLFDYIQSITSYLGPPIAAVFLLAIFWKRVNEPGAFWGLILGLLIGISRMITEFAYGTGSCMEPSNCPTIICGVHYLYFAIILFAISFITIVVISLLTKPIPDVHLYRLCWSLRNSKEERIDLDAEEENIQEGPKETIEIETQVPEKKKGIFRRAYDLFCGLEQHGAPKMTEEEEKAMKMKMTDTSEKPLWRTVLNVNGIILVTVAVFCHAYFA

SEQ ID NO: 2148 - protein, 375 aa, Homo sapiens
MMCQSEARQGPELRAAKWLHFPQLALRRRLGQLSCMSRPALKLRSWPLTVLYYLLPFGALRPLSRVGWRPVSRVALYKSVPTRLLSRAWGRLNQVELPHWLRRPVYSLYIWTFGVNMKEAAVEDLHHYRNLSEFFRRKLKPQARPVCGLHSVISPSDGRILNFGQVKNCEVEQVKGVTYSLESFLGPRMCTEDLPFPPAASCDSFKNQLVTREGNELYHCVIYLAPGDYHCFHSPTDWTVSHRRHFPGSLMSVNPGMARWIKELFCHNERVVLTGDWKHGFFSLTAVGATNVGSIRIYFDRDLHTNSPRHSKGSYNDFSFVTHTNREGVPMRKGEHLGEFNLGSTIVLIFEAPKDFNFQLKTGQKIRFGEALGSL

SEQ ID NO: 2149 - protein, 834 aa, Homo sapiens
MRLLDGKQTSRYSENACEKKIFSIYGHYPVVRAALRRKGWVEKKFHFLPKVIPDVEDEGARVNDDTCAKVKENQEMALEKTDNIHDVMSRLVKNEMPYLLWTIKRDIIDYHSLTYDQMLNHYAKTASFTTKIGLCVNMRSLPWYVPANPDSFFPRCYSLCTESEQQEFLEDFRRTMASSILKWVVSHQSCSRSSRSKPRDQREEAGSSDLSSRQDAENAEAKLRGLPGQLVDIACKVCQAYLGQLEHEDIDTSADAVEDLTEAEWEDLTQQYYSLVQVPLGSSIVLCIFKIQKVMMSFEPPTARDRQCQALLNRITSVNPQTDIDGLRNIWIIKPAAKSRGRGESPDIVCMDRVEEILELAAADHPLSRDNKWVVQKYIETPLLICDTKFDIRQWFLVTDWNPLTIWFYKESYLRFSTQRFSLDKLDSAIHLCNNAVQKYLKNDVGRSPLLPAHNMWTSTRFQEYLQRQGRGAVWGSVIYPSMKKAIAHAMKVAQDHVEPRKNSFELYGADFVLGRDFRPWLIEINSSPTMHPSTPVTAQLCAQVQEDTIKVAVDRSCDIGNFELLWRQPVVEPPPFSGSDLCVAGVSVRRARRQVLPVCNLKASASLLDAQPLKARGPSAMPDPAQGPPSPALQRDLGLKEEKGLPLALLAPLRGAAESGGAAQPTRTKAAGKVELPACPCRHVDSQAPNTGVPVAQPAKSWDPNQLNAHPLEPVLRGLKTAEGALRPPPGGKGEGTVCSRLPHHGHHVAACQTTGTTWDGGPGVCFLRQLLASELPMGPGLPRDPRAPPCLVCRGLLPPAGPCKRCRSFCAAVLQGASFVRLGGRSCSPRTP

SEQ ID NO: 2150 - protein, 2186 aa, Homo sapiens
MVNENTRMYIPEENHQGSNYGSPRPAHANMNANAAAGLAPEHIPTPGAALSWQAAIDAARQAKLMGSAGNATISTVSSTQRKRQQYGKPKKQGSTTATRPPRALLCLTLKNPIRRACISIVEWKPFEIIILLTIFANCVALAIYIPFPEDDSNATNSNLERVEYLFLIIFTVEAFLKVIAYGLLFHPNAYLRNGWNLLDFIIVVVGLFSAILEQATKADGANALGGKGAGFDVKALRAFRVLRPLRLVSGVPSLQVVLNSIIKAMVPLLHIALLVLFVIIIYAIIGLELFMGKMHKTCYNQEGIADVPAEDDPSPCALETGHGRQCQNGTVCKPGWDGPKHGITNFDNFAFAMLTVFQCITMEGWTDVLYWVNDAVGRDWPWIYFVTLIIIGSFFVLNLVLGVLSGEFSKEREKAKARGDFQKLREKQQLEEDLKGYLDWITQAEDIDPENEDEGMDEEKPRNMSMPTSETESVNTENVAGGDIEGENCGARLAHRISKSKFSRYWRRWNRFCRRKCRAAVKSNVFYWLVIFLVFLNTLTIASEHYNQPNWLTEVQDTANKALLALFTAEMLLKMYSLGLQAYFVSLFNRFDCFVVCGGILETILVETKIMSPLGISVLRCVRLLRIFKITRYWNSLSNLVASLLNSVRSIASLLLLLFLFIIIFSLLGMQLFGGKFNFDEMQTRRSTFDNFPQSLLTVFQILTGEDWNSVMYDGIMAYGGPSFPGMLVCIYFIILFICGNYILLNVFLAIAVDNLADAESLTSAQKEEEEEKERKKLARTASPEKKQELVEKPAVGESKEEKIELKSITADGESPPATKINMDDLQPNENEDKSPYPNPETTGEEDEEEPEMPVGPRPRPLSELHLKEKAVPMPEASAFFIFSSNNRFRLQCHRIVNDTIFTNLILFFILLSSISLAAEDPVQHTSFRNHILFYFDIVFTTIFTIEIALKILGNADYVFTSIFTLEIILKMTAYGAFLHKGSFCRNYFNILDLLVVSVSLISFGIQSSAINVVKILRVLRVLRPLRAINRAKGLKHVVQCVFVAIRTIGNIVIVTTLLQFMFACIGVQLFKGKLYTCSDSSKQTEAECKGNYITYKDGEVDHPIIQPRSWENSKFDFDNVLAAMMALFTVSTFEGWPELLYRSIDSHTEDKGPIYNYRVEISIFFIIYIIIIAFFMMNIFVGFVIVTFQEQGEQEYKNCELDKNQRQCVEYALKARPLRRYIPKNQHQYKVWYVVNSTYFEYLMFVLILLNTICLAMQHYGQSCLFKIAMNILNMLFTGLFTVEMILKLIAFKPKGYFSDPWNVFDFLIVIGSIIDVILSETNHYFCDAWNTFDALIVVGSIVDIAITEVNPAEHTQCSPSMNAEENSRISITFFRLFRVMRLVKLLSRGEGIRTLLWTFIKSFQALPYVALLIVMLFFIYAVIGMQVFGKIALNDTTEINRNNNFQTFPQAVLLLFRCATGEAWQDIMLACMPGKKCAPESEPSNSTEGETPCGSSFAVFYFISFYMLCAFLIINLFVAVIMDNFDYLTRDWSILGPHHLDEFKRIWAEYDPEAKGRIKHLDVVTLLRRIQPPLGFGKLCPHRVACKRLVSMNMPLNSDGTVMFNATLFALVRTALRIKTEGNLEQANEELRAIIKKIWKRTSMKLLDQVVPPAGDDEVTVGKFYATFLIQEYFRKFKKRKEQGLVGKPSQRNALSLQAGLRTLHDIGPEIRRAISGDLTAEEELDKAMKEAVSAASEDDIFRRAGGLFGNHVSYYQSDGRSAFPQTFTTQRPLHINKAGSSQGDTESPSHEKLVDSTFTPSSYSSTGSNANINNANNTALGRLPRPAGYPSTVSTVEGHGPPLSPAIRVQEVAWKLSSNRCHSRESQAAMAGQEETSQDETYEVKMNHDTEACSEPSLLSTEMLSYQDDENRQLTLPEEDKRDIRQSPKRGFLRSASLGRRASFHLECLKRQKDRGGDISQKTVLPLHLVHHQALAVAGLSPLLQRSHSPASFPRPFATPPATPGSRGWPPQPVPTLRLEGVESSEKLNSSFPSIHCGSWAETTPGGGGSSAARRVRPVSLMVPSQAGAPGRQFHGSASSLVEAVLISEGLGQFAQDPKFIEVTTQELADACDMTIEEMESAADNILSGGAPQSPNGALLPFVNCRDAGQDRAGGEEDAGCVRARGRPSEEELQDSRVYVSSL

SEQ ID NO: 2151 - protein, 998 aa, Homo sapiens [sequence omitted]

SEQ ID NO: 2152 - protein, 273 aa, Homo sapiens
MEAAPSRFMFLLFLLTCELAAEVAAEVEKSSDGPGAAQEPTWLTDVPAAMEFIAATEVAVIGFFQDLEIPAVPILHSMVQKFPGVSFGISTDSEVLTHYNITGNTICLFRLVDNEQLNLEDEDIESIDATKLSRFIEINSLHMVTEYNPVTVIGLFNSVIQIHLLLIMNKASPEYEENMHRYQKAAKLFQGKILFILVDSGMKENGKVISFFKLKESQLPALAIYQTLDDEWDTLPTAEVSVEHVQNFCDGFLSGKLLKENRESEGKTPKVEL

SEQ ID NO: 2153 - protein, 201 aa, Homo sapiens
MEYHPDLENLDEDGYTQLHFDSQSNTRIAVVSEKGSCAASPPWRLIAVILGILCLVILVIAVVLGTMGVLSSPCPPNWIIYEKSCYLFSMSLNSWDGSKRQCWQLGSNLLKIDSSNELGFIVKQVSSQPDNSFWIGLSRPQTEVPWLWEDGSTFSSNLFQIRTTATQENPSPNCVWIHVSVIYDQLCSVPSYSICEKKFSM

SEQ ID NO: 2154 - protein, 473 aa, Homo sapiens
MAQLEGYYFSAALSCTFLVSCLLFSAFSRALREPYMDEIFHLPQAQRYCEGHFSLSQWDPMITTLPGLYLVSIGVIKPAIWIFGWSEHVVCSIGMLRFVNLLFSVGNFYLLYLLFCKVQPRNKAASSIQRVLSTLTLAVFPTLYFFNFLYYTEAGSMFFTLFAYLMCLYGNHKTSAFLGFCGFMFRQTNIIWAVFCAGNVIAQKLTEAWKTELQKKEDRLPPIKGPFAEFRKILQFLLAYSMSFKNLSMLLLLTWPYILLGFLFCAFVVVNGGIVIGDRSSHEACLHFPQLFYFFSFTLFFSFPHLLSPSKIKTFLSLVWKRRILFFVVTLVSVFLVWKFTYAHKYLLADNRHYTFYVWKRVFQRYETVKYLLVPAYIFAGWSIADSLKSKSIFWNLMFFICLFTVIVPQKLLEFRYFILPYVIYRLNIPLPPTSRLICELSCYAVVNFITFFIFLNKTFQWPNSQDIQRFMW

SEQ ID NO: 2155 - protein, 636 aa, Homo sapiens
MAAEEEAAAGGKVLREENQCIAPVVSSRVSPGTRPTAMGSFSSHMTEFPRKRKGSDSDPSQSGIMTEKVVEKLSQNPLTYLLSTRIEISASSGSRVEDGEHQVKMKAFREAHSQTEKRRRDKMNNLIEELSAMIPQCNPMARKLDKLTVLRMAVQHLRSLKGLTNSYVGSNYRPSFLQDNELRHLILKTAEGFLFVVGCERGKILFVSKSVSKILNYDQASLTGQSLFDFLHPKDVAKVKEQLSSFDISPREKLIDAKTGLQVHSNLHAGRTRVYSGSRRSFFCRIKSCKISVKEEHGCLPNSKKKEHRKFYTIHCTGYLRSWPPNIVGMEEERNSKKDNSNFTCLVAIGRLQPYIVPQNSGEINVKPTEFITRFAVNGKFVYVDQRATAILGYLPQELLGTSCYEYFHQDDHNNLTDKHKAVLQSKEKILTDSYKFRAKDGSFVTLKSQWFSFTNPWTKELEYIVSVNTLVLGHSEPGEASFLPCSSQSSEESSRQSCMSVPGMSTGTVLGAGSIGTDIANEILDLQRLQSSSYLDDSSPTGLMKDTHTVNCRSMSNKELFPPSPSEMGELEATRQNQSTVAVHSHEPLLSDGAQLDFDALCDNDDTAMAAFMNYLEAEGGLGDPGDFSDIQWTL

SEQ ID NO: 2156 - protein, 608 aa, Homo sapiens
MEMRWFLSKIQDDFRGGKINLEKTQRLLEKLDIRCSYIHVKQIFKDNDRLKQGRITIEEFRAIYRIITHREEIIEIFNTYSENRKILLASNLAQFLTQEQYAAEMSKAIAFEIIQKYEPIEEVRKAHQMSLEGFTRYMDSRECLLFKNECRKVYQDMTHPLNDYFISSSHNTYLVSDQLLGPSDLWGYVSALVKGCRCLEIDCWDGAQNEPVVYHGYTLTSKLLFKTVIQAIHKYAFMTSDYPVVLSLENHCSTAQQEVMADNLQATFGESLLSDMLDDFPDTLPSPEALKFKILVKNKKIGTLKETHERKGSDKRGDNQDKETGVKKLPGVMLFKKKKTRKLKIALALSDLVIYTKAEKFKSFQHSRLYQQFNENNSIGETQARKLSKLRVHEFIFHTRKFITRIYPKATRADSSNFNPQEFWNIGCQMVALNFQTPGLPMDLQNGKFLDNGGSGYILKPHFLRESKSYFNPSNIKEGMPITLTIRLISGIQLPLTHSSSNKGDSLVIIEVFGVPNDQMKQQTRVIKKNAFSPRWNETFTFIIHVPELALIRFVVEGQGLIAGNEFLGQYTLPLLCMNKGYRRIPLFSRMGESLEPASLFVYVWYVR

SEQ ID NO: 2157 - protein, 712 aa, Homo sapiens
MDTSSKENIQLFCKTSVQPVGRPSFKTEYPSSEEKQPCCGELKVFLCALSFVYFAKALAEGYLKSTITQIERRFDIPSSLVGVIDGSFEIGNLLVITFVSYFGAKLHRPKIIGAGCVIMGVGTLLIAMPQFFMEQYKYERYSPSSNSTLSISPCLLESSSQLPVSVMEKSKSKISNECEVDTSSSMWIYVFLGNLLRGIGETPIQPLGIAYLDDFASEDNAAFYIGCVQTVAIIGPIFGFLLGSLCAKLYVDIGFVNLDHITITPKDPQWVGAWWLGYLIAGIISLLAAVPFWYLPKSLPRSQSREDSNSSSEKSKFIIDDHTDYQTPQGENAKIMEMARDFLPSLKNLFGNPVYFLYLCTSTVQFNSLFGMVTYKPKYIEQQYGQSSSRANFVIGLINIPAVALGIFSGGIVMKKFRISVCGAAKLYLGSSVFGYLLFLSLFALGCENSDVAGLTVSYQGTKPVSYHERALFSDCNSRCKCSETKWEPMCGENGITYVSACLAGCQTSNRSGKNIIFYNCTCVGIAASKSGNSSGIVGRCQKDNGCPQMFLYFLVISVITSYTLSLGGIPGYILLLRCIKPQLKSFALGIYTLAIRVLAGIPAPVYFGVLIDTSCLKWGFKRCGSRGSCRLYDSNVFRHIYLGLTVILGTVSILLSIAVLFILKKNYVSKHRSFITKRERTMVSTRFQKENYTTSDHLLQPNYWPGKETQL

SEQ ID NO: 2158 - protein, 363 aa, Homo sapiens
MANYIHVPPGSPEVPKLNVTVQDQEEHRCREGALSLLQHLRPHWDPQEVTLQLFTDGITNKLIGCYVGNTMEDVVLVRIYGNKTELLVDRDEEVKSFRVLQAHGCAPQLYCTFNNGLCYEFIQGEALDPKHVCNPAIFRLIARQLAKIHAIHAHNGWIPKSNLWLKMGKYFSLIPTGFADEDINKRFLSDIPSSQILQEEMTWMKEILSNLGSPVVLCHNDLLCKNIIYNEKQGDVQFIDYEYSGYNYLAYDIGNHFNEFAGVSDVDYSLYPDRELQSQWLRAYLEAYKEFKGFGTEVTEKEVEILFIQVNQFALASHFFWGLWALIQAKYSTIEFDFLGYAIVRFNQYFKMKPEVTALKVPE

SEQ ID NO: 2159 - protein, 956 aa, Homo sapiens
MTLLLLPLLLASLLASCSCNKANKHKPWIEAEYQGIVMENDNTVLLNPPLFALDKDAPLRYAGEICGFRLHGSGVPFEAVILDKATGEGLIRAKEPVDCEAQKEHTFTIQAYDCGEGPDGANTKKSHKATVHVRVNDVNEFAPVFVERLYRAAVTEGKLYDRILRVEAIDGDCSPQYSQICYYEILTPNTPFLIDNDGNIENTEKLQYSGERLYKFTVTAYDCGKKRAADDAEVEIQVKPTCKPSWQGWNKRIEYAPGAGSLALFPGIRLETCDEPLWNIQATIELQTSHVAKGCDRDNYSERALRKLCGAATGEVDLLPMPGPNANWTAGLSVHYSQDSSLIYWFNGTQAVQVPLGGPSGLGSGPQDSLSDHFTLSFWMKHGVTPNKGKKEEETIVCNTVQNEDGFSHYSLTVHGCRIAFLYWPLLESARPVKFLWKLEQVCDDEWHHYALNLEFPTVTLYTDGISFDPALIHDNGLIHPPRREPALMIGACWTEEKNKEKEKGDNSTDTTQGDPLSIHHYFHGYLAGFSVRSGRLESREVIECLYACREGLDYRDFESLGKGMKVHVNPSQSLLTLEGDDVETFNHALQHVAYMNTLRFATPGVRPLRLTTAVKCFSEESCVSIPEVEGYVVVLQPDAPQILLSGTAHFARPAVDFEGTNGVPLFPDLQITCSISHQVEAKKDESWQGTVTDTRMSDEIVHNLDGCEISLVGDDLDPERESLLLDTTSLQQRGLELTNTSAYLTIAGVESITVYEEILRQARYRLRHGAALYTRKFRLSCSEMNGRYSSNEFIVEVNVLHSMNRVAHPSHVLSSQQFLHRGHQPPPEMAGHSLASSHRNSMIPSAATLIIVVCVGFLVLMVVLGLVRIHSLHRRVSGAGGPPGASSDPKDPDLFWDDSALTIIVNPMESYQNRQSCVTGAVGGQQEDEDSSDSEVADSPSSDERRIIETPPHRY

SEQ ID NO: 2160 - protein, 602 aa, Homo sapiens
MAMRELVEAECGGANPLMKLAGHFTQDKALRQEGLRPGPWPPGAPASEAASKPLGVASEDELVAEFLQDQNAPLVSRAPQTFKMDDLLAEMQQIEQSNFRQAPQRAPGVADLALSENWAQEFLAAGDAVDVTQDYNETDWSQEFISEVTDPLSVSPARWAEEYLEQSEEKLWLGEPEGTATDRWYDEYHPEEDLQHTASDFVAKVDDPKLANSEGTSDAWVDQFTRPVNTSALDMEFERAKSAIESDVDFWDKLQAELEEMAKRDAEAHPWLSDYDDLTSATYDKGYQFEEENPLRDHPQPFEEGLRRLQEGDLPNAVLLFEAAVQQDPKHMEAWQYLGTTQAENEQELLAISALRRCLELKPDNQTALMALAVSFTNESLQRQACETLRDWLRYTPAYAHLVTPAEEGAGGAGLGPSKRILGSLLSDSLFLEVKELFLAAVRLDPTSIDPDVQCGLGVLFNLSGEYDKAVDCFTAALSVRPNDYLLWNKLGATLANGNQSEEAVAAYRRALELQPGYIRSRYNLGISCINLGAHREAVEHFLEALNMQRKSRGPRGEGGAMSENIWSTLRLALSMLGQSDAYGAADARDLSTLLTMFGLPQ

SEQ ID NO: 2161 - protein, 631 aa, Homo sapiens
MAMRELVEAECGGANPLMKLAGHFTQDKALRQEGLRPGPWPPGAPASEAASKPLGVASEDELVAEFLQDQNAPLVSRAPQTFKMDDLLAEMQQIEQSNFRQAPQRAPGVADLALSENWAQEFLAAGDAVDVTQDYNETDWSQEFISEVTDPLSVSPARWAEEYLEQSEEKLWLGEPEGTATDRWYDEYHPEEDLQHTASDFVAKVDDPKLANSEFLKFVRQIGEGQVSLESGAGSGRAQAEQWAAEFIQQQGTSDAWVDQFTRPVNTSALDMEFERAKSAIELQAELEEMAKRDAEAHPWLSDYDDLTSATYDKGYQFEEENPLRDHPQPFEEGLRRLQEGDLPNAVLLFEAAVQQDPKHMEAWQYLGTTQAENEQELLAISALRRCLELKPDNQTALMALAVSFTNESLQRQACETLRDWLRYTPAYAHLVTPAEEGAGGAGLGPSKRILGSLLSDSLFLEVKELFLAAVRLDPTSIDPDVQCGLGVLFNLSGEYDKAVDCFTAALSVRPNDYLLWNKLGATLANGNQSEEAVAAYRRALELQPGYIRSRYNLGISCINLGAHREAVEHFLEALNMQRKSRGPRGEGGAMSENIWSTLRLALSMLGQSDAYGAADARDLSTLLTMFGLPQ

SEQ ID NO: 2162 - protein, 547 aa, Homo sapiens
MDPMELRNVNIEPDDESSSGESAPDSYIGIGNSEKAAMSSQFANEDTESQKFLTNGFLGKKKLADYADEHHPGTTSFGMSSFNLSNAIMGSGILGLSYAMANTGIILFIIMLLAVAILSLYSVHLLLKTAKEGGSLIYEKLGEKAFGWPGKIGAFVSITMQNIGAMSSYLFIIKYELPEVIRAFMGLEENTGEWYLNGNYLIIFVSVGIILPLSLLKNLGYLGYTSGFSLTCMVFFVSVVIYKKFQIPCPLPVLDHSVGNLSFNNTLPMHVVMLPNNSESSDVNFMMDYTHRNPAGLDENQAKGSLHDSGVEYEAHSDDKCEPKYFVFNSRTAYAIPILVFAFVCHPEVLPIYSELKDRSRRKMQTVSNISITGMLVMYLLAALFGYLTFYGEVEDELLHAYSKVYTLDIPLLMVRLAVLVAVTLTVPIVLFPIRTSVITLLFPKRPFSWIRHFLIAAVLIALNNVLVILVPTIKYIFGFIGASSATMLIFILPAVFYLKLVKKETFRSPQKVGALIFLVVGIFFMIGSMALIIIDWIYDPPNSKHH

SEQ ID NO: 2163 - protein, 522 aa, Homo sapiens
MSLRVHTLPTLLGAVVRPGCRELLCLLMITVTVGPGASGVCPTACICATDIVSCTNKNLSKVPGNLFRLIKRLDLSYNRIGLLDSEWIPVSFAKLNTLILRHNNITSISTGSFSTTPNLKCLDLSSNKLKTVKNAVFQELKVLEVLLLYNNHISYLDPSAFGGLSQLQKLYLSGNFLTQFPMDLYVGRFKLAELMFLDVSYNRIPSMPMHHINLVPGKQLRGIYLHGNPFVCDCSLYSLLVFWYRRHFSSVMDFKNDYTCRLWSDSRHSRQVLLLQDSFMNCSDSIINGSFRALGFIHEAQVGERLMVHCDSKTGNANTDFIWVGPDNRLLEPDKEMENFYVFHNGSLVIESPRFEDAGVYSCIAMNKQRLLNETVDVTINVSNFTVSRSHAHEAFNTAFTTLAACVASIVLVLLYLYLTPCPCKCKTKRQKNMLHQSNAHSSILSPGPASDASADERKAGAGKRVVFLEPLKDTAAGQNGKVRLFPSEAVIAEGILKSTRGKSDSDSVNSVFSDTPFVAST

SEQ ID NO: 2164 - protein, 466 aa, Homo sapiens
MCNTNMSVPTDGAVTTSQIPASEQETLVLFYLGQYIMTKRLYDEKQQHIVYCSNDLLGDLFGVPSFSVKEHRKIYTMIYRNLVVVNQQESSDSGTSVSENRCHLEGGSDQKDLVQELQEEKPSSSHLVSRPSTSSRRRAISETEENSDELSGERQRKRHKSDSISLSFDESLALCVIREICCERSSSSESTGTPSNPDLDAGVSEHSGDWLDQDSVSDQFSVEFEVESLDSEDYSLSEEGQELSDEDDEVYQVTVYQAGESDTDSFEEDPEISLADYWKCTSCNEMNPPLPSHCNRCWALRENWLPEDKGKDKGEISEKAKLENSTQAEEGFDVPDCKKTIVNDSRESCVEENDDKITQASQSQESEDYSQPSTSSSIIYSSQEDVKEFEREETQDKEESVESSLPLNAIEPCVICQGRPKNGCIVHGKTGHLMACFTCAKKLKKRNKPCPVCRQPIQMIVLTYFP

SEQ ID NO: 2165 - protein, 346 aa, Homo sapiens
MLKSRLRMFLNELKLLVLTGGGRPRAEPQPRGGRGGGCGWAPFAGCSTRDGDGDEEEYYGSEPRARGLAGDKEPRAGPLPPPAPPLPPPGALDALSLSSSLDSGLRTPQCRICFQGPEQGELLSPCRCDGSVRCTHQPCLIRWISERGSWSCELCYFKYQVLAISTKNPLQWQAISLTVIEKVQIAAIVLGSLFLVASISWLIWSSLSPSAKWQRQDLLFQICYGMYGFMDVVCIGLIIHEGSSVYRIFKRWQAVNQQWKVLNYDKTKDIGGDAGGGTAGKSGPRNSRTGPTSGATSRPPAAQRMRTLLPQRCGYTILHLLGQLRPPDARSSSHSGREVVMRVTTV

SEQ ID NO: 2166 - protein, 907 aa, Homo sapiens
MDTSRLGVLLSLPVLLQLATGGSSPRSGVLLRGCPTHCHCEPDGRMLLRVDCSDLGLSELPSNLSVFTSYLDLSMNNISQLLPNPLPSLRFLEELRLAGNALTYIPKGAFTGLYSLKVLMLQNNQLRHVPTEALQNLRSLQSLRLDANHISYVPPSCFSGLHSLRHLWLDDNALTEIPVQAFRSLSALQAMTLALNKIHHIPDYAFGNLSSLVVLHLHNNRIHSLGKKCFDGLHSLETLDLNYNNLDEFPTAIRTLSNLKELGFHSNNIRSIPEKAFVGNPSLITIHFYDNPIQFVGRSAFQHLPELRTLTLNGASQITEFPDLTGTANLESLTLTGAQISSLPQTVCNQLPNLQVLDLSYNLLEDLPSFSVCQKLQKIDLRHNEIYEIKVDTFQQLLSLRSLNLAWNKIAIIHPNAFSTLPSLIKLDLSSNLLSSFPITGLHGLTHLKLTGNHALQSLISSENFPELKVIEMPYAYQCCAFGVCENAYKISNQWNKGDNSSMDDLHKKDAGMFQAQDERDLEDFLLDFEEDLKALHSVQCSPSPGPFKPCEHLLDGWLIRIGVWTIAVLALTCNALVTSTVFRSPLYISPIKLLIGVIAAVNMLTGVSSAVLAGVDAFTFGSFARHGAWWENGVGCHVIGFLSIFASESSVFLLTLAALERGFSVKYSAKFETKAPFSSLKVIILLCALLALTMAAVPLLGGSKYGASPLCLPLPFGEPSTMGYMVALILLNSLCFLMMTIAYTKLYCNLDKGDLENIWDCSMVKHIALLLFTNCILNCPVAFLSFSSLINLTFISPEVIKFILLVVVPLPACLNPLLYILFNPHFKEDLVSLRKQTYVWTRSKHPSLMSINSDDVEKQSCDSTQALVTFTSSSITYDLPPSSVPSPAYPVTESCHLSSVAFVPCL

SEQ ID NO: 2167 - protein, 588 aa, Homo sapiens
MADGVDHIDIYADVGEEFNQEAEYGGHDQIDLYDDVISPSANNGDAPEDRDYMDTLPPTVGDDVGKGAAPNVVYTYTGKRIALYIGNLTWWTTDEDLTEAVHSLGVNDILEIKFFENRANGQSKGFALVGVGSEASSKKLMDLLPKRELHGQNPVVTPCNKQFLSQFEMQSRKTTQSGQMSGEGKAGPPGGSSRAAFPQGGRGRGRFPGAVPGGDRFPGPAGPGGPPPPFPGNLIKHLVKGTRPLFLETRIPWHMGHSIEEIPIFGLKAGQTPPRPPLGPPGPPGPPGPPPPGQVLPPPLAGPPNRGDRPPPPVLFPGQPFGQPPLGPLPPGPPPPVPGYGPPPGPPPPQQGPPPPPGPFPPRPPGPLGPPLTLAPPPHLPGPPPGAPPPAPHVNPAFFPPPTNSGMPTSDSRGPPPTDPYGRPPPYDRGDYGPPGREMDTARTPLSEAEFEEIMNRNRAISSSAISRAVSDASAGDYGSAIETLVTAISLIKQSKVSADDRCKVLISSLQDCLHGIESKSYGSGSRRERSRERDHSRSREKSRRHKSRSRDRHDDYYRERSRERERHRDRDRDRDRERDREREYRHR

SEQ ID NO: 2168 - protein, 730 aa, Homo sapiens
MPKNSKVVKRELDDDVTESVKDLLSNEDAADDAFKTSELIVDGQEEKDTDVEEGSEVEDERPAWNSKLQYILAQVGFSVGLGNVWRFPYLCQKNGGGAYLLPYLILLMVIGIPLFFLELSVGQRIRRGSIGVWNYISPKLGGIGFASCVVCYFVALYYNVIIGWSLFYFSQSFQQPLPWDQCPLVKNASHTFVEPECEQSSATTYYWYREALNISSSISESGGLNWKMTICLLAAWVMVCLAMIKGIQSSGKIIYFSSLFPYVVLICFLIRAFLLNGSIDGIRHMFTPKLEIMLEPKVWREAATQVFFALGLGFGGVIAFSSYNKRDNNCHFDAVLVSFINFFTSVLATLVVFAVLGFKANVINEKCITQNSETIMKFLKMGNISQDIIPHHINLSTVTAEDYHLVYDIIQKVKEEEFPALHLNSCKIEEELNKAVQGTGLAFIAFTEAMTHFPASPFWSVMFFLMLVNLGLGSMFGTIEGIVTPIVDTFKVRKEILTVICCLLAFCIGLIFVQRSGNYFVTMFDDYSATLPLLIVVILENIAVCFVYGIDKFMEDLKDMLGFAPSRYYYYMWKYISPLMLLSLLIASVVNMGLSPPGYNAWIEDKASEEFLSYPTWGLVVCVSLVVFAILPVPVVFIVRRFNLIDDSSGNLASVTYKRGRVLKEPVNLEGDDTSLIHGKIPSEMPSPNFGKNIYRKQSGSPTLDTAPNGRYGIGYLMADIMPDMPESDL

SEQ ID NO: 2169 - protein, 352 aa, Homo sapiens
MAGTICFIMWVLFITDTVWSRSVRQVYEVHDSDDWTIHDFECPMECFCPPSFPTALYCENRGLKEIPAIPSRIWYLYLQNNLIETIPEKPFENATQLRWINLNKNKITNYGIEKGALSQLKKLLFLFLEDNELEEVPSPLPRSLEQLQLARNKVSRIPQGTFSNLENLTLLDLQNNKLVDNAFQRDTFKGLKNLMQLNMAKNALRNMPPRLPANTMQLFLDNNSIEGIPENYFNVIPKVAFLRLNHNKLSDEGLPSRGFDVSSILDLQLSHNQLTKVPRISAHLQHLHLDHNKIKSVNVSVICPSPSMLPAERDSFSYGPHLRYLRLDGNEIKPPIPMALMTCFRLLQAVII

SEQ ID NO: 2170 - protein, 694 aa, Homo sapiens
MPEFLEDPSVLTKDKLKSELVANNVTLPAGEQRKDVYVQLYLQHLTARNRPPLPAGTNSKGPPDFSSDEEREPTPVLGSGAAAAGRSRAAVGRKATKKTDKPRQEDKDDLDVTELTNEDLLDQLVKYGVNPGPIVGTTRKLYEKKLLKLREQGTESRSSTPLPTISSSAENTRQNGSNDSDRYSDNEEGKKKEHKKVKSTRDIVPFSELGTTPSGGGFFQGISFPEISTRPPLGSTELQAAKKVHTSKGDLPREPLVATNLPGRGQLQKLASERNLFISCKSSHDRCLEKSSSSSSQPEHSAMLVSTAASPSLIKETTTGYYKDIVENICGREKSGIQPLCPERSHISDQSPLSSKRKALEESESSQLISPPLAQAIRDYVNSLLVQGGVGSLPGTSNSMPPLDVENIQKRIDQSKFQETEFLSPPRKVPRLSEKSVEERDSGSFVAFQNIPGSELMSSFAKTVVSHSLTTLGLEVAKQSQHDKIDASELSFPFHESILKVIEEEWQQVDRQLPSLACKYPVSSREATQILSVPKVDDEILGFISEATPLGGIQAASTESCNQQLDLALCRAYEAAASALQIATHTAFVAKAMQADISQAAQILSSDPSRTHQALGILSKTYDAASYICEAAFDEVKMAAHTMGNATVGRRYLWLKDCKINLASKNKLASTPFKGGTLFGGEVCKVIKKRGNKH

SEQ ID NO: 2171 - protein, 660 aa, Homo sapiens
MQENLRFASSGDDIKIWDASSMTLVDKFNPHTSPHGISSICWSSNNNFLVTASSSGDKIVVSSCKCKPVPLLELAEGQKQTCVNLNSTSMYLVSGGLNNTVNIWDLKSKRVHRSLKDHKDQVTCVTYNWNDCYIASGSLSGEIILHSVTTNLSSTPFGHGSNQSVRHLKYSLFKKSLLGSVSDNGIVTLWDVNSQSPYHNFDSVHKAPASGICFSPVNELLFVTIGLDKRIILYDTSSKKLVKTLVADTPLTAVDFMPDGATLAIGSSRGKIYQYDLRMLKSPVKTISAHKTSVQCIAFQYSTVLTKSSLNKGCSNKPTTVNKRSVNVNAASGGVQNSGIVREAPATSIATVLPQPMTSAMGKGTVAVQEKAGLPRSINTDTLSKETDSGKNQDFSSFDDTGKSSLGDMFSPIRDDAVVNKGSDESIGKGDGFDFLPQLNSVFPPRKNPVTSSTSVLHSSPLNVFMGSPGKEENENRDLTAESKKIYMGKQESKDSFKQLAKLVTSGAESGNLNTSPSSNQTRNSEKFEKPENEIEAQLICEPPINGSSTPNPKIASSVTAGVASSLSEKIADSIGNNRQNAPLTSIQIRFIQNMIQETLDDFREACHRDIVNLQVEMIKQFHMQLNEMHSLLERYSVNEGLVAEIERLREENKRLRAHF

SEQ ID NO: 2172 - protein, 236 aa, Homo sapiens
MVSSGKKYSRKSGKPSVEDQFTRAYDFETEDKKDLSGSEEDVIEGKTAVIEKRRKKRSSAGVVEDMGGEVQNMLEGVGVDINKALLAKRKRLEMYTKASLKTSNQKIEHVWKTQQDQRQKLNQEYSQQFLTLFQQWDLDMQKAEEQEEKILNMFRQQQKILQQSRIVQSQRLKTIKQLYEQFIKSMEELEKNHDNLLTGAQNEFKKEMAMLQKKIMMETQQQEIASVRKSLQSMLF

SEQ ID NO: 2173 - protein, 694 aa, Homo sapiens
MQPAIQVWFGEDLPLSPRSPLTPRHGPGLANVCQYDEWIAVRHEATLLPMQEDLSIWLSGLLGIKVKAEKLLEELDNGVLLCQLIDVLQNMVKTCNSEESGNFPMRKVPCKKDAASGSFFARDNTANFLHWCRDIGVDETYLFESEGLVLHKDPRQVYLCLLEIGRIVSRYGVEPPVLVKLEKEIELEETLLNTSGPEDSISIPKSCCRHEELHEAVKHIAEDPPCSCSHRFSIEYLSEGRYRLGDKILFIRMLHGKHVMVRVGGGWDTLQGFLLKYDPCRILQFATLEQKILAFQKGVSNESVPDSPARTPQPPEMNPLSAVNMFQKQNSKPSVPVSIPKSKEKQGRPPGALVPASSLKGGNLGSMSVRSKLPNSPAASSHPKLKSSKGITKKPQAPSNNASSSLASLNPVGKNTSSPALPRTAPCISESPRKCISSPNTPKAKVIPAQNSADLPESTLLPNKCSGKTQPKYLKHNHISSRDNAVSHLAAHSNSSSKCPKLPKANIPVRPKPSFQSSAKMTKTSSKTIATGLGTQSQPSDGAPQAKPVPAQKLKSALNLNQPVSVSSVSPVKATQKSKDKNIVSATKKQPQNKSAFQKTGPSSLKSPGRTPLSIVSLPQSSTKTQTAPKSAQTVAKSQHSTKGPPRSGKTPASIRKPPSSVKDADSGDKKPTAKKKEDDDHYFVMTGSKKPRK

SEQ ID NO: 2174 - protein, 577 aa, Homo sapiens
MEGSGGGAGERAPLLGARRAAAAAAAAGAFAGRRAACGAVLLTELLERAAFYGITSNLVLFLNGAPFCWEGAQASEALLLFMGLTYLGSPFGGWLADARLGRARAILLSLALYLLGMLAFPLLAAPATRAALCGSARLLNCTAPGPDAAARCCSPATFAGLVLVGLGVATVKANITPFGADQVKDRGPEATRRFFNWFYWSINLGAILSLGGIAYIQQNVSFVTGYAIPTVCVGLAFVVFLCGQSVFITKPPDGSAFTDMFKILTYSCCSQKRSGERQSNGEGIGVFQQSSKQSLFDSCKMSHGGPFTEEKVEDVKALVKIVPVFLALIPYWTVYFQMQTTYVLQSLHLRIPEISNITTTPHTLPAAWLTMFDAVLILLLIPLKDKLVDPILRRHGLLPSSLKRIAVGMFFVMCSAFAAGILESKRLNLVKEKTINQTIGNVVYHAADLSLWWQVPQYLLIGISEIFASIAGLEFAYSAAPKSMQSAIMGLFFFFSGVGSFVGSGLLALVSIKAIGWMSSHTDFGNINGCYLNYYFFLLAAIQGATLLLFLIISVKYDHHRDHQRSRANGVPTSRRA

SEQ ID NO: 2175 - protein, 406 aa, Homo sapiens
MGECYSLQQAQAFYTFPFQQLMAEAPNMAVVNEQQMPEEVPAPAPAQEPVQEAPKGRKRKPRTTEPKQPVEPKKPVESKKSGKSAKSKEKQEKITDTFKVKRKVDRFNGVSEAELLTKTLPDILTFNLDIVIIGINPGLMAAYKGHHYPGPGNHFWKCLFMSGLSEVQLNHMDDHTLPGKYGIGFTNMVERTTPGSKDLSSKEFREGGRILVQKLQKYQPRIAVFNGKCIYEIFSKEVFGVKVKNLEFGLQPHKIPDTETLCYVMPSSSARCAQFPRAQDKVHYYIKLKDLRDQLKGIERNMDVQEVQYTFDLQLAQEDAKKMAVKEEKYDPGYEAAYGGAYGENPCSSEPCGFSSNGLIESVELRGESAFSGIPNGQWMTQSFTDQIPSFSNHCGTQEQEEESHA

SEQ ID NO: 2176 - protein, 623 aa, Homo sapiens
MERPEEGKQSPPPQPWGRLLRLGAEEGEPHVLLRKREWTIGRRRGCDLSFPSNKLVSGDHCRIVVDEKSGQVTLEDTSTSGTVINKLKVVKKQTCPLQTGDVIYLVYRKNEPEHNVAYLYESLSEKQGMTQESFEMVPCCVAQAGLKLLGSSDPPTLASQSIVITGSGGGGISPKGSGPSVASDEVSSFASALPDRKTASFSSLEPQDQEDLEPVKKKMRGDGDLDLNGQLLVAQPRRNAQTVHEDVRAAAGKPDKMEETLTCIICQDLLHDCVSLQPCMHTFCAACYSGWMERSSLCPTCRCPVERICKNHILNNLVEAYLIQHPDKSRSEEDVQSMDARNKITQDMLQPKVRRSFSDEEGSSEDLLELSDVDSESSDISQPYVVCRQCPEYRRQAAQPPHCPAPEGEPGAPQALGDAPSTSVSLTTAVQDYVCPLQGSHALCTCCFQPMPDRRAEREQDPRVAPQQCAVCLQPFCHLYWGCTRTGCYGCLAPFCELNLGDKCLDGVLNNNSYESDILKNYLATRGLTWKNMLTESLVALQRGVFLLSDYRVTGDTVLCYCCGLRSFRELTYQYRQNIPASELPVAVTSRPDCYWGRNCRTQVKAHHAMKFNHICEQTRFKN

SEQ ID NO: 2177 - protein, 461 aa, Homo sapiens
MKILFVEPAIFLSAFAMTLTGPLTTQYVYRRIWEETGNYTFSSDSNISECEKNKSSPIFAFQEEVQKKVSRFNLQMDISGLIPGLVSTFILLSISDHYGRKFPMILSSVGALATSVWLCLLCYFAFPFQLLIASTFIGAFCGNYTTFWGACFAYIVDQCKEHKQKTIRIAIIDFLLGLVTGLTGLSSGYFIRELGFEWSFLIIAVSLAVNLIYILFFLGDPVKECSSQNVTMSCSEGFKNLFYRTYMLFKNASGKRRFLLCLLLFTVITYFFVVIGIAPIFILYELDSPLCWNEVFIGYGSALGSASFLTSFLGIWLFSYCMEDIHMAFIGIFTTMTGMAMTAFASTTLMMFLARVPFLFTIVPFSVLRSMLSKVVRSTEQGTLFACIAFLETLGGVTAVSTFNGIYSATVAWYPGFTFLLSAGLLLLPAISLCVVKCTSWNEGSYELLIQEESSEDASDR

SEQ ID NO: 2178 - protein, 540 aa, Homo sapiens
MMGSPVSHLLAGFCVWVVLGWVGGSVPNLGPAEQEQNHYLAQLFGLYGENGTLTAGGLARLLHSLGLGRVQGLRLGQHGPLTGRAASPAADNSTHRPQNPELSVDVWAGMPLGPSGWGDLEESKAPHLPRGPAPSGLDLLHRLLLLDHSLADHLNEDCLNGSQLLVNFGLSPAAPLTPRQFALLCPALLYQIDSRVCIGAPAPAPPGDLLSALLQSALAVLLLSLPSPLSLLLLRLLGPRLLRPLLGFLGALAVGTLCGDALLHLLPHAQEGRHAGPGGLPEKDLGPGLSVLGGLFLLFVLENMLGLLRHRGLRPRCCRRKRRNLETRNLDPENGSGMALQPLQAAPEPGAQGQREKNSQHPPALAPPGHQGHSHGHQGGTDITWMVLLGDGLHNLTDGLAIGAAFSDGFSSGLSTTLAVFCHELPHELGDFAMLLQSGLSFRRLLLLSLVSGALGLGGAVLGVGLSLGPVPLTPWVFGVTAGVFLYVALVDMLPALLRPPEPLPTPHVLLQGLGLLLGGGLMLAITLLEERLLPVTTEG

SEQ ID NO: 2179 - protein, 366 aa, Homo sapiens
MSEEEQGSGTTTGCGLPSIEQMLAANPGKTPISLLQEYGTRIGKTPVYDLLKAEGQAHQPNFTFRVTVGDTSCTGQGPSKKAAKHKAAEVALKHLKGGSMLEPALEDSSSFSPLDSSLPEDIPVFTAAAAATPVPSVVLTRSPPMELQPPVSPQQSECNPVGALQELVVQKGWRLPEYTVTQESGPAHRKEFTMTCRVERFIEIGSGTSKKLAKRNAAAKMLLRVHTVPLDARDGNEVEPDDDHFSIGVGSRLDGLRNRGPGCTWDSLRNSVGEKILSLRSCSLGSLGALGPACCRVLSELSEEQAFHVSYLDIEELSLSGLCQCLVELSTQPATVCHGSATTREAARGEAARRALQYLKIMAGSK

SEQ ID NO: 2180 - protein, 396 aa, Homo sapiens
MWNSSDANFSCYHESVLGYRYVAVSWGVVVAVTGTVGNVLTLLALAIQPKLRTRFNLLIANLTLADLLYCTLLQPFSVDTYLHLHWRTGATFCRVFGLLLFASNSVSILTLCLIALGRYLLIAHPKLFPQVFSAKGIVLALVSTWVVGVASFAPLWPIYILVPVVCTCSFDRIRGRPYTTILMGIYFVLGLSSVGIFYCLIHRQVKRAAQALDQYKLRQASIHSNHVARTDEAMPGRFQELDSRLASGGPSEGISSEPVSAATTQTLEGDSSEVGDQINSKRAKQMAEKSPPEASAKAQPIKGARRAPDSSSEFGKVTRMCFAVFLCFALSYIPFLLLNILDARVQAPRVVHMLAANLTWLNGCINPVLYAAMNRQFRQAYGSILKRGPRSFHRLH

SEQ ID NO: 2181 - protein, 1214 aa, Homo sapiens
MAVRKKDGGPNVKYYEAADTVTQFDNVRLWLGKNYKKYIQAEPPTNKSLSSLVVQLLQFQEEVFGKHVSNAPLTKLPIKCFLDFKAGGSLCHILAAAYKFKSDQGWRRYDFQNPSRMDRNVEMFMTIEKSLVQNNCLSRPNIFLCPEIEPKLLGKLKDIIKRHQGTVTEDKNNASHVVYPVPGNLEEEEWVRPVMKRDKQVLLHWGYYPDSYDTWIPASEIEASVEDAPTPEKPRKVHAKWILDTDTFNEWMNEEDYEVNDDKNPVSRRKKISAKTLTDEVNSPDSDRRDKKGGNYKKRKRSPSPSPTPEAKKKNAKKGPSTPYTKSKRGHREEEQEDLTKDMDEPSPVPNVEEVTLPKTVNTKKDSESAPVKGGTMTDLDEQEDESMETTGKDEDENSTGNKGEQTKNPDLHEDNVTEQTHHIIIPSYAAWFDYNSVHAIERRALPEFFNGKNKSKTPEIYLAYRNFMIDTYRLNPQEYLTSTACRRNLAGDVCAIMRVHAFLEQWGLINYQVDAESRPTPMGPPPTSHFHVLADTPSGLVPLQPKTPQQTSASQQMLNFPDKGKEKPTDMQNFGLRTDMYTKKNVPSKSKAAASATREWTEQETLLLLEALEMYKDDWNKVSEHVGSRTQDECILHFLRLPIEDPYLEDSEASLGPLAYQPIPFSQSGNPVMSTVAFLASVVDPRVASAAAKSALEEFSKMKEEVPTALVEAHVRKVEEAAKVTGKADPAFGLESSGIAGTTSDEPERIEESGNDEARVEGQATDEKKEPKEPREGGGAIEEEAKEKTSEAPKKDEEKGKEGDSEKESEKSDGDPIVDPEKEKEPKEGQEEVLKEVVESEGERKTKVERDIGEGNLSTAAAAALAAAAVKAKHLAAVEERKIKSLVALLVETQMKKLEIKLRHFEELETIMDREREALEYQRQQLLADRQAFHMEQLKYAEMRARQQHFQQMHQQQQQPPPALPPGSQPIPPTGAAGPPAVHGLAVAPASVVPAPAGSGAPPGSLGPSEQIGQAGSTAGPQQQQPAGAPQPGAVPPGVPPPGPHGPSPFPNQQTPPSMMPGAVPGSGHPGVAGNAPLGLPFGMPPPPPPPAPSIIPFGSLADSISINLPAPPNLHGHHHHLPFAPGTLPPPNLPVSMANPLHPNLPATTTMPSSLPLGPGLGSAAAQSPAIVAAVQGNLLPSASPLPDPGTPLPPDPTAPSPGTVTPVPPPQ

SEQ ID NO: 2182 - protein, 583 aa, Homo sapiens
MSYGEIEGKFLGPREEVTSEPRCKKLKSTTESYVFHNHSNADFHRIQEKTGNDWVPVTIIDVRGHSYLQENKIKTTDLHRPLHDEMPGNRPDVIESIDSQVLQEARPPLVSADDEIYSTSKAFIGPIYKPPEKKKRNEGRNEAHVLNGINDRGGQKEKQKFNSEKSEIDNELFQFYKEIEELEKEKDGFENSCKESEPSQEQFVPFYEGHNNGLLKPDEEKKDLSNKAMPSHCDYQQNLGNEPDKYPCNGQVIPTFCDTSFTSFRPEWQSVYPFIVPYGPPLPSLNYHLNIQRFSGPPNPPSNIFQAQDDSQIQNGYYVNNCHVNWNCMTFDQNNEYTDCSENRSSVHPSGNGCSMQDRYVSNGFCEVRERCWKDHCMDKHNGTDRFVNQQFQEEKLNKLQKLLILLRGLPGSGKTTLSRILLGQNRDGIVFSTDDYFHHQDGYRYNVNQLGDAHDWNQNRAKQAIDQGRSPVIIDNTNIQAWEMKPYVEVAIGKGYRVEFHEPETWWKFDPEELEKRNKHGVSRKKIAQMLDRYEYQMSISIVMNSVEPSHKSTQRPPPPQGRQRWGGSLGSHNRVCVTNNH

SEQ ID NO: 2183 - protein, 859 aa, Homo sapiens
MACLHETRTPSPSFGGFVSTLSEASMRKLDPDTSDCTPEKDLTPTHVLQLHEQDAGGPGGAAGSPESRASRVRADEVRLQCQSGSGFLEGLFGCLRPVWTMIGKAYSTEHKQQQEDLWEVPFEEILDLQWVGSGAQGAVFLGRFHGEEVAVKKVRDLKETDIKHLRKLKHPNIITFKGVCTQAPCYCILMEFCAQGQLYEVLRAGRPVTPSLLVDWSMGIAGGMNYLHLHKIIHRDLKSPNMLITYDDVVKISDFGTSKELSDKSTKMSFAGTVAWMAPEVIRNEPVSEKVDIWSFGVVLWELLTGEIPYKDVDSSAIIWGVGSNSLHLPVPSSCPDGFKILLRQCWNSKPRNRPSFRQILLHLDIASADVLSTPQETYFKSQAEWREEVKLHFEKIKSEGTCLHRLEEELVMRRREELRHALDIREHYERKLERANNLYMELNALMLQLELKERELLRREQALERRCPGLLKPHPSRGLLHGNTMEKLIKKRNVPQKLSPHSKRPDILKTESLLPKLDAALSGVGLPGCPKGPPSPGRSRRGKTRHRKASAKGSCGDLPGLRTAVPPHEPGGPGSPGGLGGGPSAWEACPPALRGLHHDLLLRKMSSSSPDLLSAALGSRGRGATGGAGDPGSPPPARGDTPPSEGSAPGSTSPDSPGGAKGEPPPPVGPGEGVGLLGTGREGTSGRGGSRAGSQHLTPAALLYRAAVTRSQKRGISSEEEEGEVDSEVELTSSQRWPQSLNMRQSLSTFSSENPSDGEEGTASEPSPSGTPEVGSTNTDERPDERSDDMCSQGSEIPLDPPPSEVIPGPEPSSLPIPHQELLRERGPPNSEDSDCDSTELDNSNSVDALRPPASLPP

SEQ ID NO: 2184 - protein, 1342 aa, Homo sapiens
MRANDALQVLGLLFSLARGSEVGNSQAVCPGTLNGLSVTGDAENQYQTLYKLYERCEVVMGNLEIVLTGHNADLSFLQWIREVTGYVLVAMNEFSTLPLPNLRVVRGTQVYDGKFAIFVMLNYNTNSSHALRQLRLTQLTEILSGGVYIEKNDKLCHMDTIDWRDIVRDRDAEIVVKDNGRSCPPCHEVCKGRCWGPGSEDCQTLTKTICAPQCNGHCFGPNPNQCCHDECAGGCSGPQDTDCFACRHFNDSGACVPRCPQPLVYNKLTFQLEPNPHTKYQYGGVCVASCPHNFVVDQTSCVRACPPDKMEVDKNGLKMCEPCGGLCPKACEGTGSGSRFQTVDSSNIDGFVNCTKILGNLDFLITGLNGDPWHKIPALDPEKLNVFRTVREITGYLNIQSWPPHMHNFSVFSNLTTIGGRSLYNRGFSLLIMKNLNVTSLGFRSLKEISAGRIYISANRQLCYHHSLNWTKVLRGPTEERLDIKHNRPRRDCVAEGKVCDPLCSSGGCWGPGPGQCLSCRNYSRGGVCVTHCNFLNGEPREFAHEAECFSCHPECQPMEGTATCNGSGSDTCAQCAHFRDGPHCVSSCPHGVLGAKGPIYKYPDVQNECRPCHENCTQGCKGPELQDCLGQTLVLIGKTHLTMALTVIAGLVVIFMMLGGTFLYWRGRRIQNKRAMRRYLERGESIEPLDPSEKANKVLARIFKETELRKLKVLGSGVFGTVHKGVWIPEGESIKIPVCIKVIEDKSGRQSFQAVTDHMLAIGSLDHAHIVRLLGLCPGSSLQLVTQYLPLGSLLDHVRQHRGALGPQLLLNWGVQIAKGMYYLEEHGMVHRNLAARNVLLKSPSQVQVADFGVADLLPPDDKQLLYSEAKTPIKWMALESIHFGKYTHQSDVWSYGVTVWELMTFGAEPYAGLRLAEVPDLLEKGERLAQPQICTIDVYMVMVKCWMIDENIRPTFKELANEFTRMARDPPRYLVIKRESGPGIAPGPEPHGLTNKKLEEVELEPELDLDLDLEAEEDNLATTTLGSALSLPVGTLNRPRGSQSLLSPSSGYMPMNQGNLGESCQESAVSGSSERCPRPVSLHPMPRGCLASESSEGHVTGSEAELQEKVSMCRSRSRSRSPRPRGDSAYHSQRHSLLTPVTPLSPPGLEEEDVNGYVMPDTHLKGTPSSREGTLSSVGLSSVLGTEEEDEDEEYEYMNRRRRHSPPHPPRPSSLEELGYEYMDVGSDLSASLGSTQSCPLHPVPIMPTAGTTPDEDYEYMNRQRDGGGPGGDYAAMGACPASEQGYEEMRAFQGPGHQAPHVHYARLKTLRSLEATDSAFDNPDYWHSRLFPKANAQRT

SEQ ID NO: 2185 - protein, 1114 aa, Homo sapiens
MERSPGEGPSPSPMDQPSAPSDPTDQPPAAHAKPDPGSGGQPAGPGAAGEALAVLTSFGRRLLVLIPVYLAGAVGLSVGFVLFGLALYLGWRRVRDEKERSLRAARQLLDDEEQLTAKTLYMSHRELPAWVSFPDVEKAEWLNKIVAQVWPFLGQYMEKLLAETVAPAVRGSNPHLQTFTFTRVELGEKPLRIIGVKVHPGQRKEQILLDLNISYVGDVQIDVEVKKYFCKAGVKGMQLHGVLRVILEPLIGDLPFVGAVSMFFIRRPTLDINWTGMTNLLDIPGLSSLSDTMIMDSIAAFLVLPNRLLVPLVPDLQDVAQLRSPLPRGIIRIHLLAARGLSSKDKYVKGLIEGKSDPYALVRLGTQTFCSRVIDEELNPQWGETYEVMVHEVPGQEIEVEVFDKDPDKDDFLGRMKLDVGKVLQASVLDDWFPLQGGQGQVHLRLEWLSLLSDAEKLEQVLQWNWGVSSRPDPPSAAILVVYLDRAQDLPMVTSELYPPQLKKGNKEPNPMVQLSIQDVTQESKAVYSTNCPVWEEAFRFFLQDPQSQELDVQVKDDSRALTLGALTLPLARLLTAPELILDQWFQLSSSGPNSRLYMKLVMRILYLDSSEICFPTVPGCPGAWDVDSENPQRGSSVDAPPRPCHTTPDSQFGTEHVLRIHVLEAQDLIAKDRFLGGLVKGKSDPYVKLKLAGRSFRSHVVREDLNPRWNEVFEVIVTSVPGQELEVEVFDKDLDKDDFLGRCKVRLTTVLNSGFLDEWLTLEDVPSGRLHLRLERLTPRPTAAELEEVLQVNSLIQTQKSAELAAALLSIYMERAEDLPLRKGTKHLSPYATLTVGDSSHKTKTISQTSAPVWDESASFLIRKPHTESLELQVRGEGTGVLGSLSLPLSELLVADQLCLDRWFTLSSGQGQVLLRAQLGILVSQHSGVEAHSHSYSHSSSSLSEEPELSGGPPHITSSAPELRQRLTHVDSPLEAPAGPLGQVKLTLWYYSEERKLVSIVHGCRSLRQNGRDPPDPYVSLLLLPDKNRGTKRRTSQKKRTLSPEFNERFEWELPLDEAQRRKLDVSVKSNSSFMSRERELLGKVQLDLAETDLSQGVARWYDLMDNKDKGSS

SEQ ID NO: 2186 - protein, 523 aa, Homo sapiens
MSRQFTCKSGAAAKGGFSGCSAVLSGGSSSSFRAGSKGLSGGFGSRSLYSLGGVRSLNVASGSGKSGGYGFGRGRASGFAGSMFGSVALGPVCPTVCPPGGIHQVTVNESLLAPLNVELDPEIQKVRAQEREQIKALNNKFASFIDKVRFLEQQNQVLETKWELLQQLDLNNCKNNLEPILEGYISNLRKQLETLSGDRVRLDSELRNVRDVVEDYKKRYEEEINKRTAAENEFVLLKKDVDAAYANKVELQAKVESMDQEIKFFRCLFEAEITQIQSHISDMSVILSMDNNRNLDLDSIIDEVRTQYEEIALKSKAEAEALYQTKFQELQLAAGRHGDDLKNTKNEISELTRLIQRIRSEIENVKKQASNLETAIADAEQRGDNALKDARAKLDELEGALHQAKEELARMLREYQELMSLKLALDMEIATYRKLLESEECRMSGEFPSPVSISIISSTSGGSVYGFRPSMVSGGYVANSSNCISGVCSVRGGEGRSRGSANDYKDTLGKGSSLSAPSKKTSR

SEQ ID NO: 2187 - protein, 928 aa, Homo sapiens
MPPKTPRKTAATAAAAAAEPPAPPPPPPPEEDPEQDSGPEDLPLVRLEFEETEEPDFTALCQKLKIPDHVRERAWLTWEKVSSVDGVLGGYIQKKKELWGICIFIAAVDLDEMSFTFTELQKNIEISVHKFFNLLKEIDTSTKVDNAMSRLLKKYDVLFALFSKLERTCELIYLTQPSSSISTEINSALVLKVSWITFLLAKGEVLQMEDDLVISFQLMLCVLDYFIKLSPPMLLKEPYKTAVIPINGSPRTPRRGQNRSARIAKQLENDTRIIEVLCKEHECNIDEVKNVYFKNFIPFMNSLGLVTSNGLPEVENLSKRYEEIYLKNKDLDARLFLDHDKTLQTDSIDSFETQRTPRKSNLDEEVNVIPPHTPVRTVMNTIQQLMMILNSASDQPSENLISYFNNCTVNPKESILKRVKDIGYIFKEKFAKAVGQGCVEIGSQRYKLGVRLYYRVMESMLKSEEERLSIQNFSKLLNDNIFHMSLLACALEVVMATYSRSTSQNLDSGTDLSFPWILNVLNLKAFDFYKVIESFIKAEGNLTREMIKHLERCEHRIMESLAWLSDSPLFDLIKQSKDREGPTDHLESACPLNLPLQNNHTAADMYLSPVRSPKKKGSTTRVNSTANAETQATSAFQTQKPLKSTSLSLFYKKVYRLAYLRLNTLCERLLSEHPELEHIIWTLFQHTLQNEYELMRDRHLDQIMMCSMYGICKVKNIDLKFKIIVTAYKDLPHAVQETFKRVLIKEEEYDSIIVFYNSVFMQRLKTNILQYASTRPPTLSPIPHIPRSPYKFPSSPLRIPGGNIYISPLKSPYKISEGLPTPTKMTPRSRILVSIGESFGTSEKFQKINQMVCNSDRVLKRSAEGSNPPKPLKKLRFDIEGSDEADGSKHLPGESKFQQKLAEMTSTRTRMQKQKMNDSMDTSNKEEK

SEQ ID NO: 2188 - protein, 1392 aa, Homo sapiens
MVEPGQDLLLAALSESGISPNDLFDIDGGDAGLATPMPTPSVQQSVPLSALELGLETEAAVPVKQEPETVPTPALLNVRQPPSTTTFVLNQINHLPPLGSTIVMTKTPPVTTNRQTITLTKFIQTTASTRPSVSAPTVRNAMTSAPSKDQVQLKDLLKNNSLNELMKLKPPANIAQPVATAATDVSNGTVKKESSNKEGARMWINDMKMRSFSPTMKVPVVKEDDEPEEEDEEEMGHAETYAEYMPIKLKIGLRHPDAVVETSSLSSVTPPDVWYKTSISEETIDNGWLSALQLEAITYAAQQHETFLPNGDRAGFLIGDGAGVGKGRTIAGIIYENYLLSRKRALWFSVSNDLKYDAERDLRDIGAKNILVHSLNKFKYGKISSKHNGSVKKGVIFATYSSLIGESQSGGKYKTRLKQLLHWCGDDFDGVIVFDECHKAKNLCPVGSSKPTKTGLAVLELQNKLPKARVVYASATGASEPRNMAYMNRLGIWGEGTPFREFSDFIQAVERRGVGAMEIVAMDMKLRGMYIARQLSFTGVTFKIEEVLLSQSYVKMYNKAVKLWVIARERFQQAADLIDAEQRMKKSMWGQFWSAHQRFFKYLCIASKVKRVVQLAREEIKNGKCVVIGLQSTGEARTLEALEEGGGELNDFVSTAKGVLQSLIEKHFPAPDRKKLYSLLGIDLTAPSNNSSPRDSPCKENKIKKRKGEEITREAKKARKVGGLTGSSSDDSGSESDASDNEESDYESSKNMSSGDDDDFNPFLDESNEDDENDPWLIRKDHKKNKEKKKKKSIDPDSIQSALLASGLGSKRPSFSSTPVISPAPNSTPANSNTNSNSSLITSQDAVERAQQMKKDLLDKLEKLAEDLPPNTLDELIDELGGPENVAEMTGRKGRVVSNDDGSISYESRSELDVPVEILNITEKQRFMDGDKNIAIISEAASSGISLQADRRAKNQRRRVHMTLELPWSADRAIQQFGRTHRSNQVTAPEYVFLISELAGEQRFASIVAKRLESLGALTHGDRRATESRDLSRFNFDNKYGRNALEIVMKSIVNLDSPMVSPPPDYPGEFFKDVRQGLIGVGLINVEDRSGILTLDKDYNNIGKFLNRILGMEVHQQNALFQYFADTLTAVVQNAKKNGRYDMGILDLGSGDEKVRKSDVKKFLTPGYSTSGHVELYTISVERGMSWEEATKIWAELTGPDDGFYLSLQIRNNKKTAILVKEVNPKKKLFLVYRPNTGKQLKLEIYADLKKKYKKVVSDDALMHWLDQYNSSADTCTHAYWRGNCKKASLGLVCEIGLRCRTYYVLCGSVLSVWTKVEGVLASVSGTNVKMQIVRLRTEDGQRIVGLIIPANCVSPLVNLLSTSDQSQQLAVQQKQLWQQHHPQSITNLSNA

SEQ ID NO: 2189 - protein, 1923 aa, Homo sapiens [sequence omitted]

SEQ ID NO: 2190 - protein, 211 aa, Homo sapiens
MDAPGALAQTAAPGPGRKELKIVIVGDGGCGKTSLLMVYSQGSFPEHYAPSVFEKYTASVTVGSKEVTLNLYDTAGQEDYDRLRPLSYQNTHLVLICYDVMNPTSYDNVLIKWFPEVTHFCRGIPMVLIGCKTDLRKDKEQLRKLRAAQLEPITYMQGLSACEQIRAALYLECSAKFRENVEDVFREAAKVALSALKKAQRQKKRRLCLLL

SEQ ID NO: 2191 - protein, 1112 aa, Homo sapiens
MERHQPRLHHPAQGSAAGTPYPSSASLRGCRESKMPRRKGPQHPPPPSGPEEPGEKRPKFHLNIRTLTDDMLDKFASIRIPGSKKERPPLPNLKTAFASSDCSAAPLEMMENFPKPLSENELLELFEKMMEDMNLNEDKKAPLREKDFSIKKEMVMQYINTASKTGSLKRSRQISPQEFIHELKMGSADERLVTCLESLRVSLTSNPVSWVESFGHEGLGLLLDILEKLISGKIQEKVVKKNQHKVIQCLKALMNTQYGLERIMSEERSLSLLAKAVDPRHPNMMTDVVKLLSAVCIVGEESILEEVLEALTSAGEEKKIDRFFCIVEGLRHNSVQLQVACMQLINALVTSPDDLDFRLHIRNEFMRCGLKEILPNLKCIKNDGLDIQLKVFDEHKEEDLFELSHRLEDIRAELDEAYDVYNMVWSTVKETRAEGYFISILQHLLLIRNDYFIRQQYFKLIDECVSQIVLHRDGMDPDFTYRKRLDLDLTQFVDICIDQAKLEEFEEKASELYKKFEKEFTDHQETQAELQKKEAKINELQAELQAFKSQFGALPADCNIPLPPSKEGGTGHSALPPPPPLPSGGGVPPPPPPPPPPPLPGMRMPFSGPVPPPPPLGFLGGQNSPPLPILPFGLKPKKEFKPEISMRRLNWLKIRPHEMTENCFWIKVNENKYENVDLLCKLENTFCCQQKERREEEDIEEKKSIKKKIKELKFLDSKIAQNLSIFLSSFRVPYEEIRMMILEVDETRLAESMIQNLIKHLPDQEQLNSLSQFKSEYSNLCEPEQFVVVMSNVKRLRPRLSAILFKLQFEEQVNNIKPDIMAVSTACEEIKKSKSFSKLLELVLLMGNYMNAGSRNAQTFGFNLSSLCKLKDTKSADQKTTLLHFLVEICEEKYPDILNFVDDLEPLDKASKVSVETLEKNLRQMGRQLQQLEKELETFPPPEDLHDKFVTKMSRFVISAKEQYETLSKLHENMEKLYQSIIGYYAIDVKKVSVEDFLTDLNNFRTTFMQAIKENIKKREAEEKEKRVRIAKELAERERLERQQKKKRLLEMKTEGDETGVMDNLLEALQSGAAFRDRRKRTPMPKDVRQSLSPMSQRPVLKVCNHGNKPYL

SEQ ID NO: 2192 - protein, 349 aa, Homo sapiens
MEAARRSLCFRLEQGYTSRGSPLSPQSSIDSELSTSELEDDSISMGYKLQDLTDVQIMARLQEESLRQDYASTSASVSRHSSSVSLSSGKKGTCSDQEYDQYSLEDEEEFDHLPPPQPRLPRCSPFQRGIPHSQTFSSIRECRRSPSSQYFPSNNYQQQQYYSPQAQTPDQQPNRTNGDKLRRSMPNLARMPSTTAISSNISSPVTVRNSQSFDSSLHGAGNGISRIQSCIPSPGQLQHRVHSVGHFPVSIRQPLKATAYVSPTVQGSSNMPLSNGLQLYSNTGIPTPNKAAASGIMGRSALPRPSLAINGSNLPRSKIAQPVRSFLQPPKPLSSLSTLRDGNWRDGCY

SEQ ID NO: 2193 - protein, 980 aa, Homo sapiens
MVSKMIIENFEALKSWLSKTLEPICDADPSALAKYVLALVKKDKSEKELKALCIDQLDVFLQKETQIFVEKLFDAVNTKSYLPPPEQPSSGSLKVEFFPHQEKDIKKEEITKEEEREKKFSRRLNHSPPQSSSRYRENRSRDERKKDDRSRKRDYDRNPPRRDSYRDRYNRRRGRSRSYSRSRSRSWSKERLRERDRDRSRTRSRSRTRSRERDLVKPKYDLDRTDPLENNYTPVSSVPSISSGHYPVPTLSSTITVIAPTHHGNNTTESWSEFHEDQVDHNSYVRPPMPKKRCRDYDEKGFCMRGDMCPFDHGSDPVVVEDVNLPGMLPFPAQPPVVEGPPPPGLPPPPPILTPPPVNLRPPVPPPGPLPPSLPPVTGPPPPLPPLQPSGMDAPPNSATSSVPTVVTTGIHHQPPPAPPSLFTADTYDTDGYNPEAPSITNTSRPMYRHRVHAQRPNLIGLTSGDMDLPPREKPPNKSSMRIVVDSESRKRTIGSGEPGVPTKKTWFDKPNFNRTNSPGFQKKVQFGNENTKLELRKVPPELNNISKLNEHFSRFGTLVNLQVAYNGDPEGALIQFATYEEAKKAISSTEAVLNNRFIKVYWHREGSTQQLQTTSPKPLVQQPILPVVKQSVKERLGPVPSSTIEPAEAQSASSDLPQVLSTSTGLTKTVYNPAALKAAQKTLLVSTSAVDNNEAQKKKQEALKLQQDVRKRKQEILEKHIETQKMLISKLEKNKTMKSEDKAEIMKTLEVLTKNITKLKDEVKAASPGRCLPKSIKTKTQMQKELLDTELDLYKKMQAGEEVTELRRKYTELQLEAAKRGILSSGRGRGIHSRGRGAVHGRGRGRGRGRGVPGHAVVDHRPRALEISAFTESDREDLLPHFAQYGEIEDCQIDDSSLHAVITFKTRAEAEAAAVHGARFKGQDLKLAWNKPVTNISAVETEEVEPDEEEFQEESLVDDSLLQDDDEEEEDNESRSWRR

SEQ ID NO: 2194 - protein, 605 aa, Homo sapiens
MDDLDALLADLESTTSHISKRPVFLSEETPYSYPTGNHTYQEIAVPPPVPPPPSSEALNGTILDPLDQWQPSSSRFIHQQPQSSSPVYGSSAKTSSVSNPQDSVGSPCSRVGEEEHVYSFPNKQKSAEPSPTVMSTSLGSNLSELDRLLLELNAVQHNPPGFPADEANSSPPLPGALSPLYGVPETNSPLGGKAGPLTKEKPKRNGGRGLEDVRPSVESLLDELESSVPSPVPAITVNQGEMSSPQRVTSTQQQTRISASSATRELDELMASLSDFKGSWPLEEVVLLVSISSSVQEGEKYPHPCAARHRTPSLRSPDQPPPCPQFMAQGKTGSSSPPGGPPKPGSQLDSMLGSLQSDLNKLGVATVAKGVCGACKKPIAGQVVTAMGKTWHPEHFVCTHCQEEIGSRNFFERDGQPYCEKDYHNLFSPRCYYCNGPILDKVVTALDRTWHPEHFFCAQCGAFFGPEGFHEKDGKAYCRKDYFDMFAPKCGGCARAILENYISALNTLWHPECFVCRECFTPFVNGSFFEHDGQPYCEVHYHERRGSLCSGCQKPITGRCITAMAKKFHPEHFVCAFCLKQLNKGTFKEQNDKPYCQNCFLKLFC

SEQ ID NO: 2195 - protein, 611 aa, Homo sapiens
MASVQQGEKQLFEKFWRGTFKAVATPRPESIIVASITARKPLPRTEPQNNPVVPAQDGPSEKLGQHLATEPLGTNSWERDKTCRELGATRGHSASHDKDLTPPPSSRGKKKKKKSTRKKRRRSSSYSPSPVKKKKKKSSKKHKRRRSFSKKRRHSSSSPKSKRRDEKRHKKQSRSRPRKSHRHRHHRCPSRSQSSESRPSSCESRHRGRSPEEGQKSRRRHSRRCSKTLCKDSPEAQSSRPPSQPLQMLGYLSARGVITGSGSAADLFTKTASPLTTSRGRSQEYDSGNDTSSPPSTQTSSARSRGQEKGSPSGGLSKSRELNSGNTSDSGNSFTTSSPQNKGAMLENLSPTSRGRESRGFQSPCLECAEVKKSSLVPSTARSSPMKGCSRSSSYASTRSSSHSSRSPNPRASPRYTQSRSTSSEKRSYSRSPSYSSKSGKRSPPSRSSRSRRSPSYSRYSPSRERDPKYSEKDSQQRERERARRRRRSYSPMRKRRRDSPSHLEARRITSARKRPIPYYRPSPSSSGSLSSTSSWYSSSSSRSASRSYSRSRSRSRSRRRSRTRTSSSSSSRSPSPGSRSRSRSRSRSRSRSRSQSRSYSSADSYSSTRR

SEQ ID NO: 2196 - protein, 322 aa, Homo sapiens
MAAPPSPGRTADQADQVCTFLFKKPGRKGAAGLRKRPACDPEHGESSSSGDEGDTVAQPPRVAPRPRGLHSWQKAAHGDRRGEEAAPESLDVVYRSTRSAKPVGPEDMGATADFEQDTEKEHHTPTILKCSQRVQEALRGREHDHIYRGIHSYLRYLKPKDTSMGNSSSGMARKGPIRAPGHLRATVRWDYQPDICKDYKETGFCGFGDSCKFLHDRSDYKLGWEIERELEEGRYCICEDENHEVGSEEEEIPFRCFICRQAFQNPVVTKCRHYFCESCALEHFRATPRCYICDQPTGGIFNPAKELMAKLQKLQAAEGKKR

SEQ ID NO: 2197 - protein, 663 aa, Homo sapiens
MFLKAGRGNKVPPVRVYGPDCVVLMEPPLSKRNPPALRLADLATAQVQPLQNMTGFPALAGPPAHSQLRAAVAHLRLRDLGADPGVATTPLGPEHMAQASTLGLSPPSQAFPAHPEAPAAAARAAALVAHPGAGSYPCGGGSSGAQPSAPPPPAPPLPPTPSPPPPPPPPPPPALSGYTTTNSGGGGSSGKGHSRDFVLRRDLSATAPAAAMHGAPLGGEQRSGTGSPQHPAPPPHSAGMFISASGTYAGPDGSGGPALFPALHDTPGAPGGHPHPLNGQMRLGLAAAAAAAAAELYGRAEPPFAPRSGDAHYGAVAAAAAAALHGYGAVNLNLNLAAAAAAAAAGPGPHLQHHAPPPAPPPPPAPAQHPHQHHPHLPGAAGAFLRYMRQPIKQELICKWIDPDELAGLPPPPPPPPPPPPPPPAGGAKPCSKTFGTMHELVNHVTVEHVGGPEQSSHVCFWEDCPREGKPFKAKYKLINHIRVHTGEKPFPCPFPGCGKVFARSENLKIHKRTHTGEKPFKCEFDGCDRKFANSSDRKKHSHVHTSDKPYYCKIRGCDKSYTHPSSLRKHMKIHCKSPPPSPGPLGYSSVGTPVGAPLSPVLDPARSHSSTLSPQVTNLNEWYVCQASGAPSHLHTPSSNGTTSETEDEEIYGNPEVVRTIH

SEQ ID NO: 2198 - protein, 234 aa, Homo sapiens
MRKPDSKIVLLGDMNVGKTSLLQRYMERRFPDTVSTVGGAFYLKQWRSYNISIWDTAGREQFHGLGSMYCRGAAAIILTYDVNHRQSLVELEDRFLGLTDTASKDCLFAIVGNKVDLTEEGALAGQEKEECSPNMDAGDRVSPRAPKQVQLEDAVALYKKILKYKMLDEQDVPAAEQMCFETSAKTGYNVDLLFETLFDLVVPMILQQRAERPSHTVDISSHKPPKRTRSGCCA

SEQ ID NO: 2199 - protein, 520 aa, Homo sapiens
MMKYYDLAKFTIYQIAEMDKGLSELSPMQQALIYSFCENHDKAIEVLDGISWNRAEMTMCALLAKVQMKAKRTKEAVEVLKKALDAISHSDKGPDATAISADCLYNLGLCYMEEGNLQMTYKLAITDLTTAISMDKNSYTAFYNRALCYTKIRELQMALTDYGIVLLLDATETVKLNTFLNRGLIYVELGQYGFALEDFKQAALISRTNGSLCHATAMCHHRINEFEEAVNFFTWALKINPCFLDAYVGRGNSYMEYGHDEATKQAQKDFLKALHINPAYIKARISFGYNLQAQGKFQKAWNHFTIAIDTDPKNYLAYEGRAVVCLQMGNNFAAMQDINAAMKISTTAEFLTNRGVIHEFMGHKQNAMKDYQDAITLNPKYSLAYFNAGNIYFHHRQFSQASDYFSKALKFDPENEYVLMNRAITNTILKKYEEAKEDFANVIESCPFWAAVYFNRAHFYYCLKQYELAEEDLNKALSLKPNDALVYNFRAKVRGKIGLIEEAMADYNQALDLEDYASVI

SEQ ID NO: 2200 - protein, 819 aa, Homo sapiens
MWGLVRLLLAWLGGWGCMGRLAAPARAWAGSREHPGPALLRTRRSWVWNQFFVIEEYAGPEPVLIGKLHSDVDRGEGRTKYLLTGEGAGTVFVIDEATGNIHVTKSLDREEKAQYVLLAQAVDRASNRPLEPPSEFIIKVQDINDNPPIFPLGPYHATVPEMSNVGTSVIQVTAHDADDPSYGNSAKLVYTVLDGLPFFSVDPQTGVVRTAIPNMDRETQEEFLVVIQAKDMGGHMGGLSGSTTVTVTLSDVNDNPPKFPQSLYQFSVVETAGPGTLVGRLRAQDPDLGDNALMAYSILDGEGSEAFSISTDLQGRDGLLTVRKPLDFESQRSYSFRVEATNTLIDPAYLRRGPFKDVASVRVAVQDAPEPPAFTQAAYHLTVPENKAPGTLVGQISAADLDSPASPIRYSILPHSDPERCFSIQPEEGTIHTAAPLDREARAWHNLTVLATELGWSWGPERGWVPLLVAEWSAPAAPPQRSPVGSAVGIPQDSSAQASRVQVAIQTLDENDNAPQLAEPYDTFVCDSAAPGQLIQVIRALDRDEVGNSSHVSFQGPLGPDANFTVQDNRDGSASLLLPSRPAPPRHAPYLVPIELWDWGQPALSSTATVTVSVCRCQPDGSVASCWPEAHLSAAGLSTGALLAIITCVGALLALVVLFVALRRQKQEALMVLEEEDVRENIITYDDEGGGEEDTEAFDITALQNPDGAAPPAPGPPARRDVLPRARVSRQPRPPGPADVAQLLALRLREADEDPGVPPYDSVQVYGYEGRGSSCGSLSSLGSGSEAGGAPGPAEPLDDWGPLFRTLAELYGAKEPPAP

SEQ ID NO: 2201 - protein, 636 aa, Homo sapiens
MGQGPRSPHKVGRRFPAGGKRGRGAKGSGRPLPGRKRQPWPPPDGRSEPAPDSHPHLSPEALGYFRRALSALKEAPETGEERDLMVHNIMKEVETQALALSTNRTGSEMLQELLGFSPLKPLCRVWAALRSNLRTVACHRCGVHVLQSALLQLPRLLGSAAEEEEEEEEDGKDGPTETLEELVLGLAAEVCDDFLVYCGDTHGSFVVRTLLQVLGGTILESERARPRGSQSSEAQKTPAQECKPADFEVPETFLNRLQDLSSSFLKDIAVFITDKISSFCLQVALQVLHRKLPQFCAHLCNAVIGYLSTRGSSVDGSPLLLFLRDQTSSRLLEQVLLVLEPPRLQSLFEEHLQGQLQTLAAHPIANFPLQRLLDAVTTPELLSPVFEELSPVLEAVLAQGHPGVVIALVGACRRVGAYQAKVLQLLLEAFHCAEPSSRQVACVPLFATLMAYEVYYGLTEEEGAVPAEHQVAMAAARALGDVTVLGSLLLQHLLHFSTPGLVLRSLGALTGPQLLSLAQSPAGSHVLDAILTSPSVTRKLRRRVLQNLKGQYVALACSRHGSRVLDAIWSGAALRARKEIAAELGEQNQELIRDPFGHHVARNVALTTFLKRREAWEQQQGAVAKRRRALNSILED

SEQ ID NO: 2202 - protein, 2048 aa, Homo sapiens
MSGRQRTLFQTWGSSISRSSGTPGCSSGTERPQSPGSSKAPLPAAAEAQLESDDDVLLVAAYEAERQLCLENGGFCTSAGALWIYPTNCPVRDYQLHISRAALFCNTLVCLPTGLGKTFIAAVVMYNFYRWFPSGKVVFMAPTKPLVTQQIEACYQVMGIPQSHMAEMTGSTQASTRKEIWCSKRVLFLTPQVMVNDLSRGACPAAEIKCLVIDEAHKALGNYAYCQVVRELVKYTNHFRILALSATPGSDIKAVQQVITNLLIGQIELRSEDSPDILTYSHERKVEKLIVPLGEELAAIQKTYIQILESFARSLIQRNVLMRRDIPNLTKYQIILARDQFRKNPSPNIVGIQQGIIEGEFAICISLYHGYELLQQMGMRSLYFFLCGIMDGTKGMTRSKNELGRNEDFMKLYNHLECMFARTRSTSANGISAIQQGDKNKKFVYSHPKLKKLEEVVIEHFKSWNAENTTEKKRDETRVMIFSSFRDSVQEIAEMLSQHQPIIRVMTFVGHASGKSTKGFTQKEQLEVVKQFRDGGYNTLVSTCVGEEGLDIGEVDLIICFDSQKSPIRLVQRMGRTGRKRQGRIVIILSEGREERIYNQSQSNKRSIYKAISSNRQVLHFYQRSPRMVPDGINPKLHKMFITHGVYEPEKPSRNLQRKSSIFSYRDGMRQSSLKKDWFLSEEEFKLWNRLYRLRDSDEIKEITLPQVQFSSLQNEENKPAQESTTGIHQLSLSEWRLWQDHPLPTHQVDHSDRCRHFIGLMQMIEGMRHEEGECSYELEVESYLQMEDVTSTFIAPRNESNNLASDTFITHKKSSFIKNINQGSSSSVIESDEECAEIVKQTHIKPTKIVSLKKKVSKEIKKDQLKKENNHGIIDSVDNDRNSTVENIFQEDLPNDKRTSDTDEIAATCTINENVIKEPCVLLTECQFTNKSTSSLAGNVLDSGYNSFNDEKSVSSNLFLPFEEELYIVRTDDQFYNCHSLTKEVLANVERFLSYSPPPLSGLSDLEYEIAKGTALENLLFLPCAEHLRSDKCTCLLSHSAVNSQQNLELNSLKCINYPSEKSCLYDIPNDNISDEPSLCDCDVHKHNQNENLVPNNRVQIHRSPAQNLVGENNHDVDNSDLPVLSTDQDESLLLFEDVNTEFDDVSLSPLNSKSESLPVSDKTAISETPLVSQFLISDELLLDNNSELQDQITRDANSFKSRDQRGVQEEKVKNHEDIFDCSRDLFSVTFDLGFCSPDSDDEILEHTSDSNRPLDDLYGRYLEIKEISDANYVSNQALIPRDHSKNFTSGTVIIPSNEDMQNPNYVHLPLSAAKNEELLSPGYSQFSLPVQKKVMSTPLSKSNTLNSFSKIRKEILKTPDSSKEKVNLQRFKEALNSTFDYSEFSLEKSKSSGPMYLHKSCHSVEDGQLLTSNESEDDEIFRRKVKRAKGNVLNSPEDQKNSEVDSPLHAVKKRRFPINRSELSSSDESENFPKPCSQLEDFKVCNGNARRGIKVPKRQSHLKHVARKFLDDEAELSEEDAEYVSSDENDESENEQDSSLLDFLNDETQLSQAINDSEMRAIYMKSLRSPMMNNKYKMIHKTHKNINIFSQIPEQDETYLEDSFCVDEEESCKGQSSEEEVCVDFNLITDDCFANSKKYKTRRAVMLKEMMEQNCAHSKKKLSRIILPDDSSEEENNVNDKRESNIAVNPSTVKKNKQQDHCLNSVPSGSSAQSKVRSTPRVNPLAKQSKQTSLNLKDTISEVSDFKPQNHNEVQSTTPPFTTVDSQKDCRKFPVPQKDGSALEDSSTSGASCSKSRPHLAGTHTSLRLPQEGKGTCILVGGHEITSGLEVISSLRAIHGLQVEVCPLNGCDYIVSNRMVVERRSQSEMLNSVNKNKFIEQIQHLQSMFERICVIVEKDREKTGDTSRMFRRTKSYDSLLTTLIGAGIRILFSSCQEETADLLKELSLVEQRKNVGIHVPTVVNSNKSEALQFYLSIPNISYITALNMCHQFSSVKRMANSSLQEISMYAQVTHQKAEEIYRYIHYVFDIQMLPNDLNQDRLKSDI

SEQ ID NO: 2203 - protein, 776 aa, Homo sapiens
MAAPGDPQDELLPLAGPGSQWLRHRGEGENEAVTPKGATPAPQAGEPSPGLGARAREAASREAGSGPARQSPVAMETASTGVAGVSSAMDHTFSTTSKDGEGSCYTSLISDICYPPQEDSTYFTGILQKENGHVTISESPEELGTPGPSLPDVPGIESRGLFSSDSGIEMTPAESTEVNKILADPLDQMKAEAYKYIDITRPEEVKHQEQHHPELEDKDLDFKNKDTDISIKPEGVREPDKPAPVEGKIIKDHLLEESTFAPYIDDLSEEQRRAPQITTPVKITLTEIEPSVETTTQEKTPEKQDICLKPSPDTVPTVTVSEPEDDSPGSITPPSSGTEPSAAESQGKGSISEDELITAIKEAKGLSYETAENPRPVGQLADRPEVKARSGPPTIPSPLDHEASSAESGDSEIELVSEDPMAAEDALPSGYVSFGHVGGPPPSPASPSIQYSILREEREAELDSELIIESCDASSASEESPKREQDSPPMKPSALDAIREETGVRAEERAPSRRGLAEPGSFLDYPSTEPQPGPELPPGDGALEPETPMLPRKPEEDSSSNQSPAATKGPGPLGPGAPPPLLFLNKQKAIDLLYWRDIKQTGIVFGSFLLLLFSLTQFSVVSVVAYLALAALSATISFRIYKSVLQAVQKTDEGHPFKAYLELEITLSQEQIQKYTDCLQFYVNSTLKELRRLFLVQDLVDSLKFAVLMWLLTYVGALFNGLTLLLMAVVSMFTLPVVYVKHQAQIDQYLGLVRTHINAVVAKIQAKIPGAKRHAE

SEQ ID NO: 2204 - protein, 774 aa, Homo sapiens
MRGPIVLHICLAFCSLLLFSVATQCLAFPKIERRREIAHVHAEKGQSDKMNTDDLENSSVTSKQTPQLVVSEDPMMMSAVPSATSLNKAFSINKETQPGQAGLMQTERPGVSTPTESGVPSAEEVFGSSQPERISPESGLAKAMLTIAITATPSLTVDEKEELLTSTNFQPIVEEITETTKGFLKYMDNQSFATESQEGVGLGHSPSSYVNTKEMLTTNPKTEKFEADTDHRTTSFPGAESTAGSEPGSLTPDKEKPSQMTADNTQAAATKQPLETSEYTLSVEPETDSLLGAPEVTVSVSTAVPAASALSDEWDDTKLESVSRIRTPKLGDNEETQVRTEMSQTAQVSHEGMEGGQPWTEAAQVALGLPEGETHTGTALLIAHGNERSPAFTDQSSFTPTSLMEDMKVSIVNLLQSTGDFTESTKENDALFFLETTVSVSVYESEADQLLGNTMKDIITQEMTTAVQEPDATLSMVTQEQVATLELIRDSGKTEEEKEDPSPVSDVPGVTQLSRRWEPLATTISTTVVPLSFEVTPTVEEQMDTVTGPNEEFTPVLGSPVTPPGIMVGEPSISPALPALEASSERRTVVPSITRVNTAASYGLDQLESEEGQEDEDEEDEEDEDEEEEDEEEDEEDKDADSLDEGLDGDTELPGFTLPGITSQEPGLEEGNMDLLEGATYQVPDALEWEQQNQGLVRSWMEKLKDKAGYMSGMLVPVGVGIAGALFILGALYSIKVMNRRRRNGFKRHKRKQREFNSMQDRVMLLADSSEDEF

SEQ ID NO: 2205 - protein, 456 aa, Homo sapiens
MEASWGSFNAERGWYVSVQQPEEAEAEELSPLLSNELHRQRSPGVSFGLSVFNLMNAIMGSGILGLAYVLANTGVFGFSFLLLTVALLASYSVHLLLSMCIQTAVTSYEDLGLFAFGLPGKLVVAGTIIIQNIGAMSSYLLIIKTELPAAIAEFLTGDYSRYWYLDGQTLLIIICVGIVFPLALLPKIGFLGYTSSLSFFFMMFFALVVIIKKWSIPCPLTLNYVEKGFQISNVTDDCKPKLFHFSKESAYALPTMAFSFLCHTSILPIYCELQSPSKKRMQNVTNTAIALSFLIYFISALFGYLTFYDKVESELLKGYSKYLSHDVVVMTVKLCILFAVLLTVPLIHFPARKAVTMMFFSNFPFSWIRHFLITLALNIIIVLLAIYVPDIRNVFGVVGASTSTCLIFIFPGLFYLKLSREDFLSWKKLGAFVLLIFGILVGNFSLALIIFDWINK

SEQ ID NO: 2206 - protein, 337 aa, Homo sapiens
MNSTCIEEQHDLDHYLFPIVYIFVIIVSIPANIGSLCVSFLQAKKESELGIYLFSLSLSDLLYALTLPLWIDYTWNKDNWTFSPALCKGSAFLMYMNFYSSTAFLTCIAVDRYLAVVYPLKFFFLRTRRFALMVSLSIWILETIFNAVMLWEDETVVEYCDAEKSNFTLCYDKYPLEKWQINLNLFRTCTGYAIPLVTILICNRKVYQAVRHNKATENKEKKRIIKLLVSITVTFVLCFTPFHVMLLIRCILEHAVNFEDHSNSGKRTYTMYRITVALTSLNCVADPILYCFVTETGRYDMWNILKFCTGRCNTSQRQRKRILSVSTKDTMELEVLE

SEQ ID NO: 2207 - protein, 723 aa, Homo sapiens
MAEEEETAALTEKVIRTQRVFINLLDSYSSGNIGKFLSNCVVGASLEEITEEEEEEDENKSAMLEASSTKVKEGTFQIVGTLSKPDSPRPDFAVETYSAISREDLLMRLLECDVIIYNITESSQQMEEAIWAVSALSEEVSHFEKRKLFILLSTVMTWARSKALDPEDSEVPFTEEDYRRRKSHPNFLDHINAEKMVLKFGKKARKFAAYVVAAGLQYGAEGGMLHTFFKMAWLGEIPALPVFGDGTNVIPTIHVLDLAGVIQNVIDHVPKPHYLVAVDESVHTLEDIVKCISKNTGPGKIQKIPRENAYLTKDLTQDCLDHLLVNLRMEALFVKENFNIRWAAQTGFVENINTILKEYKQSRGLMPIKICILGPPAVGKSSIAKELANYYKLHHIQLKDVISEAIAKLEAIVAPNDVGEGEEEVEEEEEEENVEDAQELLDGIKESMEQNAGQLDDQYIIRFMKEKLKSMPCRNQGYILDGFPKTYDQAKDLFNQEDEEEEDDVRGRMFPFDKLIIPEFVCALDASDEFLKERVINLPESIVAGTHYSQDRFLRALSNYRDINIDDETVFNYFDELEIHPIHIDVGKLEDAQNRLAIKQLIKEIGEPRNYGLTDEEKAEEERKAAEERLAREAAEEAEREHQEAVEMAEKIARWEEWNKRLEEVKREERELLEAQSIPLRNYLMTYVMPTLIQGLNECCNVRPEDPVDFLAEYLFKNNPEAQ

SEQ ID NO: 2208 - protein, 354 aa, Homo sapiens
MPLEERRSSGERNDAAPTNHRRPGEKRASTAKQVSSVPFLGAAGHQQSLPSSWKASCSGPLVMASDSDVKMLLNFVNLASSDIKAALDKSAPCRRSVDHRKYLQKQLKRFSQKYSRLPRGLPGRAAEPYLKRGSEDRPRRLLLDLGPDSSPGGGGGCKEKVLRNPYREECLAKEQLPQRQHPEAAQPGQVPMRKRQLPASFWEEPRPTHSYHVGLEGGLGPREGPPYEGKKNCKGLEPLGPETTLVSMSPRALAEKEPLKMPGVSLVGRVNAWSCCPFQYHGQPIYPGPLGALPQSPVPSLGLWRKSPAFPGELAHLCKDVDGLGQKVCRPVVLKPIPTKPAVPPPIFNVFGYL

SEQ ID NO: 2209 - protein, 489 aa, Homo sapiens
MPGIKRILTVTILALCLPSPGNAQAQCTNGFDLDRQSGQCLDGVSLSSPRLECNGAISAHCNLCLPGSSDSSASASQVAGITDIDECRTIPEACRGDMMCVNQNGGYLCIPRTNPVYRGPYSNPYSTPYSGPYPAAAPPLSAPNYPTISRPLICRFGYQMDESNQCVDVDECATDSHQCNPTQICINTEGGYTCSCTDGYWLLEGQCLDIDECRYGYCQQLCANVPGSYSCTCNPGFTLNEDGRSCQDVNECATENPCVQTCVNTYGSFICRCDPGYELEEDGVHCSDMDECSFSEFLCQHECVNQPGTYFCSCPPGYILLDDNRSCQDINECEHRNHTCNLQQTCYNLQGGFKCIDPIRCEEPYLRISDNRCMCPAENPGCRDQPFTILYRDMDVVSGRSVPADIFQMQATTRYPGAYYIFQIKSGNEGREFYMRQTGPISATLVMTRPIKGPREIQLDLEMITVNTVINFRGSSVIRLRIYVSQYPF

SEQ ID NO: 2210 - protein, 1979 aa, Homo sapiens
MSSWLGGLGSGLGQSLGQVGGSLASLTGQISNFTKDMLMEGTEEVEAELPDSRTKEIEAIHAILRSENERLKKLCTDLEEKHEASEIQIKQQSTSYRNQLQQKEVEISHLKARQIALQDQLLKLQSAAQSVPSGAGVPATTASSSFAYGISHHPSAFHDDDMDFGDIISSQQEINRLSNEVSRLESEVGHWRHIAQTSKAQGTDNSDQSEICKLQNIIKELKQNRSQEIDDHQHEMSVLQNAHQQKLTEISRRHREELSDYEERIEELENLLQQGGSGVIETDLSKIYEMQKTIQVLQIEKVESTKKMEQLEDKIKDINKKLSSAENDRDILRREQEQLNVEKRQIMEECENLKLECSKLQPSAVKQSDTMTEKERILAQSASVEEVFRLQQALSDAENEIMRLSSLNQDNSLAEDNLKLKMRIEVLEKEKSLLSQEKEELQMSLLKLNNEYEVIKSTATRDISLDSELHDLRLNLEAKEQELNQSISEKETLIAEIEELDRQNQEATKHMILIKDQLSKQQNEGDSIISKLKQDLNDEKKRVHQLEDDKMDITKELDVQKEKLIQSEVALNDLHLTKQKLEDKVENLVDQLNKSQESNVSIQKENLELKEHIRQNEEELSRIRNELMQSLNQDSNSNFKDTLLKEREAEVRNLKQNLSELEQLNENLKKVAFDVKMENEKLVLACEDVRHQLEECLAGNNQLSLEKNTIVETLKMEKGEIEAELCWAKKRLLEEANKYEKTIEELSNARNLNTSALQLEHEHLIKLNQKKDMEIAELKKNIEQMDTDHKETKDVLSSSLEEQKQLTQLINKKEIFIEKLKERSSKLQEELDKYSQALRKNEILRQTIEEKDRSLGSMKEENNHLQEELERLREEQSRTAPVADPKTLDSVTELASEVSQLNTIKEHLEEEIKHHQKIIEDQNQSKMQLLQSLQEQKKEMDEFRYQHEQMNATHTQLFLEKDEEIKSLQKTIEQIKTQLHEERQDIQTDNSDIFQETKVQSLNIENGSEKHDLSKAETERLVKGIKERELEIKLLNEKNISLTKQIDQLSKDEVGKLTQIIQQKDLEIQALHARISSTSHTQDVVYLQQQLQAYAMEREKVFAVLNEKTRENSHLKTEYHKMMDIVAAKEAALIKLQDENKKLSTRFESSGQDMFRETIQNLSRIIREKDIEIDALSQKCQTLLAVLQTSSTGNEAGGVNSNQFEELLQERDKLKQQVKKMEEWKQQVMTTVQNMQHESAQLQEELHQLQAQVLVDSDNNSKLQVDYTGLIQSYEQNETKLKNFGQELAQVQHSIGQLCNTKDLLLGKLDIISPQLSSASLLTPQSAECLRASKSEVLSESSELLQQELEELRKSLQEKDATIRTLQENNHRLSDSIAATSELERKEHEQTDSEIKQLKEKQDVLQKLLKEKDLLIKAKSDQLLSSNENFTNKVNENELLRQAVTNLKERILILEMDIGKLKGENEKIVETYRGKETEYQALQETNMKFSMMLREKEFECHSMKEKALAFEQLLKEKEQGKTGELNQLLNAVKSMQEKTVVFQQERDQVMLALKQKQMENTALQNEVQRLRDKEFRSNQELERLRNHLLESEDSYTREALAAEDREAKLRKKVTVLEEKLVSSSNAMENASHQASVQVESLQEQLNVVSKQRDETALQLSVSQEQVKQYALSLANLQMVLEHFQQEEKAMYSAELEKQKQLIAEWKKNAENLEGKVISLQECLDEANAALDSASRLTEQLDVKEEQIEELKRQNELRQEMLDDVQKKLMSLANSSEGKVDKVLMRNLFIGHFHTPKNQRHEVLRLMGSILGVRREEMEQLFHDDQGGVTRWMTGWLGGGSKSVPNTPLRPNQQSVVNSSFSELFVKFLETESHPSIPPPKLSVHDMKPLDSPGRRKRDTNAPESFKDTAESRSGRRTDVNPFLAPRSAAVPLINPAGLGPGGPGHLLLKPISDVLPTFTPLPALPDNSAGVVLKDLLKQ

SEQ ID NO: 2211 - protein, 979 aa, Homo sapiens
MGDNPFQPKSNSKMAELFMECEEEELEPWQKKVKEVEDDDDDEPIFVGEISSSKPAISNILNRVNPSSYSRGLKNGALSRGITAAFKPTSQHYTNPTSNPVPASPINFHPESRSSDSSVIVQPFSKPGYITNSSRVVSNKSSELLFDLTQDTGLSHYQGGPTLSMAGMSESSFLSKRPSTSEVNNVNPKKPKPSESVSGANSSAVLPSVKSPSVTSSQAMLAKGTNTSSNQSKNGTPFPRACPKCNIHFNLLDPLKNHMKYCCPDMINNFLGLAKTEFSSTVNKNTTIDSEKGKLIMLVNDFYYGKHEGDVQEEQKTHTTFKCFSCLKILKNNIRFMNHMKHHLELEKQSSESWENHTTCQHCYRQFPTPFQLQCHIESTHTPHEFSTICKICELSFETEHVLLQHMKDNHKPGEMPYVCQVCNYRSSSFSDVETHFRTSHENTKNLLCPFCLKVIKIATPYMHHYMKHQKKGIHRCTKCRLQFLTCKEKMDHKTQHHRTFIKPKQLEGLPPGTKVTIRASVGPLQSGASPTPSISASASTLQLSPPRTKNITAKNPAKSNTSKPNTVKSNASKPNTSKPNGSKSKYKPKISNMQKKQSTLASSNKKSKVNTALRNLRYRRGIHKCIECCSEIKDFANHFPTYVHCSFCRYNTSCSKAYVNHMMSFHSNRPSKRFCIFKKHSENLRGITLVCLNCDFLSDVSGLDNMATHLSQHKTHTCQVVMQKVSVCIPTSEHLSELKKEAPAKEQEPVSKEIARPNMAERETETSNSESKQDKAASSKEKNGCNANSFEGSSTTKSEESITVSDKENETCLADQETGSKNIVSCDSNIGADKVEKKKQIQHVCQEMELKMCQSSENIILSDQIKDHNSSEARFSSKNIKDLRLASDNVSIDQFLRKRHEPESVSSDVSEQGSIHLEPLTPSEVLEYEATEILQKGSGDPSAKTDEVVSDQTDDIPGGNNPSTTEATVDLEDEKERS

SEQ ID NO: 2212 - protein, 682 aa, Homo sapiens
MNPQQQRMAAIGTDKELSDLLDFSAMFSPPVNSGKTRPTTLGSSQFSGSGIDERGGTTSWGTSGQPSPSYDSSRGFTDSPHYSDHLNDSRLGAHEGLSPTPFMNSNLMGKTSERGSFSLYSRDTGLPGCQSSLLRQDLGLGSPAQLSSSGKPGTAYYSFSATSSRRRPLHDSAALDPLQAKKVRKVPPGLPSSVYAPSPNSDDFNRESPSYPSPKPPTSMFASTFFMQDGTHNSSDLWSSSNGMSQPGFGGILGTSTSHMSQSSSYGNLHSHDRLSYPPHSVSPTDINTSLPPMSSFHRGSTSSSPYVAASHTPPINGSDSILGTRGNAAGSSQTGDALGKALASIYSPDHTSSSFPSNPSTPVGSPSPLTGTSQWPRPGGQAPSSPSYENSLHSLQSRMEDRLDRLDDAIHVLRNHAVGPSTSLPAGHSDIHSLLGPSHNAPIGSLNSNYGGSSLVASSRSASMVGTHREDSVSLNGNHSVLSSTVTTSSTDLNHKTQENYRGGLQSQSGTVVTTEIKTENKEKDENLHEPPSSDDMKSDDESSQKDIKVSSRGRTSSTNEDEDLNPEQKIEREKERRMANNARERLRVRDINEAFKELGRMCQLHLKSEKPQTKLLILHQAVAVILSLEQQVRERNLNPKAACLKRREEEKVSAVSAEPPTTLPGTHPGLSETTNPMGHM

SEQ ID NO: 2213 - protein, 357 aa, Homo sapiens
MAAAAKPNNLSLVVHGPGDLRLENYPIPEPGPNEVLLRMHSVGICGSDVHYWEYGRIGNFIVKKPMVLGHEASGTVEKVGSSVKHLKPGDRVAIEPGAPRENDEFCKMGRYNLSPSIFFCATPPDDGNLCRFYKHNAAFCYKLPDNVTFEEGALIEPLSVGIHACRRGGVTLGHKVLVCGAGPIGMVTLLVAKAMGAAQVVVTDLSATRLSKAKEIGADLVLQISKESPQEIARKVEGQLGCKPEVTIECTGAEASIQAGIYATRSGGNLVLVGLGSEMTTVPLLHAAIREVDIKGVFRYCNTWPVAISMLASKSVNVKPLVTHRFPLEKALEAFETFKKGLGLKIMLKCDPSDQNP

SEQ ID NO: 2214 - protein, 576 aa, Homo sapiens
MADANKAEVPGATGGDSPHLQPAEPPGEPRREPHPAEAEKQQPQHSSSSNGVKMENDESAKEEKSDLKEKSTGSKKANRFHPYSKDKNSGAGEKKGPNRNRVFISNIPYDMKWQAIKDLMREKVGEVTYVELFKDAEGKSRGCGVVEFKDEEFVKKALETMNKYDLSGRPLNIKEDPDGENARRALQRTGGSFPGGHVPDMGSGLMNLPPSILNNPNIPPEVISNLQAGRLGSTIFVANLDFKVGWKKLKEVFSIAGTVKRADIKEDKDGKSRGMGTVTFEQAIEAVQAISMFNGQFLFDRPMHVKMDDKSVPHEEYRSHDGKTPQLPRGLGGIGMGLGPGGQPISASQLNIGGVMGNLGPGGMGMDGPGFGGMNRIGGGIGFGGLEAMNSMGGFGGVGRMGELYRGAMTSSMERDFGRGDIGINRGFGDSFGRLGGGMGSMNSVTGGMGMGLDRMSSSFDRMGPGIGAILERSIDMDRGFLSGPMGSGMRERIGSKGNQIFVRNLPFDLTWQKLKEKFSQCGHVMFAEIKMENGKSKGCGTVRFDSPESAEKACRIMNGIKISGREIDVRLDRNA

SEQ ID NO: 2215 - protein, 662 aa, Homo sapiens
MMEPEEYRERGREMVDYICQYLSTVRERRVTPDVQPGYLRAQLPESAPEDPDSWDSIFGDIERIIMPGVVHWQSPHMHAYYPALTSWPSLLGDMLADAINCLGFTWASSPACTELEMNVMDWLAKMLGLPEHFLHHHPSSQGGGVLQSTVSESTLIALLAARKNKILEMKTSEPDADESCLNARLVAYASDQAHSSVEKAGLISLVKMKFLPVDDNFSLRGEALQKAIEEDKQRGLVPVFVCATLGTTGVCAFDCLSELGPICAREGLWLHIDAAYAGTAFLCPEFRGFLKGIEYADSFTFNPSKWMMVHFDCTGFWVKDKYKLQQTFSVNPIYLRHANSGVATDFMHWQIPLSRRFRSVKLWFVIRSFGVKNLQAHVRHGTEMAKYFESLVRNDPSFEIPAKRHLGLVVFRLKGPNCLTENVLKEIAKAGRLFLIPATIQDKLIIRFTVTSQFTTRDDILRDWNLIRDAATLILSQHCTSQPSPRVGNLISQIRGARAWACGTSLQSVSGAGDDPVQARKIIKQPQRVGAGPMKRENGLHLETLLDPVDDCFSEEAPDATKHKLSSFLFSYLSVQTKKKTVRSLSCNSVPVSAQKPLPTEASVKNGGSSRVRIFSRFPEDMMMLKKSAFKKLIKFYSVPSFPECSSQCGLQLPCCPLQAMV

SEQ ID NO: 2216 - protein, 466 aa, Homo sapiens
MLRSTSTVTLLSGGAARTPGAPSRRANVCRLRLTVPPESPVPEQCEKKIERKEQLLDLSNGEPTRKLPQGVVYGVVRRSDQNQQKEMVVYGWSTSQLKEEMNYIKDVRATLEKVRKRMYGDYDEMRQKIRQLTQELSVSHAQQEYLENHIQTQSSALDRFNAMNSALASDSIGLQKTLVDVTLENSNIKDQIRNLQQTYEASMDKLREKQRQLEVAQVENQLLKMKVESSQEANAEVMREMTKKLYSQYEEKLQEEQRKHSAEKEALLEETNSFLKAIEEANKKMQAAEISLEEKDQRIGELDRLIERMEKERHQLQLQLLEHETEMSGELTDSDKERYQQLEEASASLRERIRHLDDMVHCQQKKVKQMVEEIESLKKKLQQKQLLILQLLEKISFLEGENNELQSRLDYLTETQAKTEVETREIGVGCDLLPSQTGRTREIVMPSRNYTPYTRVLELTMKKTLT

SEQ ID NO: 2217 - protein, 1401 aa, Homo sapiens
MDGDSSSSSGGSGPAPGPGPEGEQRPEGEPLAPDGGSPDSTQTKAVPPEASPERSCSLHSCPLEDPSSSSGPPPTTSTLQPVGPSSPLAPAHFTYPRALQEYQGGSSLPGLGDRAALCSHGSSLSPSPAPSQRDGTWKPPAVQHHVVSVRQERAFQMPKSYSQLIAEWPVAVLMLCLAVIFLCTLAGLLGARLPDFSKPLLGFEPRDTDIGSKLVVWRALQALTGPRKLLFLSPDLELNSSSSHNTLRPAPRGSAQESAVRPRRMVEPLEDRRQENFFCGPPEKSYAKLVFMSTSSGSLWNLHAIHSMCRMEQDQIRSHTSFGALCQRTAANQCCPSWSLGNYLAVLSNRSSCLDTTQADAARTLALLRTCALYYHSGALVPSCLGPGQNKSPRCAQVPTKCSQSSAIYQLLHFLLDRDFLSPQTTDYQVPSLKYSLLFLPTPKGASLMDIYLDRLATPWGLADNYTSVTGMDLGLKQELLRHFLVQDTVYPLLALVAIFFGMALYLRSLFLTLMVLLGVLGSLLVAFFLYQVAFRMAYFPFVNLAALLLLSSVCANHTLIFFDLWRLSKSQLPSGGLAQRVGRTMHHFGYLLLVSGLTTSAAFYASYLSRLPAVRCLALFMGTAVLVHLALTLVWLPASAVLHERYLARGCARRARGRWEGSAPRRLLLALHRRLRGLRRAAAGTSRLLFQRLLPCGVIKFRYIWICWFAALAAGGAYIAGVSPRLRLPTLPPPGGQVFRPSHPFERFDAEYRQLFLFEQLPQGEGGHMPVVLVWGVLPVDTGDPLDPRSNSSLVRDPAFSASGPEAQRWLLALCHRARNQSFFDTLQEGWPTLCFVETLQRWMESPSCARLGPDLCCGHSDFPWAPQFFLHCLKMMALEQGPDGTQDLGLRFDAHGSLAALVLQFQTNFRNSPDYNQTQLFYNEVSHWLAAELGMAPPGLRRGWFTSRLELYSLQHSLSTEPAVVLGLALALAFATLLLGTWNVPLSLFSVAAVAGTVLLTVGLLVLLEWQLNTAEALFLSASVGLSVDFTVNYCISYHLCPHPDRLSRVAFSLRQTSCATAVGAAALFAAGVLMLPATVLLYRKLGIILMMVKCVSCGFASFFFQSLCCFFGPEKNCGQILWPCAHLPWDAGTGDPGGEKAGRPRPGSVGGMPGSCSEQYELQPLARRRSPSFDTSTATSKLSHRPSVLSEDLQLHDGPCCSRPPPAPASPRELLLDHQAVFSQCPALQTSSPYKQAGPSPKTRARQDSQGEEAEPLPASPEAPAHSPKAKAADPPDGFCSSASTLEGLSVSDETCLSTSEPSARVPDSVGVSPDDLDDTGQPVLERGQLNGKRDTLWLALRETVYDPSLPASHHSSLSWKGRGGPGDGSPVVLPNSQPDLPDVWLRRPSTHTSGYSS

SEQ ID NO: 2218 - protein, 1244 aa, Homo sapiens
MSGGGEQLDILSVGILVKERWKVLRKIGGGGFGEIYDALDMLTRENVALKVESAQQPKQVLKMEVAVLKKLQGKDHVCRFIGCGRNDRFNYVVMQLQGRNLADLRRSQSRGTFTISTTLRLGRQILESIESIHSVGFLHRDIKPSNFAMGRFPSTCRKCYMLDFGLARQFTNSCGDVRPPRAVAGFRGTVRYASINAHRNREMGRHDDLWSLFYMLVEFVVGQLPWRKIKDKEQVGSIKERYDHRLMLKHLPPEFSIFLDHISSLDYFTKPDYQLLTSVFDNSIKTFGVIESDPFDWEKTGNDGSLTTTTTSTTPQLHTRLTPAAIGIANATPIPGDLLRENTDEVFPDEQLSDGENGIPVGVSPDKLPGSLGHPRPQEKDVWEEMDANKNKIKLGICKAATEEENSHGQANGLLNAPSLGSPIRVRSEITQPDRDIPLVRKLRSIHSFELEKRLTLEPKPDTDKFLETCLEKMQKDTSAGKESILPALLHKPCVPAVSRTDHIWHYDEEYLPDASKPASANTPEQADGGGSNGFIAVNLSSCKQEIDSKEWVIVDKEQDLQDFRTNEAVGHKTTGSPSDEEPEVLQVLEASPQDEKLQLGPWAENDHLKKETSGVVLALSAEGPPTAASEQYTDRLELQPGAASQFIAATPTSLMEAQAEGPLTAITIPRPSVASTQSTSGSFHCGQQPEKKDLQPMEPTVELYSPRENFSGLVVTEGEPPSGGSRTDLGLQIDHIGHDMLPNIRESNKSQDLGPKELPDHNRLVVREFENLPGETEEKSILLESDNEDEKLSRGQHCIEISSLPGDLVIVEKDHSATTEPLDVTKTQTFSVVPNQDKNNEIMKLLTVGTSEISSRDIDPHVEGQIGQVAEMQKNKISKDDDIMSEDLPGHQGDLSTFLHQEGKREKITPRNGELFHCVSENEHGAPTRKDMVRSSFVTRHSRIPVLAQEIDSTLESSSPVSAKEKLLQKKAYQPDLVKLLVEKRQFKSFLGDLSSASDKLLEEKLATVPAPFCEEEVLTPFSRLTVDSHLSRSAEDSFLSPIISQSRKSKIPRPVSWVNTDQVNSSTSSQFFPRPPPGKPPTRPGVEARLRRYKVLGSSNSDSDLFSRLAQILQNGSQKPRSTTQCKSPGSPHNPKTPPKSPVVPRRSPSASPRSSSLPRTSSSSPSRAGRPHHDQRSSSPHLGRSKSPPSHSGSSSSRRSCQQEHCKPSKNGLKGSGSLHHHSASTKTPQGKSKPASKLSR

SEQ ID NO: 2219 - protein, 1040 aa, Homo sapiens
MAAAPALKHWRTTLERVEKFVSPLYFTDCNLRGRLFGASCPVAVLSSFLTPERLPYQEAVQRDFRPAQVGDSFGPTWWTCWFRVELTIPEAWVGQEVHLCWESDGEGLVWRDGEPVQGLTKEGEKTSYVLTDRLGERDPRSLTLYVEVACNGLLGAGKGSMIAAPDPEKMFQLSRAELAVFHRDVHMLLVDLELLLGIAKGLGKDNQRSFQALYTANQMVNVCDPAQPETFPVAQALASRFFGQHGGESQHTIHATGHCHIDTAWLWPFKETVRKCARSWVTALQLMERNPEFIFACSQAQQLEWVKSRYPGLYSRIQEFACRGQFVPVGGTWVEMDGNLPSGEAMVRQFLQGQNFFLQEFGKMCSEFWLPDTFGYSAQLPQIMHGCGIRRFLTQKLSWNLVNSFPHHTFFWEGLDGSRVLVHFPPGDSYGMQGSVEEVLKTVANNRDKGRANHSAFLFGFGDGGGGPTQTMLDRLKRLSNTDGLPRVQLSSPRQLFSALESDSEQLCTWVGELFLELHNGTYTTHAQIKKGNRECERILHDVELLSSLALARSAQFLYPAAQLQHLWRLLLLNQFHDVVTGSCIQMVAEEAMCHYEDIRSHGNTLLSAAAAALCAGEPGPEGLLIVNTLPWKRIEVMALPKPGGAHSLALVTVPSMGYAPVPPPTSLQPLLPQQPVFVVQETDGSVTLDNGIIRVKLDPTGRLTSLVLVASGREAIAEGAVGNQFVLFDDVPLYWDAWDVMDYHLETRKPVLGQAGTLAVGTEGGLRGSAWFLLQISPNSRLSQEVVLDVGCPYVRFHTEVHWHEAHKFLKVEFPARVRSSQATYEIQFGHLQRPTHYNTSWDWARFEVWAHRWMDLSEHGFGLALLNDCKYGASVRGSILSLSLLRAPKAPDATADTGRHEFTYALMPHKGSFQDAGVIQAAYSLNFPLLALPAPSPAPATSWSAFSVSSPAVVLETVKQAESSPQRRSLVLRLYEAHGSHVDCWLHLSLPVQEAILCDLLERPDPAGHLTLRDNRLKLTFSPFQVLSLLLVLQPPPH

SEQ ID NO: 2220 - protein, 362 aa, Homo sapiens
MASGSAGKPTGEAASPAPASAIGGASSQPRKRLVSVCDHCKGKMQLVADLLLLSSEARPVLFEGPASSGAGAESFEQCRDTIIARTKGLSILTHDVQSQLNMGRFGEAGDSLVELGDLVVSLTECSAHAAYLAAVATPGAQPAQPGLVDRYRVTRCRHEVEQGCAVLRATPLADMTPQLLLEVSQGLSRNLKFLTDACALASDKSRDRFSREQFKLGVKCMSTSASALLACVREVKVAPSELARSRCALFSGPLVQAVSALVGFATEPQFLGRAAAVSAEGKAVQTAILGGAMSVVSACVLLTQCLRDLAQHPDGGAKMSDHRERLRNSACAVSEGCTLLSQALRERSSPRTLPPVNSNSVN

SEQ ID NO: 2221 - protein, 521 aa, Homo sapiens
MLAKGLPPRSVLVKGCQTFLSAPREGLGRLRVPTGEGAGISTRSPRPFNEIPSPGDNGWLNLYHFWRETGTHKVHLHHVQNFQKYGPIYREKLGNVESVYVIDPEDVALLFKSEGPNPERFLIPPWVAYHQYYQRPIGVLLKKSAAWKKDRVALNQEVMAPEATKNFLPLLDAVSRDFVSVLHRRIKKAGSGNYSGDISDDLFRFAFESITNVIFGERQGMLEEVVNPEAQRFIDAIYQMFHTSVPMLNLPPDLFRLFRTKTWKDHVAAWDVIFSKADIYTQNFYWELRQKGSVHHDYRGILYRLLGDSKMSFEDIKANVTEMLAGGVDTTSMTLQWHLYEMARNLKVQDMLRAEVLAARHQAQGDMATMLQLVPLLKASIKETLRLHPISVTLQRYLVNDLVLRDYMIPAKTLVQVAIYALGREPTFFFDPENFDPTRWLSKDKNITYFRNLGFGWGVRQCLGRRIAELEMTIFLINMLENFRVEIQHLSDVGTTFNLILMPEKPISFTFWPFNQEATQQ

SEQ ID NO: 2222 - protein, 519 aa, Homo sapiens
MAEERVATRTQFPVSTESQKPRQKKAPEFPILEKQNWLIHLHYIRKDYEACKAVIKEQLQETQGLCEYAIYVQALIFRLEGNIQESLELFQTCAVLSPQSADNLKQVARSLFLLGKHKAAIEVYNEAAKLNQKDWEISHNLGVCYIYLKQFNKAQDQLHNALNLNRHDLTYIMLGKIHLLEGDLDKAIEVYKKAVEFSPENTELLTTLGLLYLQLGIYQKAFEHLGNALTYDPTNYKAILAAGSMMQTHGDFDVALTKYRVVACAVPESPPLWNNIGMCFFGKKKYVAAISCLKRANYLAPFDWKILYNLGLVHLTMQQYASAFHFLSAAINFQPKMGELYMLLAVALTNLEDIENAKRAYAEAVHLDKCNPLVNLNYAVLLYNQGEKKNALAQYQEMEKKVSLLKDNSSLEFDSEMVEMAQKLGAALQVGEALVWTKPVKDPKSKHQTTSTSKPASFQQPLGSNQALGQAMSSAAAYRTLPSGAGGTSQFTKPPSLPLEPEPAVESSPTETSEQIREK

SEQ ID NO: 2223 - protein, 882 aa, Homo sapiens
MEPAPARSPRPQQDPARPQEPTMPPPETPSEGRQPSPSPSPTERAPASEEEFQFLRCQQCQAEAKCPKLLPCLHTLCSGCLEASGMQCPICQAPWPLGADTPALDNVFFESLQRRLSVYRQIVDAQAVCTRCKESADFWCFECEQLLCAKCFEAHQWFLKHEARPLAELRNQSVREFLDGTRKTNNIFCSNPNHRTPTLTSIYCRGCSKPLCCSCALLDSSHSELKCDISAEIQQRQEELDAMTQALQEQDSAFGAVHAQMHAAVGQLGRARAETEELIRERVRQVVAHVRAQERELLEAVDARYQRDYEEMASRLGRLDAVLQRIRTGSALVQRMKCYASDQEVLDMHGFLRQALCRLRQEEPQSLQAAVRTDGFDEFKVRLQDLSSCITQGKDAAVSKKASPEAASTPRDPIDVDLPEEAERVKAQVQALGLAEAQPMAVVQSVPGAHPVPVYAFSIKGPSYGEDVSNTTTAQKRKCSQTQCPRKVIKMESEEGKEARLARSSPEQPRPSTSKAVSPPHLDGPPSPRSPVIGSEVFLPNSNHVASGAGEAEERVVVISSSEDSDAENSSSRELDDSSSESSDLQLEGPSTLRVLDENLADPQAEDRPLVFFDLKIDNETQKISQLAAVNRESKFRVVIQPEAFFSIYSKAVSLEVGLQHFLSFLSSMRRPILACYKLWGPGLPNFFRALEDINRLWEFQEAISGFLAALPLIRERVPGASSFKLKNLAQTYLARNMSERSAMAAVLAMRDLCRLLEVSPGPQLAQHVYPFSSLQCFASLQPLVQAAVLPRAEARLLALHNVSFMELLSAHRRDRQGGLKKYSRYLSLQTTTLPPAQPAFNLQALGTYFEGLLEGPALARAEGVSTPLAGRGLAERASQQS

SEQ ID NO: 2224 - protein, 829 aa, Homo sapiens
MEPAPARSPRPQQDPARPQEPTMPPPETPSEGRQPSPSPSPTERAPASEEEFQFLRCQQCQAEAKCPKLLPCLHTLCSGCLEASGMQCPICQAPWPLGADTPALDNVFFESLQRRLSVYRQIVDAQAVCTRCKESADFWCFECEQLLCAKCFEAHQWFLKHEARPLAELRNQSVREFLDGTRKTNNIFCSNPNHRTPTLTSIYCRGCSKPLCCSCALLDSSHSELKCDISAEIQQRQEELDAMTQALQEQDSAFGAVHAQMHAAVGQLGRARAETEELIRERVRQVVAHVRAQERELLEAVDARYQRDYEEMASRLGRLDAVLQRIRTGSALVQRMKCYASDQEVLDMHGFLRQALCRLRQEEPQSLQAAVRTDGFDEFKVRLQDLSSCITQGKDAAVSKKASPEAASTPRDPIDVDLPEEAERVKAQVQALGLAEAQPMAVVQSVPGAHPVPVYAFSIKGPSYGEDVSNTTTAQKRKCSQTQCPRKVIKMESEEGKEARLARSSPEQPRPSTSKAVSPPHLDGPPSPRSPVIGSEVFLPNSNHVASGAGEAEERVVVISSSEDSDAENSCMEPMETAEPQSSPAHSSPAHSSPAHSSPVQSLLRAQGASSLPCGTYHPPAWPPHQPAEQAATPDAEPHSEPPDHQERPAVHRGIRYLLYRAQRAIRLRHALRLHPQLHRAPIRTWSPHVVQASTPAITGPLNHPANAQEHPAQLQRGISPPHRIRGAVRSRSRSLRGSSHLSQWLNNFFALPFSSMASQLDMSSVVGAGESRAQTLGAGVPPGDSVRGSMEASQVQVPLEASPITFPPPCAPERPPISPVPGARQAGL

SEQ ID NO: 2225 - protein, 1095 aa, Homo sapiens
MCDGALLPPLVLPVLLLLVWGLDPGTAVGDAAADVEVVLPWRVRPDDVHLPPLPAAPGPRRRRRPRTPPAAPRARPGERALLLHLPAFGRDLYLQLRRDLRFLSRGFEVEEAGAARRRGRPAELCFYSGRVLGHPGSLVSLSACGAAGGLVGLIQLGQEQVLIQPLNNSQGPFSGREHLIRRKWSLTPSPSAEAQRPEQLCKVLTEKKKPTWGRPSRDWRERRNAIRLTSEHTVETLVVADADMVQYHGAEAAQRFILTVMNMVYNMFQHQSLGIKINIQVTKLVLLRQRPAKLSIGHHGERSLESFCHWQNEEYGGARYLGNNQVPGGKDDPPLVDAAVFVTRTDFCVHKDEPCDTVGIAYLGGVCSAKRKCVLAEDNGLNLAFTIAHELGHNLGMNHDDDHSSCAGRSHIMSGEWVKGRNPSDLSWSSCSRDDLENFLKSKVSTCLLVTDPRSQHTVRLPHKLPGMHYSANEQCQILFGMNATFCRNMEHLMCAGLWCLVEGDTSCKTKLDPPLDGTECGADKWCRAGECVSKTPIPEHVDGDWSPWGAWSMCSRTCGTGARFRQRKCDNPPPGPGGTHCPGASVEHAVCENLPCPKGLPSFRDQQCQAHDRLSPKKKGLLTAVVVDDKPCELYCSPLGKESPLLVADRVLDGTPCGPYETDLCVHGKCQKIGCDGIIGSAAKEDRCGVCSGDGKTCHLVKGDFSHARGTALKDSGKGSINSDWKIELPGEFQIAGTTVRYVRRGLWEKISAKGPTKLPLHLMVLLFHDQDYGIHYEYTVPVNRTAENQSEPEKPQDSLFIWTHSGWEGCSVQCGGGERRTIVSCTRIVNKTTTLVNDSDCPQASRPEPQVRRCNLHPCQSRWVAGPWSPCSATCEKGFQHREVTCVYQLQNGTHVATRPLYCPGPRPAAVQSCEGQDCLSIWEASEWSQCSASCGKGVWKRTVACTNSQGKCDASTRPRAEEACEDYSGCYEWKTGDWSTCSSTCGKGLQSRVVQCMHKVTGRHGSECPALSKPAPYRQCYQEVCNDRINANTITSPRLAALTYKCTRDQWTVYCRVIREKNLCQDMRWYQRCCQTCRDFYANKMRQPPPNS

SEQ ID NO: 2226 - protein, 479 aa, Homo sapiens
MAWNTNLRWRLPLTCLLLQVIMVILFGVFVRYDFEADAHWWSERTHKNLSDMENEFYYRYPSFQDVHVMVFVGFGFLMTFLQRYGFSAVGFNFLLAAFGIQWALLMQGWFHFLQDRYIVVGVENLINADFCVASVCVAFGAVLGKVSPIQLLIMTFFQVTLFAVNEFILLNLLKVKDAGGSMTIHTFGAYFGLTVTRILYRRNLEQSKERQNSVYQSDLFAMIGTLFLWMYWPSFNSAISYHGDSQHRAAINTYCSLAACVLTSVAISSALHKKGKLDMVHIQNATLAGGVAVGTAAEMMLMPYGALIIGFVCGIISTLGFVYLTPFLESRLHIQDTCGINNLHGIPGIIGGIVGAVTAASASLEVYGKEGLVHSFDFQGFNGDWTARTQGKFQIYGLLVTLAMALMGGIIVGLILRLPFWGQPSDENCFEDAVYWEMPEGNSTVYIPEDPTFKPSGPSVPSVPMVSPLPMASSVPLVP

SEQ ID NO: 2227 - protein, 1239 aa, Homo sapiens
MSRLLWRKVAGATVGPGPVPAPGRWVSSSVPASDPSDGQRRRQQQQQQQQQQQQQPQQPQVLSSEGGQLRHNPLDIQMLSRGLHEQIFGQGGEMPGEAAVRRSVEHLQKHGLWGQPAVPLPDVELRLPPLYGDNLDQHFRLLAQKQSLPYLEAANLLLQAQLPPKPPAWAWAEGWTRYGPEGEAVPVAIPEERALVFDVEVCLAEGTCPTLAVAISPSAWYSWCSQRLVEERYSWTSQLSPADLIPLEVPTGASSPTQRDWQEQLVVGHNVSFDRAHIREQYLIQGSRMRFLDTMSMHMAISGLSSFQRSLWIAAKQGKHKVQPPTKQGQKSQRKARRGPAISSWDWLDISSVNSLAEVHRLYVGGPPLEKEPRELFVKGTMKDIRENFQDLMQYCAQDVWATHEVFQQQLPLFLERCPHPVTLAGMLEMGVSYLPVNQNWERYLAEAQGTYEELQREMKKSLMDLANDACQLLSGERYKEDPWLWDLEWDLQEFKQKKAKKVKKEPATASKLPIEGAGAPGDPMDQEDLGPCSEEEEFQQDVMARACLQKLKGTTELLPKRPQHLPGHPGWYRKLCPRLDDPAWTPGPSLLSLQMRVTPKLMALTWDGFPLHYSERHGWGYLVPGRRDNLAKLPTGTTLESAGVVCPYRAIESLYRKHCLEQGKQQLMPQEAGLAEEFLLTDNSAIWQTVEELDYLEVEAEAKMENLRAAVPGQPLALTARGGPKDTQPSYHHGNGPYNDVDIPGCWFFKLPHKDGNSCNVGSPFAKDFLPKMEDGTLQAGPGGASGPRALEINKMISFWRNAHKRISSQMVVWLPRSALPRAVIRHPDYDEEGLYGAILPQVVTAGTITRRAVEPTWLTASNARPDRVGSELKAMVQAPPGYTLVGADVDSQELWIAAVLGDAHFAGMHGCTAFGWMTLQGRKSRGTDLHSKTATTVGISREHAKIFNYGRIYGAGQPFAERLLMQFNHRLTQQEAAEKAQQMYAATKGLRWYRLSDEGEWLVRELNLPVDRTEGGWISLQDLRKVQRETARKSQWKKWEVVAERAWKGGTESEMFNKLESIATSDIPRTPVLGCCISRALEPSAVQEEFMTSRVNWVVQSSAVDYLHLMLVAMKWLFEEFAIDGRFCISIHDEVRYLVREEDRYRAALALQITNLLTRCMFAYKLGLNDLPQSVAFFSAVDIDRCLRKEVTMDCKTPSNPTGMERRYGIPQGEALDIYQIIELTKGSLEKRSQPGP

SEQ ID NO: 2228 - protein, 317 aa, Homo sapiens
MSEGVGTFRMVPEEEQELRAQLEQLTTKDHGPVFGPCSQLPRHTLQKAKDELNEREETREEAVRELQEMVQAQAASGEELAVAVAERVQEKDSGFFLRFIRARKFNVGRAYELLRGYVNFRLQYPELFDSLSPEAVRCTIEAGYPGVLSSRDKYGRVVMLFNIENWQSQEITFDEILQAYCFILEKLLENEETQINGFCIIENFKGFTMQQAASLRTSDLRKMVDMLQDSFPARFKAIHFIHQPWYFTTTYNVVKPFLKSKLLERVFVHGDDLSGFYQEIDENILPSDFGGTLPKYDGKAVAEQLFGPQAQAENTAF

SEQ ID NO: 2229 - protein, 686 aa, Homo sapiens
MSFPRGSQTQKIKHPIGTRKGPLEVPPPTEKDWPKDDEQDHVLVDPDEELDSLPQPYRMINKLVNLLFDQSWEIIEERNALREAESSQIQPTVYPPLGEIQLNKMPNCMAVSQDYVFIGGAKGFSIYNLYSAKQIYAWEKLKVDVTSIWATDLGNEILIAPVDEMGIIRLFYFYKEGLYLVKAINEVDDTSKQTTCIKMEISQGGDFAAFLLQGAGDIWLDVYKLPKETWLKKLEHPQLTSNPKKKVRQPQLNSLGPISADPLEMDANVSFKGDIKLSLPVYIMKIKPPKPVTGTTFKSPLEVFAKIKDCYGLGSGQNHFIKDSQWEQQAEIFNASYKKYLDREWEEEPLSTATFYFLLPSCLFAMPPEVKGPSGMACVLGIHWTRSHNFFLYSLNRTLKDKADPEGVWPCAAPIAVSQLSCSSSYLVLACEDGVLTLWDLAKGFPLGVAALPQGCFCQSIHFLKYFSVHKGQNMYPEGQVKSQMKCVVLCTDASLHLVEASGTQGPTISVLVERPVKHLDKTICAVAPVPALPGMVLIFSKNGSVCLMDVAKREIICAFAPPGAFPLEVPWKPVFAVSPDHPCFLLRGDYSHETASTDDAGIQYSVFYFNFEACPLLENISKNCTIPQRDLDNMAFPQALPLEKRCERFLQKSYRKLEKNPEKEEEHWARLQRYSLSLQRENFKK

SEQ ID NO: 2230 - protein, 1910 aa, Homo sapiens
MACCHKVMLLLDTAGGAARHSRVRRAALRLLTYLSCRFGLARVHWAFKFFDSQGARSRPSRVSDFRELGSRSWEDFEEELEARLEDRAHLPGPAPRATHTHGALMETLLDYQWDRPEITSPTKPILRSSGRRLLDVESEAKEAEAALGGLVNAVFLLAPCPHSQRELLQFVSGCEAQAQRLPPTPKQVMEKLLPKRVREVMVARKITFYWVDTTEWSKLWESPDHLGYWTVCELLHHGGGTVLPSESFSWDFAQAGEMLLRSGIKLSSEPHLSPWISMLPTDATLNRLLYNSPEYEASFPRMEGMLFLPVEAGKEIQETWTVTLEPLAMHQRHFQKPVRIFLKGSVAQWSLPTSSTLGTDSWMLGSPEESTATQRLLFQQLVSRLTAEELHLVADVDPGEGRPPITGVISPLSASAMILTVCRTKEAEFQRHVLQTAVADSPRDTASLFSDVVDSILNQTHDSLADTASAASPVPEWAQQELGHTTPWSPAVVEKWFPFCNISGASSDLMESFGLLQAASANKEESSKTEGELIHCLAELYQRKSREESTIAHQEDSKKKRGVPRTPVRQKMNTMCRSLKMLNVARLNVKAQKLHPDGSPDVAGEKGIQKIPSGRTVDKLEDRGRTLRSSKPKDFKTEEELLSYIRENYQKTVATGEIMLYACARNMISTVKMFLKSKGTKELEVNCLNQVKSSLLKTSKSLRQNLGKKLDKEDKVRECQLQVFLRLEMCLQCPSINESTDDMEQVVEEVTDLLRMVCLTEDSAYLAEFLEEILRLYIDSIPKTLGNLYNSLGFVIPQKLAGVLPTDFFSDDSMTQENKSPLLSVPFLSSARRSVSGSPESDELQELRTRSAKKRRKNALIRHKSIAEVSQNLRQIEIPKVSKRATKKENSHPAPQQPSQPVKDTVQEVTKVRRNLFNQELLSPSKRSLKRGLPRSHSVSAVDGLEDKLDNFKKNKGYHKLLTKSVAETPVHKQISKRLLHRQIKGRSSDPGPDIGVVEESPEKGDEISLRRSPRIKQLSFSRTHSASFYSVSQPKSRSVQRVHSFQQDKSDQRENSPVQSIRSPKSLLFGAMSEMISPSEKGSARMKKRSRNTLDSEVPAAYQTPKKSHQKSLSFSKTTPRRISHTPQTPLYTPERLQKSPAKMTPTKQAAFKESLKDSSSPGHDSPLDSKITPQKRHTQAGEGTSLETKTPRTPKRQGTQPPGFLPNCTWPHSVNSSPESPSCPAPPTSSTAQPRRECLTPIRDPLRTPPRAAAFMGTPQNQTHQQPHVLRAARAEEPAQKLKDKAIKTPKRPGNSTVTSSPPVTPKKLFTSPLCDVSKKSPFRKSKIECPSPGELDQKEPQMSPSVAASLSCPVPSTPPELSQRATLDTVPPPPPSKVGKRCRKTSDPRRSIVECQPDASATPGVGTADSPAAPTDSRDDQKGLSLSPQSPPERRGYPGPGLRSDWHASSPLLITSDTEHVTLLSEAEHHGIGDLKSNVLSVEEGEGLRTADAEKSSLSHPGIPPSPPSCGPGSPLMPSRDVHCTTDGRQCQASAQLDNLPASAWHSTDSASPQTYEVELEMQASGLPKLRIKKIDPSSSLEAEPLSKEESSLGEESFLPALSMPRASRSLSKPEPTYVSPPCPRLSHSTPGKSRGQTYICQACTPTHGPSSTPSPFQTDGVPWTPSPKHSGKTTPDIIKDWPRRKRAVGCGAGSSSGRGEVGADLPGSLSLLESEGKDHGLELSIHRTPILEDFELEGVCQLPDQSPPRNSMPKAEEASSWGQFGLSSRKRVLLAKEEADRGAKRICDLREDSEVSKSKEGSPSWSAWQLPSTGDEEVFVSGSTPPPSCAVRSCLSASALQALTQSPLLFQGKTPSSQSKDPRDEDVDVLPSTVEDSPFSRAFSRRRPISRTYTRKKLMGTWLEDL

SEQ ID NO: 2231 - protein, 550 aa, Homo sapiens
MDHHVSTIKPRRIQNQNVIHRLERRRISSGKAGTHWHQVRVFHQNVFPNFTVVNVEKPPCFLRKFSPDGRYFIAFSSDQTSLEIYEYQGCQAAEDLLQGYEGEILSNGNDQRSVNIRGRLFERFFVLLHITNVAANGEHLNRECSLFTDDCRCVIVGSAAYLPDEPHPPFFEVYRNSESVTPNPRSPLEDYSLHIIDLHTGRLCDTRTFKCDKVVLSHNQGLYLYKNILAILSVQQQTIHVFQVTPEGTFIDVRTIGRFCYEDDLLTVSAVFPEVQRDSQTGMANPFRDPFINSLKHRLLVYLWRRAEQDGSAMAKRRFFQYFDQLRQLRMWKMQLLDENHLFIKYTSEDVVTLRVTDPSQASFFVVYNMVTTEVIAVFENTSDELLELFENFCDLFRNATLHSEVQFPCSASSNNFARQIQRRFKDTIINAKYGGHTEAVRRLLGQLPISAQSYSGSPYLDLSLFSYDDKWVSVMERPKTCGDHPIRFYARDSGLLKFEIQAGLLGRPINHTVRRLVAFTFHPFEPFAISVQRTNAEYVVNFHMRHCCT

SEQ ID NO: 2232 - protein, 387 aa, Homo sapiens
MPRPRLLAALCGALLCAPSLLVALDICSKNPCHNGGLCEEISQEVRGDVFPSYTCTCLKGYAGNHCETKCVEPLGLENGNIANSQIAASSVRVTFLGLQHWVPELARLNRAGMVNAWTPSSNDDNPWIQVNLLRRMWVTGVVTQGASRLASHEYLKAFKVAYSLNGHEFDFIHDVNKKHKEFVGNWNKNAVHVNLFETPVEAQYVRLYPTSCHTACTLRFELLGCELNGCANPLGLKNNSIPDKQITASSSYKTWGLHLFSWNPSYARLDKQGNFNAWVAGSYGNDQWLQVDLGSSKEVTGIITQGARNFGSVQFVASYKVAYSNDSANWTEYQDPRTGSSKIFPGNWDNHSHKKNLFETPILARYVRILPVAWHNRIALRLELLGC

SEQ ID NO: 2233 - protein, 335 aa, Homo sapiens
MPRPRLLAALCGALLCAPSLLVALDICSKNPCHNGGLCEEISQEVRGDVFPSYTCTCLKGYAGNHCETKCVEPLGLENGNIANSQIAASSVRVTFLGLQHWVPELARLNRAGMVNAWTPSSNDDNPWIQVNLLRRMWVTGVVTQGASRLASHEYLKAFKVAYSLNGHEFDFIHDVNKKHKEFVGNWNKNAVHVNLFETPVEAQYVRLYPTSCHTACTLRFELLGCELNGCANPLGLKNNSIPDKQITASSSYKTWGLHLFSWNPSYARLDKQGNFNAWVAGSYGNDQWLQIFPGNWDNHSHKKNLFETPILARYVRILPVAWHNRIALRLELLGC

SEQ ID NO: 2234 - protein, 375 aa, Homo sapiens
MQLQFRSWMLAALTLLVVFLIFADISEIEEEIGNSGGRGTIRSAVNSLHSKSNRAEVVINGSSSPAVVDRSNESIKHNIQPASSKWRHNQTLSLRIRKQILKFLDAEKDISVLKGTLKPGDIIHYIFDRDSTMNVSQNLYELLPRTSPLKNKHFGTCAIVGNSGVLLNSGCGQEIDAHSFVIRCNLAPVQEYARDVGLKTDLVTMNPSVIQRAFEDLVNATWREKLLQRLHSLNGSILWIPAFMARGGKERVEWVNELILKHHVNVRTAYPSLRLLHAVRGYWLTNKVHIKRPTTGLLMYTLATRFCKQIYLYGFWPFPLDQNQNPVKYHYYDSLKYGYTSQASPHTMPLEFKALKSLHEQGALKLTVGQCDGAT

SEQ ID NO: 2235 - protein, 794 aa, Homo sapiens
MELRPWLLWVVAATGTLVLLAADAQGQKVFTNTWAVRIPGGPAVANSVARKHGFLNLGQIFGDYYHFWHRGVTKRSLSPHRPRHSRLQREPQVQWLEQQVAKRRTKRDVYQEPTDPKFPQQWYLSGVTQRDLNVKAAWAQGYTGHGIVVSILDDGIEKNHPDLAGNYDPGASFDVNDQDPDPQPRYTQMNDNRHGTRCAGEVAAVANNGVCGVGVAYNARIGGVRMLDGEVTDAVEARSLGLNPNHIHIYSASWGPEDDGKTVDGPARLAEEAFFRGVSQGRGGLGSIFVWASGNGGREHDSCNCDGYTNSIYTLSISSATQFGNVPWYSEACSSTLATTYSSGNQNEKQIVTTDLRQKCTESHTGTSASAPLAAGIIALTLEANKNLTWRDMQHLVVQTSKPAHLNANDWATNGVGRKVSHSYGYGLLDAGAMVALAQNWTTVAPQRKCIIDILTEPKDIGKRLEVRKTVTACLGEPNHITRLEHAQARLTLSYNRRGDLAIHLVSPMGTRSTLLAARPHDYSADGFNDWAFMTTHSWDEDPSGEWVLEIENTSEANNYGTLTKFTLVLYGTAPEGLPVPPESSGCKTLTSSQACVVCEEGFSLHQKSCVQHCPPGFAPQVLDTHYSTENDVETIRASVCAPCHASCATCQGPALTDCLSCPSHASLDPVEQTCSRQSQSSRESPPQQQPPRLPPEVEAGQRLRAGLLPSHLPEVVAGLSCAFIVLVFVTVFLVLQLRSGFSFRGVKVYTMDRGLISYKGLPPEAWQEECPSDSEEDEGRGERTAFIKDQSAL

SEQ ID NO: 2236 - protein, 1657 aa, Homo sapiens
MSAADEVDGLGVARPHYGSVLDNERLTAEEMDERRRQNVAYEYLCHLEEAKRWMEACLGEDLPPTTELEEGLRNGVYLAKLGNFFSPKVVSLKKIYDREQTRYKATGLHFRHTDNVIQWLNAMDEIGLPKIFYPETTDIYDRKNMPRCIYCIHALSLYLFKLGLAPQIQDLYGKVDFTEEEINNMKTELEKYGIQMPAFSKIGGILANELSVDEAALHAAVIAINEAIDRRIPADTFAALKNPNAMLVNLEEPLASTYQDILYQAKQDKMTNAKNRTENSERERDVYEELLTQAEIQGNINKVNTFSALANIDLALEQGDALALFRALQSPALGLRGLQQQNSDWYLKQLLSDKQQKRQSGQTDPLQKEELQSGVDAANSAAQQYQRRLAAVALINAAIQKGVAEKTVLELMNPEAQLPQVYPFAADLYQKELATLQRQSPEHNLTHPELSVAVEMLSSVALINRALESGDVNTVWKQLSSSVTGLTNIEEENCQRYLDELMKLKAQAHAENNEFITWNDIQACVDHVNLVVQEEHERILAIGLINEALDEGDAQKTLQALQIPAAKLEGVLAEVAQHYQDTLIRAKREKAQEIQDESAVLWLDEIQGGIWQSNKDTQEAQKFALGIFAINEAVESGDVGKTLSALRSPDVGLYGVIPECGETYHSDLAEAKKKKLAVGDNNSKWVKHWVKGGYYYYHNLETQEGGWDEPPNFVQNSMQLSREEIQSSISGVTAAYNREQLWLANEGLITRLQARCRGYLVRQEFRSRMNFLKKQIPAITCIQSQWRGYKQKKAYQDRLAYLRSHKDEVVKIQSLARMHQARKRYRDRLQYFRDHINDIIKIQAFIRANKARDDYKTLINAEDPPMVVVRKFVHLLDQSDQDFQEELDLMKMREEVITLIRSNQQLENDLNLMDIKIGLLVKNKITLQDVVSHSKKLTKKNKEQLSDMMMINKQKGGLKALSKEKREKLEAYQHLFYLLQTNPTYLAKLIFQMPQNKSTKFMDSVIFTLYNYASNQREEYLLLRLFKTALQEEIKSKVDQIQEIVTGNPTVIKMVVSFNRGARGQNALRQILAPVVKEIMDDKSLNIKTDPVDIYKSWVNQMESQTGEASKLPYDVTPEQALAHEEVKTRLDSSIRNMRAVTDKFLSAIVSSVDKIPYGMRFIAKVLKDSLHEKFPDAGEDELLKIIGNLLYYRYMNPAIVAPDAFDIIDLSAGGQLTTDQRRNLGSIAKMLQHAASNKMFLGDNAHLSIINEYLSQSYQKFRRFFQTACDVPELQDKFNVDEYSDLVTLTKPVIYISIGEIINTHTLLLDHQDAIAPEHNDPIHELLDDLGEVPTIESLIGESSGNLNDPNKEALAKTEVSLTLTNKFDVPGDENAEMDARTILLNTKRLIVDVIRFQPGETLTEILETPATSEQEAEHQRAMQRRAIRDAKTPDKMKKSKSVKEDSNLTLQEKKEKIQTGLKKLTELGTVDPKNKYQELINDIARDIRNQRRYRQRRKAELVKLQQTYAALNSKATFYGEQVDYYKSYIKTCLDNLASKGKVSKKPREMKGKKSKKISLKYTAARLHEKGVLLEIEDLQVNQFKNVIFEISPTEEVGDFEVKAKFMGVQMETFMLHYQDLLQLQYEGVAVMKLFDRAKVNVNLLIFLLNKKFYGK

SEQ ID NO: 2237 - protein, 1120 aa, Homo sapiens
MVLNSLDKMIQLQKNTANIRNICVLAHVDHGKTTLADCLISSNGIISSRLAGKLRYMDSREDEQIRGITMKSSAISLHYATGNEEYLINLIDSPGHVDFSSEVSTAVRICDGCIIVVDAVEGVCPQTQAVLRQAWLENIRPVLVINKIDRLIVELKFTPQEAYSHLKNILEQINALTGTLFTSKVLEERAERETESQVNPNSEQGEQVYDWSTGLEDTDDSHLYFSPEQGNVVFTSAIDGWGFGIEHFARIYSQKIGIKKEVLMKTLWGDYYINMKAKKIMKGDQAKGKKPLFVQLILENIWSLYDAVLKKDKDKIDKIVTSLGLKIGAREARHSDPKVQINAICSQWLPISHAVLAMVCQKLPSPLDITAERVERLMCTGSQTFDSFPPETQALKAAFMKCGSEDTAPVIIFVSKMFAVDAKALPQNKPRPLTQEEIAQRRERARQRHAEKLAAAQGQAPLEPTQDGSAIETCPKGEEPRGDEQQVESMTPKPVLQEENNQESFIAFARVFSGVARRGKKIFVLGPKYSPLEFLRRVPLGFSAPPDGLPQVPHMAYCALENLYLLMGRELEYLEEVPPGNVLGIGGLQDFVLKSATLCSLPSCPPFIPLNFEATPIVRVAVEPKHPSEMPQLVKGMKLLNQADPCVQILIQETGEHVLVTAGEVHLQRCLDDLKERFAKIHISVSEPIIPFRETITKPPKVDMVNEEIGKQQKVAVIHQMKEDQSKIPEGIQVDSDGLITITTPNKLATLSVRAMPLPEEVTQILEENSDLIRSMEQLTSSLNEGENTHMIHQKTQEKIWEFKGKLEQHLTGRRWRNIVDQIWSFGPRKCGPNILVNKSEDFQNSVWTGPADKASKEASRYRDLGNSIVSGFQLATLSGPMCEEPLMGVCFVLEKWDLSKFEEQGASDLAKEGQEENETCSGGNENQELQDGCSEAFEKRTSQKGESPLTDCYGPFSGQLIATMKEACRYALQVKPQRLMAAMYTCDIMATGDVLGRVYAVLSKREGRVLQEEMKEGTDMFIIKAVLPVAESFGFADEIRKRTSGLASPQLVFSHWEIIPSDPFWVPTTEEEYLHFGEKADSENQARKYMNAVRKRKGLYVEEKIVEHAEKQRTLSKNK

SEQ ID NO: 2238 - protein, 855 aa, Homo sapiens
MARHLLLPLVMLVISPIPGAFQDSALSPTQEEPEDLDCGRPEPSARIVGGSNAQPGTWPWQVSLHHGGGHICGGSLIAPSWVLSAAHCFMTNGTLEPAAEWSVLLGVHSQDGPLDGAHTRAVAAIVVPANYSQVELGADLALLRLASPASLGPAVWPVCLPRASHRFVHGTACWATGWGDVQEADPLPLPWVLQEVELRLLGEATCQCLYSQPGPFNLTLQILPGMLCAGYPEGRRDTCQGDSGGPLVCEEGGRWFQAGITSFGFGCGRRNRPGVFTAVATYEAWIREQVMGSEPGPAFPTQPQKTQSDPQEPREENCTIALPECGKAPRPGAWPWEAQVMVPGSRPCHGALVSESWVLAPASCFLDPNSSDSPPRDLDAWRVLLPSRPRAERVARLVQHENASWDNASDLALLQLRTPVNLSAASRPVCLPHPEHYFLPGSRCRLARWGRGEPALGPGALLEAELLGGWWCHCLYGRQGAAVPLPGDPPHALCPAYQEKEEVGSCWNDSRWSLLCQEEGTWFLAGIRDFPSGCLRPRAFFPLQTHGPWISHVTRGAYLEDQLAWDWGPDGEETETQTCPPHTEHGACGLRLEAAPVGVLWPWLAEVHVAGDRVCTGILLAPGWVLAATHCVLRPGSTTVPYIEVYLGRAGASSLPQGHQVSRLVISIRLPQHLGLRPPLALLELSSRVEPSPSALPICLHPAGIPPGASCWVLGWKEPQDRVPVAAAVSILTQRICDCLYQGILPPGTLCVLYAEGQENRCEMTSAPPLLCQMTEGSWILVGMAVQGSRELFAAIGPEEAWISQTVGEANFLPPSGSPHWPTGGSNLCPPELAKASGSPHAVYFLLLLTLLIQS

SEQ ID NO: 2239 - protein, 1163 aa, Homo sapiens
MTRTRAALLLFTALATSLGFNLDTEELTAFRVDSAGFGDSVVQYANSWVVVGAPQKITAANQTGGLYQCGYSTGACEPIGLQVPPEAVNMSLGLSLASTTSPSQLLACGPTVHHECGRNMYLTGLCFLLGPTQLTQRLPVSRQECPRQEQDIVFLIDGSGSISSRNFATMMNFVRAVISQFQRPSTQFSLMQFSNKFQTHFTFEEFRRSSNPLSLLASVHQLQGFTYTATAIQNVVHRLFHASYGARRDAAKILIVITDGKKEGDSLDYKDVIPMADAAGIIRYAIGVGLAFQNRNSWKELNDIASKPSQEHIFKVEDFDALKDIQNQLKEKIFAIEGTETTSSSSFELEMAQEGFSAVFTPDGPVLGAVGSFTWSGGAFLYPPNMSPTFINMSQENVDMRDSYLGYSTELALWKGVQSLVLGAPRYQHTGKAVIFTQVSRQWRMKAEVTGTQIGSYFGASLCSVDVDSDGSTDLVLIGAPHYYEQTRGGQVSVCPLPRGWRRWWCDAVLYGEQGHPWGRFGAALTVLGDVNGDKLTDVVIGAPGEEENRGAVYLFHGVLGPSISPSHSQRIAGSQLSSRLQYFGQALSGGQDLTQDGLVDLAVGARGQVLLLRTRPVLWVGVSMQFIPAEIPRSAFECREQVVSEQTLVQSNICLYIDKRSKNLLGSRDLQSSVTLDLALDPGRLSPRATFQETKNRSLSRVRVLGLKAHCENFNLLLPSCVEDSVTPITLRLNFTLVGKPLLAFRNLRPMLAADAQRYFTASLPFEKNCGADHICQDNLGISFSFPGLKSLLVGSNLELNAEVMVWNDGEDSYGTTITFSHPAGLSYRYVAEGQKQGQLRSLHLTCDSAPVGSQGTWSTSCRINHLIFRGGAQITFLATFDVSPKAVLGDRLLLTANVSSENNTPRTSKTTFQLELPVKYAVYTVVSSHEQFTKYLNFSESEEKESHVAMHRYQVNNLGQRDLPVSINFWVPVELNQEAVWMDVEVSHPQNPSLRCSSEKIAPPASDFLAHIQKNPVLDCSIAGCLRFRCDVPSFSVQEELDFTLKGNLSFGWVRQILQKKVSVVSVAEITFDTSVYSQLPGQEAFMRAQTTTVLEKYKVHNPTPLIVGSSIGGLLLLALITAVLYKVGFFKRQYKEMMEEANGQIAPENGTQTPSPPSEK

SEQ ID NO: 2240 - protein, 935 aa, Homo sapiens
MAAAKPTLTDSLSFCLAQLAAAAGEALGGEKDPATNETPLSRALLALRTRHIKAAGGIERFRARGGLRPLLALLRRAAAAGSAPSQAGPGSAPSSAASGASSPAPASGPAPSAVSSSSPTPPVRLRKTLDLALSILADCCTEGACRTEVRRLGGILPLVTILQCMKTDSIQNRTARALGNLAMEPESCGDIHCAGAVPLLVESLTACQDSQCLQSVVRALRNLADSPQHRLALAQQGAVRPLAELLATAPDAALTLALVRALLELSRGCSRACAEQLSLGGGLGPLVSLASHPKRAVREGTILILANLCAQGLIRPALGNAGGVEVLVDELRQRRDPNGASPTSQQPLVRAVCLLCREAINRARLRDAGGLDLLMGLLRDPRASAWHPRIVAALVGFLYDTGALGRLQALGLVPLLAGQLCGEAGEEEEEGREAASWDFPEERTPERAQGGSFRSLRSWLISEGYATGPDDISPDWSPEQCPPEPMEPASPAPTPTSLRAPRTQRTPGRSPAAAIEEPWGREGPALLLLSRFSQAPDPSGALVTGPALYGLLTYVTGAPGPPSPRALRILSRLTCNPACLEAFVRSYGAALLRAWLVLGVAPDDWPAPRARPTLHSRHRELGERLLQNLTVQAESPFGVGALTHLLLSGSPEDRVACALTLPFICRKPSLWRRLLLEQGGLRLLLAALTRPAPHPLFLFFAADSLSCLQDLVSPTVSPAVPQAVPMDLDSPSPCLYEPLLGPAPVPAPDLHFLLDSGLQLPAQRAASATASPFFRALLSGSFAEAQMDLVPLRGLSPGAAWPVLHHLHGCRGCGAALGPVPPPGQPLLGSEAEEALEAAGRFLLPGLEEELEEAVGRIHLGPQGGPESVGEVFRLGRPRLAAHCARWTLGSEQCPRKRGLALVGLVEAAGEEAGPLTEALLAVVMGIELGARVPA

SEQ ID NO: 2241 - protein, 453 aa, Homo sapiens
MKLLTRAGSFSRFYSLKVAPKVKATAAPAGAPPQPQDLEFTKLPNGLVIASLENYSPVSRIGLFIKAGSRYEDFSNLGTTHLLRLTSSLTTKGASSFKITRGIEAVGGKLSVTATRENMAYTVECLRGDVDILMEFLLNVTTAPEFRRWEVADLQPQLKIDKAVAFQNPQTHVIENLHAAAYRNALANPLYCPDYRIGKVTSEELHYFVQNHFTSARMALIGLGVSHPVLKQVAEQFLNMRGGLGLSGAKANYRGGEIREQNGDSLVHAAFVAESAVAGSAEANAFSVLQHVLGAGPHVKRGSNTTSHLHQAVAKATQQPFDVSAFNASYSDSGLFGIYTISQATAAGDVIKAAYNQVKTIAQGNLSNTDVQAAKNKLKAGYLMSVESSECFLEEVGSQALVAGSYMPPSTVLQQIDSVANADIINAAKKFVSGQKSMAASGNLGHTPFVDEL

SEQ ID NO: 2242 - protein, 454 aa, Homo sapiens
MLAENLVEEFEMKEDEPWYDHQDLQQDLQLAAELGKTLLDRNTELEDSVQQMYTTNQEQLQEIEYLTKQVELLRQMNEQHAKVYEQLDVTARELEETNQKLVADSKASQQKILSLTETIECLQTNIDHLQSQVEELKSSGQGRRSPGKCDQEKPAPSFACLKELYDLRQHFVYDHVFAEKITSLQGQPSPDEEENEHLKKTVTMLQAQLSLERQKRVTMEEEYGLVLKENSELEQQLGATGAYRARALELEAEVAEMRQMLQSEHPFVNGVEKLVPDSLYVPFKEPSQSLLEEMFLTVPESHRKPLKRSSSETILSSLAGSDIVKGHEETCIRRAKAVKQRGISLLHEVDTQYSALKVKYEELLKKCQEEQDSLSHKAVQTSRAAAKDLTGVNAQSEPVASGWELASVNPEPVSSPTTPPEYKALFKEIFSCIKKTKQEIDEQRTKYRSLSSHS

SEQ ID NO: 2243 - protein, 1227 aa, Homo sapiens
MGDTSEDASIHRLEGTDLDCQVGGLICKSKSAASEQHVFKAPAPRPSLLGLDLLASLKRREREEKDDGEDKKKSKVSSYKDWEESKDDQKDAEEEGGDQAGQNIRKDRHYRSARVETPSHPGGVSEEFWERSRQRERERREHGVYASSKEEKDWKKEKSRDRDYDRKRDRDERDRSRHSSRSERDGGSERSSRRNEPESPRHRPKDAATPSRSTWEEEDSGYGSSRRSQWESPSPTPSYRDSERSHRLSTRDRDRSVRGKYSDDTPLPTPSYKYNEWADDRRHLGSTPRLSRGRGRREEGEEGISFDTEEERQQWEDDQRQADRDWYMMDEGYDEFHNPLAYSSEDYVRRREQHLHKQKQKRISAQRRQINEDNERWETNRMLTSGVVHRLEVDEDFEEDNAAKVHLMVHNLVPPFLDGRIVFTKQPEPVIPVKDATSDLAIIARKGSQTVRKHREQKERKKAQHKHWELAGTKLGDIMGVKKEEEPDKAVTEDGKVDYRTEQKFADHMKRKSEASSEFAKKKSILEQRQYLPIFAVQQELLTIIRDNSIVIVVGETGSGKTTQLTQYLHEDGYTDYGMIGCTQPRRVAAMSVAKRVSEEMGGNLGEEVGYAIRFEDCTSENTLIKYMTDGILLRESLREADLDHYSAIIMDEAHERSLNTDVLFGLLREVVARRSDLKLIVTSATMDAEKFAAFFGNVPIFHIPGRTFPVDILFSKTPQEDYVEAAVKQSLQVHLSGAPGDILIFMPGQEDIEVTSDQIVEHLEELENAPALAVLPIYSQLPSDLQAKIFQKAPDGVRKCIVATNIAETSLTVDGIMFVIDSGYCKLKVFNPRIGMDALQIYPISQANANQRSGRAGRTGPGQCFRLYTQSAYKNELLTTTVPEIQRTNLANVVLLLKSLGVQDLLQFHFMDPPPEDNMLNSMYQLWILGALDNTGGLTSTGRLMVEFPLDPALSKMLIVSCDMGCSSEILLIVSMLSVPAIFYRPKGREEESDQIREKFAVPESDHLTYLNVYLQWKNNNYSTIWCNDHFIHAKAMRKVREVRAQLKDIMVQQRMSLASCGTDWDIVRKCICAAYFHQAAKLKGIGEYVNIRTGMPCHLHPTSSLFGMGYTPDYIVYHELVMTTKEYMQCVTAVDGEWLAELGPMFYSVKQAGKSRQENRRRAKEEASAMEEEMALAEEQLRARRQEQEKRSPLGSVRSTKIYTPGRKEQGEPMTPRRTPARFGL

SEQ ID NO: 2244 - protein, 3703 aa, Homo sapiens
MEGCDSPVVSGKDNGCGIPQHQQWTELNSTHLPDKPSSMEQSTGESHGPLDSLRAPFNERLAESTASAGPPSEPASKEVTCNECSASFASLQTYMEHHCPSARPPPPLREESASDTGEEGDEESDVENLAGEIVYQPDGSAYIVESLSQLTQGGGACGSGSGSGPLPSLFLNSLPGAGGKQGDPSCAAPVYPQIINTFHIASSFGKWFEGPDQAFPNTSALAGLSPVLHSFRVFDVRHKSNKDYLNSDGSAKSSCVSKDVPNNVDLSKFDGFVLYGKRKPILMCFLCKLSFGYVRSFVTHAVHDHRMTLSEDERKILSNKNISAIIQGIGKDKEPLVSFLEPKNKNFQHPLVSTANLIGPGHSFYGKFSGIRMEGEEALPAGSAAGPEQPQAGLLTPSTLLNLGGLTSSVLKTPITSVPLGPLASSPTKSSEGKDSGAAEGEKQEVGDGDCFSEKVEPAEEEAEEEEEEEEAEEEEEEEEEEEEEEEDEGCKGLFPSELDEELEDRPHEEPGAAAGSSSKKDLALSNQSISNSPLMPNVLQTLSRGTASTSSNSASSFVVFDGANRRNRLSFNSEGVRANVAEGGRRLDFADESANKDNATAPEPNESTEGDDGGFVPHHQHAGSLCELGVGECPSGSGVECPKCDTVLGSSRSLGGHMTMMHSRNSCKTLKCPKCNWHYKYQQTLEAHMKEKHPEPGGSCVYCKSGQPHPRLARGESYTCGYKPFRCEVCNYSTTTKGNLSIHMQSDKHLNNMQNLQNGGGEQVFSHTAGAAAAAVAAAAAAANISSSCGAPSPTKPKTKPTWRCEVCDYETNVARNLRIHMTSEKHMHNMMLLQQNMTQIQHNRHLGLGSLPSPAEAELYQYYLAQNMNLPNLKMDSAASDAQFMMSGFQLDPAGPMAAMTPALVGGEIPLDMRLGGGQLVSEELMNLGESFIQTNDPSLKLFQCAVCNKFTTDNLDMLGLHMNVERSLSEDEWKAVMGDSYQCKLCRYNTQLKANFQLHCKTDKHVQKYQLVAHIKEGGKANEWRLKCVAIGNPVHLKCNACDYYTNSLEKLRLHTVNSRHEASLKLYKHLQQHESGVEGESCYYHCVLCNYSTKAKLNLIQHVRSMKHQRSESLRKLQRLQKGLPEEDEDLGQIFTIRRCPSTDPEEAIEDVEGPSETAADPEELAKDQEGGASSSQAEKELTDSPATSKRISFPGSSESPLSSKRPKTAEEIKPEQMYQCPYCKYSNADVNRLRVHAMTQHSVQPMLRCPLCQDMLNNKIHLQLHLTHLHSVAPDCVEKLIMTVTTPEMVMPSSMFLPAAVPDRDGNSNLEEAGKQPETSEDLGKNILPSASTEQSGDLKPSPADPGSVREDSGFICWKKGCNQVFKTSAALQTHFNEVHAKRPQLPVSDRHVYKYRCNQCSLAFKTIEKLQLHSQYHVIRAATMCCLCQRSFRTFQALKKHLETSHLELSEADIQQLYGGLLANGDLLAMGDPTLAEDHTIIVEEDKEEESDLEDKQSPTGSDSGSVQEDSGSEPKRALPFRKGPNFTMEKFLDPSRPYKCTVCKESFTQKNILLVHYNSVSHLHKLKRALQESATGQPEPTSSPDNKPFKCNTCNVAYSQSSTLEIHMRSVLHQTKARAAKLEAASGSSNGTGNSSSISLSSSTPSPVSTSGSNTFTTSNPSSAGIAPSSNLLSQVPTESVGMPPLGNPIGANIASPSEPKEANRKKLADMIASRQQQQQQQQQQQQQQQQQQQAQTLAQAQAQVQAHLQQELQQQAALIQSQLFNPTLLPHFPMTTETLLQLQQQQHLLFPFYIPSAEFQLNPEVSLPVTSGALTLTGTGPGLLEDLKAQVQVPQQSHQQILPQQQQNQLSIAQSHSALLQPSQHPEKKNKLVIKEKEKESQRERDSAEGGEGNTGPKETLPDALKAKEKKELAPGGGSEPSMLPPRIASDARGNATKALLENFGFELVIQYNENKQKVQKKNGKTDQGENLEKLECDSCGKLFSNILILKSHQEHVHQNYFPFKQLERFAKQYRDHYDKLYPLRPQTPEPPPPPPPPPPPPLPAAPPQPASTPAIPASAPPITSPTIAPAQPSVPLTQLSMPMELPIFSPLMMQTMPLQTLPAQLPPQLGPVEPLPADLAQLYQHQLNPTLLQQQNKRPRTRITDDQLRVLRQYFDINNSPSEEQIKEMADKSGLPQKVIKHWFRNTLFKERQRNKDSPYNFSNPPITSLEELKIDSRPPSPEPPKQEYWGSKRSSRTRFTDYQLRVLQDFFDANAYPKDDEFEQLSNLLNLPTRVIVVWFQNARQKARKNYENQGEGKDGERRELTNDRYIRTSNLNYQCKKCSLVFQRIFDLIKHQKKLCYKDEDEEGQDDSQNEDSMDAMEILTPTSSSCSTPMPSQAYSAPAPSANNTASSAFLQLTAEAEELATFNSKTEAGDEKPKLAEAPSAQPNQTQEKQGQPKPELQQQEQPEQKTNTPQQKLPQLVSLPSLPQPPPQAPPPQCPLPQSSPSPSQLSHLPLKPLHTSTPQQLANLPPQLIPYQCDQCKLAFPSFEHWQEHQQLHFLSAQNQFIHPQFLDRSLDMPFMLFDPSNPLLASQLLSGAIPQIPASSATSPSTPTSTMNTLKRKLEEKASASPGENDSGTGGEEPQRDKRLRTTITPEQLEILYQKYLLDSNPTRKMLDHIAHEVGLKKRVVQVWFQNTRARERKGQFRAVGPAQAHRRCPFCRALFKAKTALEAHIRSRHWHEAKRAGYNLTLSAMLLDCDGGLQMKGDIFDGTSFSHLPPSSSDGQGVPLSPVSKTMELSPRTLLSPSSIKVEGIEDFESPSMSSVNLNFDQTKLDNDDCSSVNTAITDTTTGDEGNADNDSATGIATETKSSSAPNEGLTKAAMMAMSEYEDRLSSGLVSPAPSFYSKEYDNEGTVDYSETSSLADPCSPSPGASGSAGKSGDSGDRPGQKRFRTQMTNLQLKVLKSCFNDYRTPTMLECEVLGNDIGLPKRVVQVWFQNARAKEKKSKLSMAKHFGINQTSYEGPKTECTLCGIKYSARLSVRDHIFSQQHISKVKDTIGSQLDKEKEYFDPATVRQLMAQQELDRIKKANEVLGLAAQQQGMFDNTPLQALNLPTAYPALQGIPPVLLPGLNSPSLPGFTPSNTALTSPKPNLMGLPSTTVPSPGLPTSGLPNKPSSASLSSPTPAQATMAMGPQQPPQQQQQQQQPQVQQPPPPPAAQPPPTPQLPLQQQQQRKDKDSEKVKEKEKAHKGKGEPLPVPKKEKGEAPTATAATISAPLPTMEYAVDPAQLQALQAALTSDPTALLTSQFLPYFVPGFSPYYAPQIPGALQSGYLQPMYGMEGLFPYSPALSQALMGLSPGSLLQQYQQYQQSLQEAIQQQQQRQLQQQQQQKVQQQQPKASQTPVPPGAPSPDKDPAKESPKPEEQKNTPREVSPLLPKLPEEPEAESKSADSLYDPFIVPKVQYKLVCRKCQAGFSDEEAARSHLKSLCFFGQSVVNLQEMVLHVPTGGGGGGSGGGGGGGGGGGGGGSYHCLACESALCGEEALSQHLESALHKHRTITRAARNAKEHPSLLPHSACFPDPSTASTSQSAAHSNDSPPPPSAAAPSSASPHASRKSWPQVVSRASAAKPPSFPPLSSSSTVTSSSCSTSGVQPSMPTDDYSEESDTDLSQKSDGPASPVEGPKDPSCPKDSGLTSVGTDTFRL

SEQ ID NO: 2245 - protein, 238 aa, Homo sapiens
MSRLGLPEEPVRNSLLDDAKARLRKYDIGGKYSHLPYNKYSVLLPLVAKEGKLHLLFTVRSEKLRRAPGEVCFPGGKRDPTDMDDAATALREAQEEVGLRPHQVEVVCCLVPCLIDTDTLITPFVGLIDHNFQAQPNPAEVKDVFLVPLAYFLHPQVHDQHYVTRLGHRFINHIFEYTNPEDGVTYQIKGMTANLAVLVAFIILEKKPTFEVQFNLNDVLASSEELFLKVHKKATSRL

SEQ ID NO: 2246 - protein, 796 aa, Homo sapiens
MKENYCLQAALVCLGMLCHSHAFAPERRGHLRPSFHGHHEKGKEGQVLQRSKRGWVWNQFFVIEEYTGPDPVLVGRLHSDIDSGDGNIKYILSGEGAGTIFVIDDKSGNIHATKTLDREERAQYTLMAQAVDRDTNRPLEPPSEFIVKVQDINDNPPEFLHETYHANVPERSNVGTSVIQVTASDADDPTYGNSAKLVYSILEGQPYFSVEAQTGIIRTALPNMDREAKEEYHVVIQAKDMGGHMGGLSGTTKVTITLTDVNDNPPKFPQSVYQMSVSEAAVPGEEVGRVKAKDPDIGENGLVTYNIVDGDGMESFEITTDYETQEGVIKLKKPVDFETKRAYSLKVEAANVHIDPKFISNGPFKDTVTVKISVEDADEPPMFLAPSYIHEVQENAAAGTVVGRVHAKDPDAANSPIRYSIDRHTDLDRFFTINPEDGFIKTTKPLDREETAWLNITVFAAEIHNRHQEAKVPVAIRVLDVNDNAPKFAAPYEGFICESDQTKPLSNQPIVTISADDKDDTANGPRFIFSLPPEIIHNPNFTVRDNRDNTAGVYARRGGFSRQKQDLYLLPIVISDGGIPPMSSTNTLTIKVCGCDVNGALLSCNAEAYILNAGLSTGALIAILACIVILLVIVVLFVTLRRQKKEPLIVFEEEDVRENIITYDDEGGGEEDTEAFDIATLQNPDGINGFIPRKDIKPEYQYMPRPGLRPAPNSVDVDDFINTRIQEADNDPTAPPYDSIQIYGYEGRGSVAGSLSSLESATTDSDLDYDYLQNWGPRFKKLADLYGSKDTFDDDS

SEQ ID NO: 2247 - protein, 760 aa, Homo sapiens
MKTPPGASSRTKCSRELRSFCAFSCPRAKQPTCTAWFPQQEHPSENGPQMPGRDPPAASTMQVLLLTSAEDLDCTPGFQQKVFHINQPAEFIEDQSILNLTFSDCKGNDKLRYEVSSPYFKVNSDGGLVALRNITAVGKTLFVHARTPHAEDMAELVIVGGKDIQGSLQDIFKFARTSPVPRQKRSIVVSPILIPENQRQPFPRDVGKVVDSDRPERSKFRLTGKGVDQEPKGIFRINENTGSVSVTRTLDREVIAVYQLFVETTDVNGKTLEGPVPLEVIVIDQNDNRPIFREGPYIGHVMEGSPTGTTVMRMTAFDADDPATDNALLRYNIRQQTPDKPSPNMFYIDPEKGDIVTVVSPALLDRETLENPKYELIIEAQDMAGLDVGLTGTATATIMIDDKNDHSPKFTKKEFQATVEEGAVGVIVNLTVEDKDDPTTGAWRAAYTIINGNPGQSFEIHTNPQTNEGMLSVVKPLDYEISAFHTLLIKVENEDPLVPDVSYGPSSTATVHITVLDVNEGPVFYPDPMMVTRQEDLSVGSVLLTVNATDPDSLQHQTIRYSVYKDPAGWLNINPINGTVDTTAVLDRESPFVDNSVYTALFLAIDSGNPPATGTGTLLITLEDVNDNAPFIYPTVAEVCDDAKNLSVVILGASDKDLHPNTDPFKFEIHKQAVPDKVWKISKINNTHALVSLLQNLNKANYNLPIMVTDSGKPPMTNITDLRVQVCSCRNSKVDCNAAGALRFSLPSVLLLSLFSLACL

SEQ ID NO: 2248 - protein, 949 aa, Homo sapiens
MASNHPAFSFHQKQVLRQELTQIQSSLNGGGGHGGKGAPGPGGALPTCPACHKITPRTEAPVSSVSNSLENALHTSAHSTEESLPKRPLGKHSKVSVEKIDLKGLSHTKNDRNVECSFEVLWSDSSITSVTKSSSEVTEFISKLCQLYPEENLEKLIPCLAGPDAFYVERNHVDLDSGLRYLASLPSHVLKNDHVRRFLSTSSPPQQLQSPSPGNPSLSKVGTVMGVSGRPVCGVAGIPSSQSGAQHHGQHPAGSAAPLPHCSHAGSAGSALAYRTQMDTSPAILMPSSLQTPQTQEQNGILDWLRKLRLHKYYPVFKQLSMEKFLSLTEEDLNKFESLTMGAKKKLKTQLELEKEKSERRCLNPSAPPLVTSSGVARVPPTSHVGPVQSGRGSHAAELRVEVEQPHHQLPREGSSSEYSSSSSSPMGVQAREESSDSAEENDRRVEIHLESSDKEKPVMLLNHFTSSSARPTAQVLPVQNEASSNPSGHHPLPPQMLSAASHITPIRMLNSVHKPERGSADMKLLSSSVHSLLSLEERNKGSGPRSSMKVDKSFGSAMMDVLPASAPHQPVQVLSGLSESSSMSPTVSFGPRTKVVHASTLDRVLKTAQQPALVVETSTAATGTPSTVLHAARPPIKLLLSSSVPADSAISGQTSCPNNVQISVPPAIINPRTALYTANTKVAFSAMSSMPVGPLQGGFCANSNTASPSSHPSTSFANMATLPSCPAPSSSPALSSVPESSFYSSSGGGGSTGNIPASNPNHHHHHHHQQPPAPPQPAPPPPGCIVCTSCGCSGSCGSSGLTVSYANYFQHPFSGPSVFTFPFLPFSPMCSSGYVSAQQYGGGSTFPVVHAPYSSSGTPDPVLSGQSTFAVPPMQNFMAGTAGVYQTQGLVGSSNGSSHKKSGNLSCYNCGATGHRAQDCKQPSMDFNRPGTFRLKYAPPAESLDSTD

SEQ ID NO: 2249 - protein, 665 aa, Homo sapiens
MASASQGADDDGSRRKPRLAASLQISPQPRPWRPLPAQAQSAWGPAPAPATYRAEGGWPQVSVLRDSGPGAGAGVGELGAARAWENLGEQMGKAPRVPVPPAGLSLPLKDPPASQAVSLLTEYAASLGIFLLFREDQPPGKVFKYRAPGGEELKAMCLWQVEVLRAFLLRTGWRGLWRGDLDLGPDSSWANRLPFLLICEMESRIPAVEELGPCFPFSVSAELDGVVCPAGTANSKTEAKQQAALSALCYIRSQLENPESPQTSSRPPLAPLSVENILTHEQRCAALVSAGFDLLLDERSPYWACKGTVAGVILERGWAVSAPSCTEIPRARGHVKEIYKLVALGTGSSCCAGWLEFSGQQLHDCHGLVIARRALLRFLFRQLLLATQGGPKGKEQSVLAPQPGPGPPFTLKPRVFLHLYISNTPKGAARDIYLPPTSEGGLPHSPPMRLQAHVLGQLKPVCYVAPSLCDTHVGCLSASDKLARWAVLGLGGALLAHLVSPLYSTSLILADSCHDPPTLSRAIHTRPCLDSVLGPCLPPPYVRTALHLFAGPPVAPSEPTPDTCRGLSLNWSLGDPGIEVVDVATGRVKANAALGPPSRLCKASFLRAFHQAARAVGKPYLLALKTYEAAKAGPYQEARRQLSLLLDQQGLGAWPSKPLVGKFRN

SEQ ID NO: 2250 - protein, 426 aa, Homo sapiens
MCDRNGGRRLRQWLIEQIDSSMYPGLIWENEEKSMFRIPWKHAGKQDYNQEVDASIFKAWAVFKGKFKEGDKAEPATWKTRLRCALNKSPDFEEVTDRSQLDISEPYKVYRIVPEEEQKCKLGVATAGCVNEVTEMECGRSEIDELIKEPSVDDYMGMIKRSPSPPEACRSQLLPDWWAQQPSTGVPLVTGYTTYDAHHSAFSQMVISFYYGGKLVGQATTTCPEGCRLSLSQPGLPGTKLYGPEGLELVRFPPADAIPSERQRQVTRKLFGHLERGVLLHSSRQGVFVKRLCQGRVFCSGNAVVCKGRPNKLERDEVVQVFDTSQFFRELQQFYNSQGRLPDGRVVLCFGEEFPDMAPLRSKLILVQIEQLYVRQLAEEAGKSCGAGSVMQAPEEPPPDQVFRMFPDICASHQRSFFRENQQITV

SEQ ID NO: 2251 - protein, 407 aa, Homo sapiens
MSHRKFSAPRHGHLGFLPHKRSHRHRGKVKTWPRDDPSQPVHLTAFLGYKAGMTHTLREVHRPGLKISKREEVEAVTIVETPPLVVVGVVGYVATPRGLRSFKTIFAEHLSDECRRRFYKDWHKSKKKAFTKACKRWRDTDGKKQLQKDFAAMKKYCKVIRVIVHTQMKLLPFRQKKAHIMEIQLNGGTVAEKVAWAQARLEKQVPVHSVFSQSEVIDVIAVTKGRGVKGVTSRWHTKKLPRKTHKGLRKVACIGAWHPARVGCSIARAGQKGYHHRTELNKKIFRIGRGPHMEDGKLVKNNASTSYDVTAKSITPLGGFPHYGEVNNDFVMLKGCIAGTKKRVITLRKSLLVHHSRQAVENIELKFIDTTSKFGHGRFQTAQEKRAFMGPQKKHLEKETPETSGDL

SEQ ID NO: 2252 - protein, 653 aa, Homo sapiens
MPASRLRDRAASSASGSTCGSMSQTHPVLESGLLASAGCSAPRGPRKGGPAPVDRKAKASAMPDSPAEVKTQPRSTPPSMPPPPPAASQGATRPPSFTPHTHREDGPATLPHGRFHGCLKWSMVCLLMNGSSHSPTAINGAPCTPNGFSNGPATSSTASLSTQHLPPACGARQLSKLKRFLTTLQQFGSDISPEIGERVRTLVLGLVNSTLTIEEFHSKLQEATNFPLRPFVIPFLKANLPLLQRELLHCARLAKQTPAQYLAQHEQLLLDASASSPIDSSELLLEVNENGKRRTPDRTKENGSDRDPLHPEHLSKRPCTLNPAQRYSPSNGPPQPTPPPHYRLEDIAMAHHFRDAYRHPDPRELRERHRPLVVPGSRQEEVIDHKLTEREWAEEWKHLNNLLNCIMDMVEKTRRSLTVLRRCQEADREELNHWARRYSDAEDTKKGPAPAAARPRSSSAGPEGPQLDVPREFLPRTLTGYVPEDIWRKAEEAVNEVKRQAMSELQKAVSDAERKAHELITTERAKMERALAEAKRQASEDALTVINQQEDSSESCWNCGRKASETCSGCNAARYCGSFCQHRDWEKHHHVCGQSLQGPTAVVADPVPGPPEAAHSLGPSLPVGAASPSEAGSAGPSRPGSPSPPGPLDTVPR

SEQ ID NO: 2253 - protein, 788 aa, Homo sapiens
MAVLLLLLRALRRGPGPGPRPLWGPGPAWSPGFPARPGRGRPYMASRPPGDLAEAGGRALQSLQLRLLTPTFEGINGLLLKQHLVQNPVRLWQLLGGTFYFNTSRLKQKNKEKDKSKGKAPEEDEEERRRRERDDQMYRERLRTLLVIAVVMSLLNALSTSGGSISWNDFVHEMLAKGEVQRVQVVPESDVVEVYLHPGAVVFGRPRLALMYRMQVANIDKFEEKLRAAEDELNIEAKDRIPVSYKRTGFFGNALYSVGMTAVGLAILWYVFRLAGMTGREGGFSAFNQLKMARFTIVDGKMGKGVSFKDVAGMHEAKLEVREFVDYLKLGAKVPKGALLLGPPGCGKTLLAKAVATEAQVPFLAMAGPEFVEVIGGLGAARVRSLFKEARARAPCIVYIDEIDAVGKKRSTTMSGFSNTEEEQTLNQLLVEMDGMGTTDHVIVLASTNRADILDGALMRPGRLDRHVFIDLPTLQERREIFEQHLKSLKLTQSSTFYSQRLAELTPGFSGADIANICNEAALHAAREGHTSVHTLNFEYAVERVLAGTAKKSKILSKEEQKVVAFHESGHALVGWMLEHTEAVMKVSITPRTNAALGFAQMLPRDQHLFTKEQLFERMCMALGGRASEALSFNEVTSGAQDDLRKVTRIAYSMVKQFGMAPGIGPISFPEAQEGLMGIGRRPFSQGLQQMMDHEARLLVAKAYRHTEKVLQDNLDKLQALANALLEKEVINYEDIEALIGPPPHGPKKMIAPQRWIDAQREKQDLGEEETEETQQPPLGGEEPTWPK

SEQ ID NO: 2254 - protein, 2440 aa, Homo sapiens
MSSSGYPPNQGAFSTEQSRYPPHSVQYTFPNTRHQQEFAVPDYRSSHLEVSQASQLLQQQQQQQLRRRPSLLSEFHPGSDRPQERRTSYEPFHPGPSPVDHDSLESKRPRLEQVSDSHFQRVSAAVLPLVHPLPEGLRASADAKKDPAFGGKHEAPSSPISGQPCGDDQNASPSKLSKEELIQSMDRVDREIAKVEQQILKLKKKQQQLEEEAAKPPEPEKPVSPPPVEQKHRSIVQIIYDENRKKAEEAHKIFEGLGPKVELPLYNQPSDTKVYHENIKTNQVMRKKLILFFKRRNHARKQREQKICQRYDQLMEAWEKKVDRIENNPRRKAKESKTREYYEKQFPEIRKQREQQERFQRVGQRGAGLSATIARSEHEISEIIDGLSEQENNEKQMRQLSVIPPMMFDAEQRRVKFINMNGLMEDPMKVYKDRQFMNVWTDHEKEIFKDKFIQHPKNFGLIASYLERKSVPDCVLYYYLTKKNENYKALVRRNYGKRRGRNQQIARPSQEEKVEEKEEDKAEKTEKKEEEKKDEEEKDEKEDSKENTKEKDKIDGTAEETEEREQATPRGRKTANSQGRRKGRITRSMTNEAAAASAAAAAATEEPPPPLPPPPEPISTEPVETSRWTEEEMEVAKKGLVEHGRNWAAIAKMVGTKSEAQCKNFYFNYKRRHNLDNLLQQHKQKTSRKPREERDVSQCESVASTVSAQEDEDIEASNEEENPEDSEVEAVKPSEDSPENATSRGNTEPAVELEPTTETAPSTSPSLAVPSTKPAEDESVETQVNDSISAETAEQMDVDQQEHSAEEGSVCDPPPATKADSVDVEVRVPENHASKVEGDNTKERDLDRASEKVEPRDEDLVVAQQINAQRPEPQSDNDSSATCSADEDVDGEPERQRMFPMDSKPSLLNPTGSILVSSPLKPNPLDLPQLQHRAAVIPPMVSCTPCNIPIGTPVSGYALYQRHIKAMHESALLEEQRQRQEQIDLECRSSTSPCGTSKSPNREWEVLQPAPHQVITNLPEGVRLPTTRPTRPPPPLIPSSKTTVASEKPSFIMGGSISQGTPGTYLTSHNQASYTQETPKPSVGSISLGLPRQQESAKSATLPYIKQEEFSPRSQNSQPEGLLVRAQHEGVVRGTAGAIQEGSITRGTPTSKISVESIPSLRGSITQGTPALPQTGIPTEALVKGSISRMPIEDSSPEKGREEAASKGHVIYEGKSGHILSYDNIKNAREGTRSPRTAHEISLKRSYESVEGNIKQGMSMRESPVSAPLEGLICRALPRGSPHSDLKERTVLSGSIMQGTPRATTESFEDGLKYPKQIKRESPPIRAFEGAITKGKPYDGITTIKEMGRSIHEIPRQDILTQESRKTPEVVQSTRPIIEGSISQGTPIKFDNNSGQSAIKHNVKSLITGPSKLSRGMPPLEIVPENIKVVERGKYEDVKAGETVRSRHTSVVSSGPSVLRSTLHEAPKAQLSPGIYDDTSARRTPVSYQNTMSRGSPMMNRTSDVTISSNKSTNHERKSTLTPTQRESIPAKSPVPGVDPVVSHSPFDPHHRGSTAGEVYRSHLPTHLDPAMPFHRALDPAAAAYLFQRQLSPTPGYPSQYQLYAMENTRQTILNDYITSQQMQVNLRPDVARGLSPREQPLGLPYPATRGIIDLTNMPPTILVPHPGGTSTPPMDRITYIPGTQITFPPRPYNSASMSPGHPTHLAAAASAEREREREREKERERERIAAASSDLYLRPGSEQPGRPGSHGYVRSPSPSVRTQETMLQQRPSVFQGTNGTSVITPLDPTAQLRIMPLPAGGPSISQGLPASRYNTAADALAALVDAAASAPQMDVSKTKESKHEAARLEENLRSRSAAVSEQQQLEQKTLEVEKRSVQCLYTSSAFPSGKPQPHSSVVYSEAGKDKGPPPKSRYEEELRTRGKTTITAANFIDVIITRQIASDKDARERGSQSSDSSSSLSSHRYETPSDAIEVISPASSPAPPQEKLQTYQPEVVKANQAENDPTRQYEGPLHHYRPQQESPSPQQQLPPSSQAEGMGQVPRTHRLITLADHICQIITQDFARNQVSSQTPQQPPTSTFQNSPSALVSTPVRTKTSNRYSPESQAQSVHHQRPGSRVSPENLVDKSRGSRPGKSPERSHVSSEPYEPISPPQVPVVHEKQDSLLLLSQRGAEPAEQRNDARSPGSISYLPSFFTKLENTSPMVKSKKQEIFRKLNSSGGGDSDMAAAQPGTEIFNLPAVTTSGSVSSRGHSFADPASNLGLEDIIRKALMGSFDDKVEDHGVVMSQPMGVVPGTANTSVVTSGETRREEGDPSPHSGGVCKPKLISKSNSRKSKSPIPGQGYLGTERPSSVSSVHSEGDYHRQTPGWAWEDRPSSTGSTQFPYNPLTMRMLSSTPPTPIACAPSAVNQAAPHQQNRIWEREPAPLLSAQYETLSDSDD

SEQ ID NO: 2255 - protein, 633 aa, Homo sapiens
MSAGSERGAAATPGGLPAPCASKVELRLSCRHLLDRDPLTKSDPSVALLQQAQGQWVQVGRTEVVRSSLHPVFSKVFTVDYYFEEVQRLRFEVYDTHGPSGFSCQEDDFLGGMECTLGQPAQKWLLQVVMRVSVDVLGPAGHCAKHFLCCTESSHLARTGPSFLLRYDDLCLPWATAGAVRWWTCRGGHTQGWQIVAQKKVTRPLLLKFGRNAGKSTITVIAEDISGNNGYVELSFRARKLDDKDLFSKSDPFLELYRVNDDQGLQLVYRTEVVKNNLNPVWEAFKVSLSSLCSCEETRPLKCLVWDYDSRGKHDFIGEFSTTFEEMQKAFEEGQAQWDCVNPKYKQKRRSYKNSGVVVLADLKFHRVYSFLDYIMGGCQIHFTVAIDFTASNGDPRNSCSLHYINPYQPNEYLKALVSVGEICQDYDSDKRFSALGFGARIPPKYEVSHDFAINFNPEDDECEGIQGVVEAYQNCLPRVQLYGPTNVAPIISKVARVAAAEESTGKASQYYILLILTDGVVTDMADTREAIVRASRLPMSIIIVGVGNADFTDMQVLDGDDGVLRSPRGEPALRDIVQFVPFRELKNASPAALAKCVLAEVPKQVVEYYSHRGLPPRSLGVPAGEASPGCTP

SEQ ID NO: 2256 - protein, 846 aa, Homo sapiens
AKLVRYICKQRQCKLSVAPGERTPELNSYPRFSDWLYTFNVRPEVVQEIPRDLTLDALLEMNEAKVKETLRRCGASGDECGRLQYALTCLRKVTGLGGEHKEDSSWSSLDARRESGSGPSTDTLSAASLPWPPGSSQLGRAGNSAQGPRSISVSALPASDSPTPSFSEGLSDTCIPLHASGRLTPRALHSFITPPTTPQLRRHTKLKPPRTPPPPSRKVFQLLPSFPTLTRSKSHESQLGNRIDDVSSMRFDLSHGSPQMVRRDIGLSVTHRFSTKSWLSQVCHVCQKSMIFGVKCKHCRLKCHNKCTKEAPACRISFLPLTRLRRTESVPSDINNPVDRAAEPHFGTLPKALTKKEHPPAMNHLDSSSNPSSTTSSTPSSPAPFPTSSNPSSATTPPNPSPGQRDSRFNFPAAYFIHHRQQFIFPVPSAGHCWKCLLIAESLKENAFNISAFAHAAPLPEAADGTRLDDQPKADVLEAHEAEAEEPEAGKSEAEDDEDEVDDLPSSRRPWRGPISRKASQTSVYLQEWDIPFEQVELGEPIGQGRWGRVHRGRWHGEVAIRLLEMDGHNQDHLKLFKKEVMNYRQTRHENVVLFMGACMNPPHLAIITSFCKGRTLHSFVRDPKTSLDINKTRQIAQEIIKGMGYLHAKGIVHKDLKSKNVFYDNGKVVITDFGLFGISGVVREGRRENQLKLSHDWLCYLAPEIVREMTPGKDEDQLPFSKAADVYAFGTVWYELQARDWPLKNQAAEASIWQIGSGEGMKRVLTSVSLGKEVSEILSACWAFDLQERPSFSLLMDMLEKLPKLNRRLSHPGHFWKSADINSSKVVPRFERFGLGVLESSNPKM

SEQ ID NO: 2257 - protein, 692 aa, Homo sapiens
MEKYERIRVVGRGAFGIVHLCLRKADQKLVIIKQIPVEQMTKEERQAAQNECQVLKLLNHPNVIEYYENFLEDKALMIAMEYAPGGTLAEFIQKRCNSLLEEETILHFFVQILLALHHVHTHLILHRDLKTQNILLDKHRMVVKIGDFGISKILSSKSKAYTVVGTPCYISPELCEGKPYNQKSDIWALGCVLYELASLKRAFEAANLPALVLKIMSGTFAPISDRYSPELRQLVLSLLSLEPAQRPPLSHIMAQPLCIRALLNLHTDVGSVRMRRAEKSVAPSNTGSRTTSVRCRGIPRGPVRPAIPPPLSSVYAWGGGLGTPLRLPMLNTEVVQVAAGRTQKAGVTRSGRLILWEAPPLGAGGGSLLPGAVEQPQPQFISRFLEGQSGVTIKHVACGDFFTACLTDRGIIMTFGSGSNGCLGHGSLTDISQPTIVEALLGYEMVQVACGASHVLALSTERELFAWGRGDSGRLGLGTRESHSCPQQVPMPPGQEAQRVVCGIDSSMILTVPGQALACGSNRFNKLGLDHLSLGEEPVPHQQVEEALSFTLLGSAPLDQEPLLSIDLGTAHSAAVTASGDCYTFGSNQHGQLGTNTRRGSRAPCKVQGLEGIKMAMVACGDAFTVAIGAESEVYSWGKGARGRLGRRDEDAGLPRPVQLDETHPYTVTSVSCCHGNTLLAVRSVTDEPVPP

SEQ ID NO: 2258 - protein, 931 aa, Homo sapiens
MAEVEAVQLKEEGNRHFQLQDYKAATNSYSQALKLTKDKALLATLYRNRAACGLKTESYVQAASDASRAIDINSSDIKALYRRCQALEHLGKLDQAFKDVQRCATLEPRNQNFQEMLRRLNTSIQEKLRVQFSTDSRVQKMFEILLDENSEADKREKAANNLIVLGREEAGAEKIFQNNGVALLLQLLDTKKPELVLAAVRTLSGMCSGHQARATVILHAVRIDRICSLMAVENEEMSLAVCNLLQAIIDSLSGEDKREHRGKEEALVLDTKKDLKQITSHLLDMLVSKKVSGQGRDQALNLLNKNVPRKDLAIHDNSRTIYVVDNGLRKILKVVGQVPDLPSCLPLTDNTRMLASILINKLYDDLRCDPERDHFRKICEEYITGKFDPQDMDKNLNAIQTVSGILQGPFDLGNQLLGLKGVMEMMVALCGSERETDQLVAVEALIHASTKLSRATFIITNGVSLLKQIYKTTKNEKIKIRTLVGLCKLGSAGGTDYGLRQFAEGSTEKLAKQCRKWLCNMSIDTRTRRWAVEGLAYLTLDADVKDDFVQDVPALQAMFELAKAGTSDKTILYSVATTLVNCTNSYDVKEVIPELVQLAKFSKQHVPEEHPKDKKDFIDMRVKRLLKAGVISALACMVKADSAILTDQTKELLARVFLALCDNPKDRGTIVAQGGGKALIPLALEGTDVGKVKAAHALAKIAAVSNPDIAFPGERVYEVVRPLVRLLDTQRDGLQNYEALLGLTNLSGRSDKLRQKIFKERALPDIENYMFENHDQLRQAATECMCNMVLHKEVQERFLADGNDRLKLVVLLCGEDDDKVQNAAAGALAMLTAAHKKLCLKMTQVTTQWLEILQRLCLHDQLSVQHRGLVIAYNLLAADAELAKKLVESELLEILTVVGKQEPDEKKAEVVQTARECLIKCMDYGFIKPVS

SEQ ID NO: 2259 - protein, 1797 aa, Homo sapiens
MEQLTTLPRPGDPGAMEPWALPTWHSWTPGRGGEPSSAAPSIADTPPAALQLQELRSEESSKPKGDGSSRPVGGTDPEGAEACLPSLGQQASSSGPACQRPEDEEVEAFLKAKLNMSFGDRPNLELLRALGELRQRCAILKEENQMLRKSSFPETEEKVRRLKRKNAELAVIAKRLEERARKLQETNLRVEGPQWLHVRDFDRLLRESQREVLRLQRQIALRNQRETLPLPPSWPPGPALQARAGAPAPGAPGEATPQEDADNLPVILGEPEKEQRVQQLESELSKKRKKCESLEQEARKKQRRCEELELQLRQAQNENARLVEENSRLSGRATEKEQVEWENAELRGQLLGVTQERDSALRKSQGLQSKLESLEQVLKHMREVAQRRQQLEVEHEQARLSLREKQEEVRRLQQAQAEAQREHEGAVQLLESTLDSMQARVRELEEQCRSQTEQFSLLAQELQAFRLHPGPLDLLTSALDCGSLGDCPPPPCCCSIPQPCRGSGPKDLDLPPGSPGRCTPKSSEPAPATLTGVPRRTAKKAESLSNSSHSESIHNSPKSCPTPEVDTASEVEELEADSVSLLPAAPEGSRGGARIQVFLARYSYNPFEGPNENPEAELPLTAGEYIYIYGNMDEDGFFEGELMDGRRGLVPSNFVERVSDDDLLTSLPPELADLSHSSGPELSFLSVGGGGSSSGGQSSVGRSQPRPEEEDAGDELSLSPSPEGLGEPPAVPYPRRLVVLKQLAHSVVLAWEPPPEQVELHGFHICVNGELRQALGPGAPPKAVLENLDLWAGPLHISVQALTSRGSSDPLRCCLAVGARAGVVPSQLRVHRLTATSAEITWVPGNSNLAHAIYLNGEECPPASPSTYWATFCHLRPGTPYQAQVEAQLPPQGPWEPGWERLEQRAATLQFTTLPAGPPDAPLDVQIEPGPSPGILIISWLPVTIDAAGTSNGVRVTGYAIYADGQKIMEVASPTAGSVLVELSQLQLLQVCREVVVRTMSPHGESADSIPAPITPALAPASLPARVSCPSPHPSPEARAPLASASPGPGDPSSPLQHPAPLGTQEPPGAPPASPSREMAKGSHEDPPAPCSQEEAGAAVLGTSEERTASTSTLGEKDPGPAAPSLAKQEAEWTAGEACPASSSTQGARAQQAPNTEMCQGGDPGSGLRPRAEKEDTAELGVHLVNSLVDHGRNSDLSDIQEEEEEEEEEEEEELGSRTCSFQKQVAGNSIRENGAKSQPDPFCETDSDEEILEQILELPLQQFCSKKLFSIPEEEEEEEEDEEEEKSGAGCSSRDPGPPEPALLGLGCDSGQPRRPGQCPLSPESSRAGDCLEDMPGLVGGSSRRRGGGSPEKPPSRRRPPDPREHCSRLLSNNGPQASGRLGPTRERGGLPVIEGPRTGLEASGRGRLGPSRRCSRGRALEPGLASCLSPKCLEISIEYDSEDEQEAGSGGISITSSCYPGDGEAWGTATVGRPRGPPKANSGPKPYPRLPAWEKGEPERRGRSATGRAKEPLSRATETGEARGQDGSGRRGPQKRGVRVLRPSTAELVPARSPSETLAYQHLPVRIFVALFDYDPVSMSPNPDAGEEELPFREGQILKVFGDKDADGFYQGEGGGRTGYIPCNMVAEVAVDSPAGRQQLLQRGYLSPDILLEGSGNGPFVYSTAHTTGPPPKPRRSKKAESEGPAQPCPGPPKLVPSADLKAPHSMVAAFDYNPQESSPNMDVEAELPFRAGDVITVFGGMDDDGFYYGELNGQRGLVPSNFLEGPGPEAGGLDREPRTPQAESQRTRRRRVQC

SEQ ID NO: 2260 - protein, 1451 aa, Homo sapiens
MSRAVRLPVPCPVQLGTLRNDSLEAQLHEYVKQGNYVKVKKILKKGIYVDAVNSLGQTALFVAALLGLRKFVDVLVDYGSDPNHRCFDGSTPVHAAAFSGNQWILSKLLDAGGDLRLHDERGQNPKTWALTAGKERSTQIVEFMQRCASHMQAIIQGFSYDLLKKIDSPQRLVYSPSWCGGLVQGNPNGSPNRLLKAGVISAQNIYSFGFGKFYLTGATQMAYLGSLPVIGEKEVIQADDEPTFSFFSGPYMVMTNLVWNGSRVTVKELNLPTHPHCSRLRLADLLIAEQEHSSKLRHPYLLQLMAVCLSQDLEKTRLVYERITIGTLFSVLHERRSQFPVLHMEVIVHLLLQISDALRYLHFQGFIHRSLSSYAVHIISPGEARLTNLEYMLESEDRGVQRDLTRVPLPTQLYNWAAPEVILQKAATVKSDIYSFSMIMQEILTDDIPWKGLDGSVVKKAVVSGNYLEADVRLPKPYYDIVKSGIHVKQKDRTMNLQDIRYILKNDLKDFTGAQRTQPTESPRVQRYGLHPDVNVYLGLTSEHPRETPDMEIIELKEMGSQPHSPRVHSLFTEGTLDPQAPDPCLMARETQNQDAPCPAPFMAEEASSPSTGQPSLCSFEINEIYSGCLILEDDIEEPPGAASSLEADGPNQVDELKSMEEELDKMEREACCFGSEDESSSKAETEYSFDDWDWQNGSLSSLSLPESTREAKSNLNNMSTTEEYLISKCVLDLKIMQTIMHENDDRLRNIEQILDEVEMKQKEQEERMSLWATSREFTNAYKLPLAVGPPSLNYIPPVLQLSGGQKPDTSGNYPTLPRFPRMLPTLCDPGKQNTDEQFQCTQGAKDSLETSRIQNTSSQGRPRESTAQAKATQFNSALFTLSSHRQGPSASPSCHWDSTRMSVEPVSSEIYNAESRNKDDGKVHLKWKMEVKEMAKKAATGQLTVPPWHPQSSLTLESEAENEPDALLQPPIRSPENTDWQRVIEYHRENDEPRGNGKFDKTGNNDCDSDQHGRQPRLGSFTSIRHPSPRQKEQPEHSEAFQASSDTLVAVEKSYSTSSPIEEDFEGIQGAFAQPQVSGEEKFQMRKILGKNAEILPRSQFQPVRSTEDEQEETSKESPKELKEKDISLTDIQDLSSISYEPDSSFKEASCKTPKINHAPTSVSTPLSPGSVSSAASQYKDCLESITFQVKTEFASCWNSQEFIQTLSDDFISVRERAKKLDSLLTSSETPPSRLTGLKRLSSFIGAGSPSLVKACDSSPPHATQRRSLPKVEAFSQHHIDELPPPSQELLDDIELLKQQQGSSTVLHENTASDGGGTANDQRHLEEQETDSKKEDSSMLLSKETEDLGEDTERAHSTLDEDLERWLQPPEESVELQDLPKGSERETNIKDQKVGEEKRKREDSITPERRKSEGVLGTSEEDELKSCFWKRLGWSESSRIIVLDQSDLSD

SEQ ID NO: 2261 - protein, 673 aa, Homo sapiens
MASQFCLPESPCLSPLKPLKPHFGDIQEGIYVAIQRSDKRIHLAVVTEINRENYWVTVEWVEKAVKKGKKIDLETILLLNPALDSAEHPMPPPPLSPLALAPSSAIRDQRTATKWVAMIPQKNQTASGDSLDVRVPSKPCLMKQKKSPCLWEIQKLQEQREKRRRLQQEIRARRALDVNTRNPNYEIMHMIEEYRRHLDSSKISVLEPPQEHRICVCVRKRPLNQRETTLKDLDIITVPSDNVVMVHESKQKVDLTRYLQNQTFCFDHAFDDKASNELVYQFTAQPLVESIFRKGMATCFAYGQTGSGKTYTMGGDFSGTAQDCSKGIYALVAQDVFLLLRNSTYEKLDLKVYGTFFEIYGGKVYDLLNWKKKLQVLEDGNQQIQVVGLQEKEVCCVEEVLNLVEIGNSCRTSRQTPVNAHSSRSHAVFQIILKSGRIMHGKFSLVDLAGNERGADTTKASRKRQLEGAEINKSLLALKECILALGQNKPHTPFRASKLTLVLRDSFIGQNSSTCMIATISPGMTSCENTLNTLRYANRVKKLNVDVRPYHRGHYPIGHEAPRMLKSHIGNSEMSLQRDEFIKIPYVQSEEQKEIEEVETLPTLLGKDTTISGKGSSQWLENIQERAGGVHHDIDFCIARSLSILEQKIDALTEIQKKLKLLLADLHVKSKVE

SEQ ID NO: 2262 - protein, 269 aa, Homo sapiens
MKRSLNENSARSTAGCLPVPLFNQKKRNRQPLTSNPLKDDSGISTPSDNYDFPPLPTDWAWEAVNPELAPVMKTVDTGQIPHSVSRPLRSQDSVFNSIQSNTGRSQGGWSYRDGNKNTSLKTWNKNDFKPQCKRTNLVANDGKNSCPVSSGAQQQKQLRIPEPPNLSRNKETELLRQTHSSKISGCTMRGLDKNSALQTLKPNFQQNQYKKQMLDDIPEDNTLKETSLYQLQFKEKASSLRIISAVIESMKYWREHAQKTVLLFEVLGS

SEQ ID NO: 2263 - protein, 1051 aa, Homo sapiens
MGSAEDAVKEKLLWNVKKEVKQIMEEAVTRKFVHEDSSHIIALCGAVEACLLHQLRRRAAGFLRSDKMAALFTKVGKTCPVAGEICHKVQELQQQAEGRKPSGVSQEALRRQGSASGKAPALSPQALKHVWVRTALIEKVLDKVVQYLAENCSKYYEKEALLADPVFGPILASLLVGPCALEYTKLKTADHYWTDPSADELVQRHRIRGPPTRQDSPAKRPALGIRKRHSSGSASEDRLAACARECVESLHQNSRTRLLYGKNHVLVQPKEDMEAVPGYLSLHQSAESLTLKWTPNQLMNGTLGDSELEKSVYWDYALVVPFSQVVCIHCHQQKSGGTLVLVSQDGIQRPPLHFPQGGHLLSFLSCLENGLLPRGQLEPPLWTQQGKGKVFPKLRKRSSIRSVDMEEMGTGRATDYVFRIIYPGHRHEHITINYHHLAASRAASVDDDEEEEDKLHAMLSMICSRNLTAPNPMKDAGDMIEMQGFGPSLPAWHLEPLCSQGSSCLSCSSSSSPHATPSHCSCIPDRLPLRLLCESMKRQIVSRAFYGWLAHCRHLSTVRTHLSALVHHSVIPPDRPPGASAGLTKDVWSKYQKDKKNYKELELLRQVYYGGIEHEIRKDVWPFLLGHYKFGMSKKEMEQVDAVVAARYQQVLAEWKACEVVVRQREREAHPATRTKFSSGSSIDSHVQRLIHRDSTISNDVFISVDDLEPPEPQDPEDSRPKPEQEAGPGTPGTAVVEQQHSVEFDSPDSGLPSSRNYSVASGIQSSLDEGQSVGFEEEDGGGEEGSSGPGPAAHTLREPQDPSQEKPQAGELEAGEELAAVCAAAYTIELLDTVALNLHRIDKDVQRCDRNYWYFTPPNLERLRDVMCSYVWEHLDVGYVQGMCDLLAPLLVTLDNDQLAYSCFSHLMKRMSQNFPNGGAMDTHFANMRSLIQILDSELFELMHQNGDYTHFYFCYRWFLLDFKRELLYEDVFAVWEVIWAARHISSEHFVLFIALALVEAYREIIRDNNMDFTDIIKFFNERAEHHDAQEILRIARDLVHKVQMLIENK

SEQ ID NO: 2264 - protein, 321 aa, Homo sapiens
MSGGKSAQGPEEGGVCITEALITKRNLTFPEDGELSEKMFHTLDELQTVRLDREGITTIRNLEGLQNLHSLYLQGNKIQQIENLACIPSLRFLSLAGNQIRQVENLLDLPCLQFLDLSENLIETLKLDEFPQSLLILNLSGNSCTNQDGYRELVTEALPLLLDLDGQPVVERWISDEEDEASSDEEFPELSGPFCSERGFLKELEQELSRHREHRQQTALTEHLLRMEMQPTLTDLPLLPGVPMAGDSSPSATPAQGEETVPEAVSSPQASSPTKKPCSLIPRGHQSSFWGRKGARAATAPKASVAEAPSTTKTTAKRSKK

SEQ ID NO: 2265 - protein, 1423 aa, Homo sapiens
MALVTVQRSPTPSTTSSPCASEADSGEEECRSQPRSISESFLTVKGAALFLPRGNGSSTPRISHRRNKHAGDLQQHLQAMFILLRPEDNIRLAVRLESTYQNRTRYMVVVSTNGRQDTEESIVLGMDFSSNDSSTCTMGLVLPLWSDTLIHLDGDGGFSVSTDNRVHIFKPVSVQAMWSALQSLHKACEVARAHNYYPGSLFLTWVSYYESHINSDQSSVNEWNAMQDVQSHRPDSPALFTDIPTERERTERLIKTKLREIMMQKDLENITSKEIRTELEMQMVCNLREFKEFIDNEMIVILGQMDSPTQIFEHVFLGSEWNASNLEDLQNRGVRYILNVTREIDNFFPGVFEYHNIRVYDEEATDLLAYWNDTYKFISKAKKHGSKCLVHCKMGVSRSASTVIAYAMKEYGWNLDRAYDYVKERRTVTKPNPSFMRQLEEYQGILLASKQRHNKLWRSHSDSDLSDHHEPICKPGLELNKKDITTSADQIAEVKTMESHPPIPPVFVEHMVPQDANQKGLCTKERMICLEFTSREFHAGQIEDELNLNDINGCSSGCCLNESKFPLDNCHASKALIQPGHVPEMANKFPDLTVEDLETDALKADMNVHLLPMEELTSPLKDPPMSPDPESPSPQPSCQTEISDFSTDRIDFFSALEKFVELSQETRSRSFSHSRMEELGGGRNESCRLSVVEVAPSKVTADDQRSSSLSNTPHASEESSMDEEQSKAISELVSPDIFMQSHSENAISVKEIVTEIESISQGVGQIQLKGDILPNPCHTPKKNSIHELLLERAQTPENKPGHMEQDEDSCTAQPELAKDSGMCNPEGCLTTHSSIADLEEGEPAEGEQELQGSGMHPGAKWYPGSVRRATLEFEERLRQEQEHHGAAPTCTSLSTRKNSKNDSSVADLAPKGKSDEAPPEHSFVLKEPEMSKGKGKYSGSEAGSLSHSEQNATVPAPRVLEFDHLPDPQEGPGSDTGTQQEGVLKDLRTVIPYQESETQAVPLPLPKRVEIIEYTHIVTSPNHTGPGSEIATSEKSGEQGLRKVNMEKSVTVLCTLDENLNRTLDPNQVSLHPQVLPLPHSSSPEHNRPTDHPTSILSSPEDRGSSLSTALETAAPFVSHTTHLLSASLDYLHPQTMVHLEGFTEQSSTTDEPSAEQVSWEESQESPLSSGSEVPYKDSQLSSADLSLISKLGDNTGELQEKMDPLPVACRLPHSSSSENIKSLSHSPGVVKERAKEIESRVVFQAGLTKPSQMRRSASLAKLGYLDLCKDCLPEREPASCESPHLKLLQPFLRTDSGMHAMEDQESLENPGAPHNPEPTKSFVEQLTTTECIVQSKPVERPLVQYAKEFGSSQQYLLPRAGLELTSSEGGLPVLQTQGLQCACPAPGLAVAPRQQHGRTHPLRRLKKANDKKRTTNPFYNTM

SEQ ID NO: 2266 - protein, 1581 aa, Homo sapiens
MRKRKISVCQQTWALLCKNFLKKWRMKRESLMEWLNSLLLLLCLYIYPHSHQVNDFSSLLTMDLGRVDTFNESRFSVVYTPVTNTTQQIMNKVASTPFLAGKEVLGLPDEESIKEFTANYPEEIVRVTFTNTYSYHLKFLLGHGMPAKKEHKDHTAHCYETNEDVYCEVSVFWKEGFVALQAAINAAIIEITTNHSVMEELMSVTGKNMKMHSFIGQSGVITDLYLFSCIISFSSFIYYASVNVTRERKRMKALMTMMGLRDSAFWLSWGLLYAGFIFIMALFLALVIRSTQFIILSGFMVVFSLFLLYGLSLVALAFLMSILVKKSFLTGLVVFLLTVFWGCLGFTSLYRHLPASLEWILSLLSPFAFMLGMAQLLHLDYDLNSNAFPHPSDGSNLIVATNFMLAFDTCLYLALAIYFEKILPNEYGHRRPPLFFLKSSFWSQTQKTDHVALEDEMDADPSFHDSFEQAPPEFQGKEAIRIRNVTKEYKGKPDKIEALKDLVFDIYEGQITAILGHSGAGKSTLLNILSGLSVPTKGSVTIYNNKLSEMADLENLSKLTGVCPQSNVQFDFLTVRENLRLFAKIKGILPQEVDKEIFLLDEPTAGLDPFSRHQVWNLLKERKTDRVILFSTQFMDEADILADRKVFLSQGKLKCAGSSLFLKKKWGIGYHLSLQLNEICVEENITSLVKQHIPDAKLSAKSEGKLIYTLPLERTNKFPELYKDLDSYPDLGIENYGVSMTTLNEVFLKLEGKSTINESDIAILGEVQAEKADDTERLVEMEQVLSSLNKMRKTIGGVALWRQQICAIARVRLLKLKHERKALLALLLILMAGFCPLLVEYTMVKIYQNSYTWELSPHLYFLAPGQQPHDPLTQLLIINKTGASIDDFIQSVEHQNIALEVDAFGTRNGTDDPSYNGAITVCCNEKNYSFSLACNAKRLNCFPVLMDIVSNGLLGMVKPSVHIRTERSTFLENGQDNPIGFLAYIMFWLVLTSSCPPYIAMSSIDDYKNRARSQLRISGLSPSAYWFGQALVDVSLYFLVFVFIYLMSYISNFEDMLLTIIHIIQIPCAVGYSFSLIFMTYVISFIFRKGRKNSGIWSFCFYVVTVFSVAGFAFSIFESDIPFIFTFLIPPATMIGCLFLSSHLLFSSLFSEERMDVQPFLVFLIPFLHFIIFLFTLRCLEWKFGKKSMRKDPFFRISPRSSDVCQNPEEPEGEDEDVQMERVRTANALNSTNFDEKPVIIASCLRKEYAGKRKGCFSKRKNKIATRNVSFCVRKGEVLGLLGHNGAGKSTSIKVITGDTKPTAGQVLLKGSGGGDALEFLGYCPQENALWPNLTVRQHLEVYAAVKGLRKGDAEVAITRLVDALKLQDQLKSPVKTLSEGIKRKLCFVLSILGNPSVVLLDEPSTGMDPEGQQQMWQAIRATFRNTERGALLTTHYMAEAEAVCDRVAIMVSGRLRCIGSIQHLKSKFGKDYLLEMKVKNLAQVEPLHAEILRLFPQAARQERYSSLMVYKLPVEDVQPLAQAFFKLEKVKQSFDLEEYSLSQSTLEQVFLELSKEQELGDFEEDFDPSVKWKLLPQEEP

SEQ ID NO: 2267 - protein, 1543 aa, Homo sapiens
MNKMALASFMKGRTVIGTPDEETMDIELPKKYHEMVGVIFSDTFSYRLKFNWGYRIPVIKEHSEYTEHCWAMHGEIFCYLAKYWLKGFVAFQAAINAAIIEVTTNHSVMEELTSVIGINMKIPPFISKGEIMNEWFHFTCLVSFSSFIYFASLNVARERGKFKKLMTVMGLRESAFWLSWGLTYICFIFIMSIFMALVITSIPIVFHTGFMVIFTLYSLYGLSLIALAFLMSVLIRKPMLAGLAGFLFTVFWGCLGFTVLYRQLPLSLGWVLSLLSPFAFTAGMAQITHLDNYLSGVIFPDPSGDSYKMIATFFILAFDTLFYLIFTLYFERVLPDKDGHGDSPLFFLKSSFWSKHQNTHHEIFENEINPEHSSDDSFEPVSPEFHGKEAIRIRNVIKEYNGKTGKVEALQGIFFDIYEGQITAILGHNGAGKSTLLNILSGLSVSTEGSATIYNTQLSEITDMEEIRKNIGFCPQFNFQFDFLTVRENLRVFAKIKGIQPKEVEQEVKRIIMELDMQSIQDIIAKKLSGGQKRKLTLGIAILGDPQVLLLDEPTAGLDPFSRHRVWSLLKEHKVDRLILFSTQFMDEADILADRKVFLSNGKLKCAGSSLFLKRKWGIGYHLSLHRNEMCDTEKITSLIKQHIPDAKLTTESEEKLVYSLPLEKTNKFPDLYSDLDKCSDQGIRNYAVSVTSLNEVFLNLEGKSAIDEPDFDIGKQEKIHVTRNTGDESEMEQVLCSLPETRKAVSSAALWRRQIYAVATLRFLKLRRERRALLCLLLVLGIAFIPIILEKIMYKVTRETHCWEFSPSMYFLSLEQIPKTPLTSLLIVNNTGSNIEDLVHSLKCQDIVLEIDDFRNRNGSDDPSYNGAIIVSGDQKDYRFSVACNTKKLNCFPVLMGIVSNALMGIFNFTELIQMESTSFSRDDIVLDLGFIDGSIFLLLITNCVSPFIGMSSISDYKKNVQSQLWISGLWPSAYWCGQALVDIPLYFLILFSIHLIYYFIFLGFQLSWELMFVLVVCIIGCAVSLIFLTYVLSFIFRKWRKNNGFWSFGFFIILICVSTIMVSTQYEKLNLILCMIFIPSFTLLGYVMLLIQLDFMRNLDSLDNRINEVNKTILLTTLIPYLQSVIFLFVIRCLEMKYGNEIMNKDPVFRISPRSRETHPNPEEPEEEDEDVQAERVQAANALTAPNLEEEPVITASCLHKEYYETKKSCFSTRKKKIAIRNVSFCVKKGEVLGLLGHNGAGKSTSIKMITGCTKPTAGVVVLQGSRASVRQQHDNSLKFLGYCPQENSLWPKLTMKEHLELYAAVKGLGKEDAALSISRLVEALKLQEQLKAPVKTLSEGIKRKLCFVLSILGNPSVVLLDEPFTGMDPEGQQQMWQILQATVKNKERGTLLTTHYMSEAEAVCDRMAMMVSGTLRCIGSIQHLKNKFGRDYLLEIKMKEPTQVEALHTEILKLFPQAAWQERYSSLMAYKLPVEDVHPLSRAFFKLEAMKQTFNLEEYSLSQATLEQVFLELCKEQELGNVDDKIDTTVEWKLLPQEDP

SEQ ID NO: 2268 - protein, 552 aa, Homo sapiens
MPVAATNSETAMQQVLDNLGSLPSATGAAELDLIFLRGIMESPIVRSLAKAHERLEETKLEAVRDNNLELVQEILRDLAQLAEQSSTAAELAHILQEPHFQSLLETHDSVASKTYETPPPSPGLDPTFSNQPVPPDAVRMVGIRKTAGEHLGVTFRVEGGELVIARILHGGMVAQQGLLHVGDIIKEVNGQPVGSDPRALQELLRNASGSVILKILPSYQEPHLPRQVFVKCHFDYDPARDSLIPCKEAGLRFNAGDLLQIVNQDDANWWQACHVEGGSAGLIPSQLLEEKRKAFVKRDLELTPNSGTLCGSLSGKKKKRMMYLTTKNAEFDRHELLIYEEVARMPPFRRKTLVLIGAQGVGRRSLKNKLIMWDPDRYGTTVPYTSRRPKDSEREGQGYSFVSRGEMEADVRAGRYLEHGEYEGNLYGTRIDSIRGVVAAGKVCVLDVNPQAVKVLRTAEFVPYVVFIEAPDFETLRAMNRAALESGISTKQLTEADLRRTVEESSRIQRGYGHYFDLCLVNSNLERTFRELQTAMEKLRTEPQWVPVSWVY

SEQ ID NO: 2269 - protein, 1675 aa, Homo sapiens
MAQILPIRFQEHLQLQNLGINPANIGFSTLTMESDKFICIREKVGEQAQVVIIDMNDPSNPIRRPISADSAIMNPASKVIALKAGKTLQIFNIEMKSKMKAHTMTDDVTFWKWISLNTVALVTDNAVYHWSMEGESQPVKMFDRHSSLAGCQIINYRTDAKQKWLLLTGISAQQNRVVGAMQLYSVDRKVSQPIEGHAASFAQFKMEGNAEESTLFCFAVRGQAGGKLHIIEVGTPPTGNQPFPKKAVDVFFPPEAQNDFPVAMQISEKHDVVFLITKYGYIHLYDLETGTCIYMNRISGETIFVTAPHEATAGIIGVNRKGQVLSVCVEEENIIPYITNVLQNPDLALRMAVRNNLAGAEELFARKFNALFAQGNYSEAAKVAANAPKGILRTPDTIRRFQSVPAQPGQTSPLLQYFGILLDQGQLNKYESLELCRPVLQQGRKQLLEKWLKEDKLECSEELGDLVKSVDPTLALSVYLRANVPNKVIQCFAETGQVQKIVLYAKKVGYTPDWIFLLRNVMRISPDQGQQFAQMLVQDEEPLADITQIVDVFMEYNLIQQCTAFLLDALKNNRPSEGPLQTRLLEMNLMHAPQVADAILGNQMFTHYDRAHIAQLCEKAGLLQRALEHFTDLYDIKRAVVHTHLLNPEWLVNYFGSLSVEDSLECLRAMLSANIRQNLQICVQVASKYHEQLSTQSLIELFESFKSFEGLFYFLGSIVNFSQDPDVHFKYIQAACKTGQIKEVERICRESNCYDPERVKNFLKEAKLTDQLPLIIVCDRFDFVHDLVLYLYRNNLQKYIEIYVQKVNPSRLPVVIGGLLDVDCSEDVIKNLILVVRGQFSTDELVAEVEKRNRLKLLLPWLEARIHEGCEEPATHNALAKIYIDSNNNPERFLRENPYYDSRVVGKYCEKRDPHLACVAYERGQCDLELINVCNENSLFKSLSRYLVRRKDPELWGSVLLESNPYRRPLIDQVVQTALSETQDPEEVSVTVKAFMTADLPNELIELLEKIVLDNSVFSEHRNLQNLLILTAIKADRTRVMEYINRLDNYDAPDIANIAISNELFEEAFAIFRKFDVNTSAVQVLIEHIGNLDRAYEFAERCNEPAVWSQLAKAQLQKGMVKEAIDSYIKADDPSSYMEVVQAANTSGNWEELVKYLQMARKKARESYVETELIFALAKTNRLAELEEFINGPNNAHIQQVGDRCYDEKMYDAAKLLYNNVSNFGRLASTLVHLGEYQAAVDGARKANSTRTWKEVCFACVDGKEFRLAQMCGLHIVVHADELEELINYYQDRGYFEELITMLEAALGLERAHMGMFTELAILYSKFKPQKMREHLELFWSRVNIPKVLRAAEQAHLWAELVFLYDKYEEYDNAIITMMNHPTDAWKEGQFKDIITKVANVELYYRAIQFYLEFKPLLLNDLLMVLSPRLDHTRAVNYFSKVKQLPLVKPYLRSVQNHNNKSVNESLNNLFITEEDYQALRTSIDAYDNFDNISLAQRLEKHELIEFRRIAAYLFKGNNRWKQSVELCKKDSLYKDAMQYASESKDTELAEELLQWFLQEEKRECFGACLFTCYDLLRPDVVLETAWRHNIMDFAMPYFIQVMKEYLTKVDKLDASESLRKEEEQATETQPIVYGQPQLMLTAGPSVAVPPQAPFGYGYTAPPYGQPQPGFGYSM

SEQ ID NO: 2270 - protein, 236 aa, Homo sapiens
MEASDGQGGEGDKPLEQVTNVSCLETSSSASPARDSLMRHAKGLDQDTFKTCKEYLRPLKKFLRKLHLPRDLPQKKKLKYMKQSLVVLGDHINTFLQHYCQAWEIKHWRKMLWRFISLFSELEAKQLRRLYKYTKSSQPAKFLVTFCASDAPERSLLADREDSLPKLCHAWGLHSNISGMKERLSNMQTPGQGSPLPGQPRSQDHVKKDSLRELSQKPKLKRKRIKEAPETPETEP

SEQ ID NO: 2271 - protein, 906 aa, Homo sapiens
MCRIAGALRTLLPLLAALLQASVEASGEIALCKTGFPEDVYSAVLSKDVHEGQPLLNVKFSNCNGKRKVQYESSEPADFKVDEDGMVYAVRSFPLSSEHAKFLIYAQDKETQEKWQVAVKLSLKPTLTEESVKESAEVEEIVFPRQFSKHSGHLQRQKRDWVIPPINLPENSRGPFPQELVRIRSDRDKNLSLRYSVTGPGADQPPTGIFIINPISGQLSVTKPLDREQIARFHLRAHAVDINGNQVENPIDIVINVIDMNDNRPEFLHQVWNGTVPEGSKPGTYVMTVTAIDADDPNALNGMLRYRIVSQAPSTPSPNMFTINNETGDIITVAAGLDREKVQQYTLIIQATDMEGNPTYGLSNTATAVITVTDVNDNPPEFTAMTFYGEVPENRVDIIVANLTVTDKDQPHTPAWNAVYRISGGDPTGRFAIQTDPNSNDGLVTVVKPIDFETNRMFVLTVAAENQVPLAKGIQHPPQSTATVSVTVIDVNENPYFAPNPKIIRQEEGLHAGTMLTTFTAQDPDRYMQQNIRYTKLSDPANWLKIDPVNGQITTIAVLDRESPNVKNNIYNATFLASDNGIPPMSGTGTLQIYLLDINDNAPQVLPQEAETCETPDPNSINITALDYDIDPNAGPFAFDLPLSPVTIKRNWTITRLNGDFAQLNLKIKFLEAGIYEVPIIITDSGNPPKSNISILRVKVCQCDSNGDCTDVDRIVGAGLGTGAIIAILLCIIILLILVLMFVVWMKRRDKERQAKQLLIDPEDDVRDNILKYDEEGGGEEDQDYDLSQLQQPDTVEPDAIKPVGIRRMDERPIHAEPQYPVRSAAPHPGDIGDFINEGLKAADNDPTAPPYDSLLVFDYEGSGSTAGSLSSLNSSSSGGEQDYDYLNDWGPRFKKLADMYGGGDD

SEQ ID NO: 2272 - protein, 862 aa, Homo sapiens
MPAGLTEPAGAAPPAAVSASGTVTMAPAGALPVRVESTPVALGAVTKAPVSVCVEPTASQPLRSPVGTLVTKVAPVSAPPKVSSGPRLPAPQIVAVKAPNTTTIQFPANLQLPPGTVLIKSNSGPLMLVSPQQTVTRAETTSNITSRPAVPANPQTVKICTVPNSSSQLIKKVAVTPVKKLAQIGTTVVTTVPKPSSVQSVAVPTSVVTVTPGKPLNTVTTLKPSSLGASSTPSNEPNLKAENSAAVQINLSPTMLENVKKCKNFLAMLIKLACSGSQSPEMGQNVKKLVEQLLDAKIEAEEFTRKLYVELKSSPQPHLVPFLKKSVVALRQLLPNSQSFIQQCVQQTSSDMVIATCTTTVTTSPVVTTTVSSSQSEKSIIVSGATAPRTVSVQTLNPLAGPVGAKAGVVTLHSVGPTAATGGTTAGTGLLQTSKPLVTSVANTVTTVSLQPEKPVVSGTAVTLSLPAVTFGETSGAAICLPSVKPVVSSAGTTSDKPVIGTPVQIKLAQPGPVLSQPAGIPQAVQVKQLVVQQPSGGNEKQVTTISHSSTLTIQKCGQKTMPVNTIIPTSQFPPASILKQITLPGNKILSLQASPTQKNRIKENVTSCFRDEDDINDVTSMAGVNLNEENACILATNSELVGTLIQSCKDEPFLFIGALQKRILDIGKKHDITELNSDAVNLISQATQERLRGLLEKLTAIAQHRMTTYKASENYILCSDTRSQLKFLEKLDQLEKQRKDLEEREMLLKAAKSRSNKEDPEQLRLKQKAKELQQLELAQIQHRDANLTALAAIGPRKKRPLESGIEGLKDNLLASGTSSLTATKQLHRPRITRICLRDLIFCMEQEREMKYSRALYLALLK

SEQ ID NO: 2273 - protein, 797 aa, Homo sapiens
MAHRCLRLWGRGGCWPRGLQQLLVPGGVGPGEQPCLRTLYRFVTTQARASRNSLLTDIIAAYQRFCSRPPKGFEKYFPNGKNGKKASEPKEVMGEKKESKPAATTRSSGGGGGGGGKRGGKKDDSHWWSRFQKGDIPWDDKDFRMFFLWTALFWGGVMFYLLLKRSGREITWKDFVNNYLSKGVVDRLEVVNKRFVRVTFTPGKTPVDGQYVWFNIGSVDTFERNLETLQQELGIEGENRVPVVYIAESDGSFLLSMLPTVLIIAFLLYTIRRGPAGIGRTGRGMGGLFSVGETTAKVLKDEIDVKFKDVAGCEEAKLEIMEFVNFLKNPKQYQDLGAKIPKGAILTGPPGTGKTLLAKATAGEANVPFITVSGSEFLEMFVGVGPARVRDLFALARKNAPCILFIDEIDAVGRKRGRGNFGGQSEQENTLNQLLVEMDGFNTTTNVVILAGTNRPDILDPALLRPGRFDRQIFIGPPDIKGRASIFKVHLRPLKLDSTLEKDKLARKLASLTPGFSGADVANVCNEAALIAARHLSDSINQKHFEQAIERVIGGLEKKTQVLQPEEKKTVAYHEAGHAVAGWYLEHADPLLKVSIIPRGKGLGYAQYLPKEQYLYTKEQLLDRMCMTLGGRVSEEIFFGRITTGAQDDLRKVTQSAYAQIVQFGMNEKVGQISFDLPRQGDMVLEKPYSEATARLIDDEVRILINDAYKRTVALLTEKKADVEKVALLLLEKEVLDKNDMVELLGPRPFAEKSTYEEFVEGTGSLDEDTSLPEGLKDWNKEREKEKEEPPGEKVAN

SEQ ID NO: 2274 - protein, 288 aa, Homo sapiens
MKPSGEDQAALAAGPWEECFQAAVQLALRAGQIIRKALTEEKRVSTKTSAADLVTETDHLVEDLIISELRERFPSHRFIAEEAAASGAKCVLTHSPTWIIDPIDGTCNFVHRFPTVAVSIGFAVRQELEFGVIYHCTEERLYTGRRGRGAFCNGQRLRVSGETDLSKALVLTEIGPKRDPATLKLFLSNMERLLHAKAHGVRVIGSSTLALCHLASGAADAYYQFGLHCWDLAAATVIIREAGGIVIDTSGGPLDLMACRVVAASTREMAMLIAQALQTINYGRDDEK

SEQ ID NO: 2275 - protein, 381 aa, Homo sapiens
MGCLGGNSKTTEDQGVDEKERREANKKIEKQLQKERLAYKATHRLLLLGAGESGKSTIVKQMRILHVNGFNPEEKKQKILDIRKNVKDAIVTIVSAMSTIIPPVPLANPENQFRSDYIKSIAPITDFEYSQEFFDHVKKLWDDEGVKACFERSNEYQLIDCAQYFLERIDSVSLVDYTPTDQDLLRCRVLTSGIFETRFQVDKVNFHMFDVGGQRDERRKWIQCFNDVTAIIYVAACSSYNMVIREDNNTNRLRESLDLFESIWNNRWLRTISIILFLNKQDMLAEKVLAGKSKIEDYFPEYANYTVPEDATPDAGEDPKVTRAKFFIRDLFLRISTATGDGKHYCYPHFTCAVDTENIRRVFNDCRDIIQRMHLKQYELL

SEQ ID NO: 2276 - protein, 452 aa, Homo sapiens
MFPDQPEKPLNLAHIVPPRPVTSMNDTLFSHSVPSSGSPFITRRLPEGISASSPVAEEHSLIKLYVNQLDHGARSPPKDSEVEQNKLLARAAPAFLKGKGIQYSLNVADRLADEHVLIGLYVNMLRNNPSCMLESSNRLDEEHRLIARYAARLAAESSSSQPPQQRSAPDISFTIDANKQQRQLIAELENKNREILQEIQRLRLEHEQASQPTPEKAQQNPTLLAELRLLRQRKDELEQRMSALQESRRELMVQLEGLMKLLKTQGAGSPRSSPSHTISRPIPMPIRSASACSTPTHTPQDSLTGVGGDVQEAFAQSSRRNLRNDLLVAADSITNTMSSLVKELNSEVGSETESNVDSEFARTQFEDLVPSPTSEKAFLAQIHARKPGYIHSGATTSTMRGDMVTEDADPYVQPEDENYENDSVRQLENELQMEEYLKQKLQDEAYQVSLQG

SEQ ID NO: 2277 - protein, 110 aa, Homo sapiens
MVKKFKDSKSVLLITCKTCNRTVKHHGKSRSFVSTLKSNPATPTSKLSLKTPERRTANPNHDMSGSKGKSPASVFRTPTSGQSVSTCSSKNTSKTKKHFSQLKMLLSQNE

SEQ ID NO: 2278 - protein, 2248 aa, Homo sapiens
MKDKRKKKDRTWAEAARLALEKHPNSPMTAKQILEVIQKEGLKETSGTSPLACLNAMLHTNTRIGDGTFFKIPGKSGLYALKKEESSCPADGTLDLVCESELDGTDMAEANAHGEENGVCSKQVTDEASSTRDSSLTNTAVQSKLVSSFQQHTKKALKQALRQQQKRRNGVSMMVNKTVPRVVLTPLKVSDEQSDSPSGSESKNGEADSSDKEMKHGQKSPTGKQTSQHLKRLKKSGLGHLKWTKAEDIDIETPGSILVNTNLRALINKHTFASLPQHFQQYLLLLLPEVDRQMGSDGILRLSTSALNNEFFAYAAQGWKQRLAEGEFTPEMQLRIRQEIEKEKKTEPWKEKFFERFYGEKLGMSREESVKLTTGPNNAGAQSSSSCGTSGLPVSAQTALAEQQPKSMKSPASPEPGFCATLCPMVEIPPKDIMAELESEDILIPEESVIQEEIAEEVETSICECQDENHKTIPEFSEEAESLTNSHEEPQIAPPEDNLESCVMMNDVLETLPHIEVKIEGKSESPQEEMTVVIDQLEVCDSLIPSTSSMTHVSDTEHKESETAVETSTPKIKTGSSSLEGQFPNEGIAIDMELQSDPEEQLSENACISETSFSSESPEGACTSLPSPGGETQSTSEESCTPASLETTFCSEVSSTENTDKYNQRNSTDENFHASLMSEISPISTSPEISEASLMSNLPLTSEASPVSNLPLTSETSPMSDLPLTSETSSVSSMLLTSETTFVSSLPLPSETSPISNSSINERMAHQQRKSPSVSEEPLSPQKDESSATAKPLGENLTSQQKNLSNTPEPIIMSSSSIAPEAFPSEDLHNKTLSQQTCKSHVDTEKPYPASIPELASTEMIKVKNHSVLQRTEKKVLPSPLELSVFSEGTDNKGNELPSAKLQDKQYISSVDKAPFSEGSRNKTHKQGSTQSRLETSHTSKSSEPSKSPDGIRNESRDSEISKRKTAEQHSFGICKEKRARIEDDQSTRNISSSSPPEKEQPPREEPRVPPLKIQLSKIGPPFIIKSQPVSKPESRASTSTSVSGGRNTGARTLADIKARAQQARAQREAAAAAAVAAAASIVSGAMGSPGEGGKTRTLAHIKEQTKAKLFAKHQARAHLFQTSKETRLPPPLSSKEGPPNLEVSSTPETKMEGSTGVIIVNPNCRSPSNKSAHLRETTTVLQQSLNPSKLPETATDLSVHSSDENIPVSHLSEKIVSSTSSENSSVPMLFNKNSVPVSVCSTAISGAIKEHPFVSSVDKSSVLMSVDSANTTISACNISMLKTIQGTDTPCIAIIPKCIESTPISATTEGSSISSSMDDKQLLISSSSASNLVSTQYTSVPTPSIGNNLPNLSTSSVLIPPMGINNRFPSEKIAIPGSEEQATVSMGTTVRAALSCSDSVAVTDSLVAHPTVAMFTGNMLTINSYDSPPKLSAESLDKNSGPRNRADNSGKPQQPPGGFAPAAINRSIPCKVIVDHSTTLTSSLSLTVSVESSEASLDLQGRPVRTEASVQPVACPQVSVISRPEPVANEGIDHSSTFIAASAAKQDSKTLPATCTSLRELPLVPDKLNEPTAPSHNFAEQARGPAPFKSEADTTCSNQYNPSNRICWNDDGMRSTGQPLVTHSGSSKQKEYLEQSCPKAIKTEHANYLNVSELHPRNLVTNVALPVKSELHEADKGFRMDTEDFPGPELPPPAAEGASSVQQTQNMKASTSSPMEEAISLATDALKRVPGAGSSGCRLSSVEANNPLVTQLLQGNLPLEKVLPQPRLGAKLEINRLPLPLQTTSVGKTAPERNVEIPPSSPNPDGKGYLAGTLAPLQMRKRENHPKKRVARTVGEHTQVKCEPGKLLVEPDVKGVPCVISSGISQLGHSQPFKQEWLNKHSMQNRIVHSPEVKQQKRLLPSCSFQQNLFHVDKNGGFHTDAGTSHRQQFYQMPVAARGPIPTAALLQASSKTPVGCNAFAFNRHLEQKGLGEVSLSSAPHQLRLANMLSPNMPMKEGDEVGGTAHTMPNKALVHPPPPPPPPPPPPLALPPPPPPPPPLPPPLPNAEVPSDQKQPPVTMETTKRLSWPQSTGICSNIKSEPLSFEEGLSSSCELGMKQVSYDQNEMKEQLKAFALKSADFSSYLLSEPQKPFTQLAAQKMQVQQQQQLCGNYPTIHFGSTSFKRAASAIEKSIGILGSGSNPATGLSGQNAQMPVQNFADSSNADELELKCSCRLKAMIVCKGCGAFCHDDCIGPSKLCVACLVVR

SEQ ID NO: 2279 - protein, 701 aa, Homo sapiens
MDLWNLSWFLFLDALLVISGLATPENFDVDGGMDQDIFDINEGLGLDLFEGDIRLDRAQIRNSIIGEKYRWPHTIPYVLEDSLEMNAKGVILNAFERYRLKTCIDFKPWAGETNYISVFKGSGCWSSVGNRRVGKQELSIGANCDRIATVQHEFLHALGFWHEQSRSDRDDYVRIMWDRILSGREHNFNTYSDDISDSLNVPYDYTSVMHYSKTAFQNGTEPTIVTRISDFEDVIGQRMDFSDSDLLKLNQLYNCSSSLSFMDSCSFELENVCGMIQSSGDNADWQRVSQVPRGPESDHSNMGQCQGSGFFMHFDSSSVNVGATAVLESRTLYPKRGFQCLQFYLYNSGSESDQLNIYIREYSADNVDGNLTLVEEIKEIPTGSWQLYHVTLKVTKKFRVVFEGRKGSGASLGGLSIDDINLSETRCPHHIWHIRNFTQFIGSPNGTLYSPPFYSSKGYAFQIYLNLAHVTNAGIYFHLISGANDDQLQWPCPWQQATMTLLDQNPDIRQRMSNQRSITTDPFMTTDNGNYFWDRPSKVGTVALFSNGTQFRRGGGYGTSAFITHERLKSRDFIKGDDVYILLTVEDISHLNSTQIQLTPAPSVQDLCSKTTCKNDGVCTVRDGKAECRCQSGEDWWYMGERCEKRGSTRDTIVIAVSSTVAVFALMLIITLVSVYCTRKKYRERMSSNRPNLTPQNQHAF

SEQ ID NO: 2280 - protein, 876 aa, Homo sapiens
MDPAPSLGCSLKDVKWSSVAVPLDLLVSTYRLPQIARLDNGECVEGLRENDYLLIHSCRQWTTITAHSLEEGHYVIGPKIEIPVHYAGQFKLLEQDRDIKEPVQYFNSVEEVAKAFPERVYVMEDITFNVKVASGECNEDTEVYNITLCTGDELTLMGQAEILYAKTFKEKSRLNTIFKKIGKLNSISKLGKGKMPCLICMNHRTNESISLPFQCKGRFSTRSPLELQMQEGEHTIRNIVEKTRLPVNVTVPSPPPRNPYDLHFIREGHRYKFVNIQTKTVVVCCVLRNNKILPMHFPLHLTVPKFSLPEHLVKGESWPETLVHHWLGICQEQFDIDEYSRAVRDVKTDWNEECKSPKKGRCSGHNHVPNSLSYARDELTQSFHRLSVCVYGNNLHGNSEVNLHGCRDLGGDWAPFPHDILPYQDSGDSGSDYLFPEASEESAGIPGKSELPYEELWLEEGKPSHQPLTRSLSEKNRCDQFRGSVRSKCATSPLPIPGTLGAAVKSSDTALPPPPVPPKSEAVREECRLLNAPPVPPRSAKPLSTSPSIPPRTVKPARQQTRSPSPTLSYYSSGLHNISVTKTDTNPSESTPVSCYPCNRVKTDSVDLKSPFGSPSAEAVSSRLSWPNHYSGASESQTRSDFLLDPSRSYSYPRQKTPGTPKRNCPAPFDFDGCELLASPTSPVTAEFSSSVSGCPKSASYSLESTDVKSLAAGVTKQSTSCPALPPRAPKLVEEKVASETSPLPLKIDGAEEDPKSGSPDLSEDQYFVKKGMQDIFSASYPFSSPLHLQLAPRSCGDGSPWQPPADLSGLSIEEVSKSLRFIGLSEDVISFFVTEKIDGNLLVQLTEEILSEDFKLSKLQVKKIMQFINGWRPKI

SEQ ID NO: 2281 - protein, 840 aa, Homo sapiens
MMSIQEKSKENSSKVTKKSDDKNSETEIQDSQKNLAKKSGPKETIKSQAKSSSESKINQPELETRMSTRSSKAASNDKATKSINKNTVTVRGYSQESTKKKLSQKKLVHENPKANEQLNRRSQRLQQLTEVSRRSLRSREIQGQVQAVKQSLPPTKKEQCSSTQSKSNKTSQKHVKRKVLEVKSDSKEDENLVINEVINSPKGKKRKVEHQTACACSSQCTQGSEKCPQKTTRRDETKPVPVTSEVKRSKMATSVVPKKNEMKKSVHTQVNTNTTLPKSPQPSVPEQSDNELEQAGKSKRGSILQLCEEIAGEIESDNVEVKKESSQMESVKEEKPTEIKLEETSVERQILHQKETNQDVQCNRFFPSRKTKPVKCILNGINSSAKKNSNWTKIKLSKFNSVQHNKLDSQVSPKLGLLRTSFSPPALEMHHPVTQSTFLGTKLHDRNITCQQEKMKEINSEEVKINDITVEINKTTERAPENCHLANEIKPSDPPLDNQMKHSFDSASNKNFSQCLESKLENSPVENVTAASTLLSQAKIDTGENKFPGSAPQQHSILSNQTSKSSDNRETPRNHSLPKCNSHLEITIPKDLKLKEAEKTDEKQLIIDAGQKRFGAVSCNVCGMLYTASNPEDETQHLLFHNQFISAVKYVGWKKERILAEYPDGRIIMVLPEDPKYALKKVDEIREMVDNDLGFQQAPLMCYSRTKTLLFISNDKKVVGCLIAEHIQWGYRVIEEKLPVIRSEEEKVRFERQKAWCCSTLPEPAICGISRIWVFSMMRRKKIASRMIECLRSNFIYGSYLSKEEIAFSDPTPDGKLFATQYCGTGQFLVYNFINGQNST

SEQ ID NO: 2282 - protein, 1724 aa, Homo sapiens
MPPAVRRSACSMGWLWIFGAALGQCLGYSSQQQRVPFLQPPGQSQLQASYVEFRPSQGCSPGYYRDHKGLYTGRCVPCNCNGHSNQCQDGSGICVNCQHNTAGEHCERCQEGYYGNAVHGSCRACPCPHTNSFATGCVVNGGDVRCSCKAGYTGTQCERCAPGYFGNPQKFGGSCQPCSCNSNGQLGSCHPLTGDCINQEPKDSSPAEECDDCDSCVMTLLNDLATMGEQLRLVKSQLQGLSASAGLLEQMRHMETQAKDLRNQLLNYRSAISNHGSKIEGLERELTDLNQEFETLQEKAQVNSRKAQTLNNNVNRATQSAKELDVKIKNVIRNVHILLKQISGTDGEGNNVPSGDFSREWAEAQRMMRELRNRNFGKHLREAEADKRESQLLLNRIRTWQKTHQGENNGLANSIRDSLNEYEAKLSDLRARLQEAAAQAKQANGLNQENERALGAIQRQVKEINSLQSDFTKYLTTADSSLLQTNIALQLMEKSQKEYEKLAASLNEARQELSDKVRELSRSAGKTSLVEEAEKHARSLQELAKQLEEIKRNASGDELVRCAVDAATAYENILNAIKAAEDAANRAASASESALQTVIKEDLPRKAKTLSSNSDKLLNEAKMTQKKLKQEVSPALNNLQQTLNIVTVQKEVIDTNLTTLRDGLHGIQRGDIDAMISSAKSMVRKANDITDEVLDGLNPIQTDVERIKDTYGRTQNEDFKKALTDADNSVNKLTNKLPDLWRKIESINQQLLPLGNISDNMDRIRELIQQARDAASKVAVPMRFNGKSGVEVRLPNDLEDLKGYTSLSLFLQRPNSRENGGTENMFVMYLGNKDASRDYIGMAVVDGQLTCVYNLGDREAELQVDQILTKSETKEAVMDRVKFQRIYQFARLNYTKGATSSKPETPGVYDMDGRNSNTLLNLDPENVVFYVGGYPPDFKLPSRLSFPPYKGCIELDDLNENVLSLYNFKKTFNLNTTEVEPCRRRKEESDKNYFEGTGYARVPTQPHAPIPTFGQTIQTTVDRGLLFFAENGDRFISLNIEDGKLMVRYKLNSELPKERGVGDAINNGRDHSIQIKIGKLQKRMWINVDVQNTIIDGEVFDFSTYYLGGIPIAIRERFNISTPAFRGCMKNLKKTSGVVRLNDTVGVTKKCSEDWKLVRSASFSRGGQLSFTDLGLPPTDHLQASFGFQTFQPSGILLDHQTWTRNLQVTLEDGYIELSTSDSGGPIFKSPQTYMDGLLHYVSVISDNSGLRLLIDDQLLRNSKRLKHISSSRQSLRLGGSNFEGCISNVFVQRLSLSPEVLDLTSNSLKRDVSLGGCSLNKPPFLMLLKGSTRFNKTKTFRINQLLQDTPVASPRSVKVWQDACSPLPKTQANHGALQFGDIPTSHLLFKLPQELLKPRSQFAVDMQTTSSRGLVFHTGTKNSFMALYLSKGRLVFALGTDGKKLRIKSKEKCNDGKWHTVVFGHDGEKGRLVVDGLRAREGSLPGNSTISIRAPVYLGSPPSGKPKSLPTNSFVGCLKNFQLDSKPLYTPSSSFGVSSCLGGPLEKGIYFSEEGGHVVLAHSVLLGPEFKLVFSIRPRSLTGILIHIGSQPGKHLCVYLEAGKVTASMDSGAGGTSTSVTPKQSLCDGQWHSVAVTIKQHILHLELDTDSSYTAGQIPFPPASTQEPLHLGGAPANLTTLRIPVWKSFFGCLRNIHVNHIPVPVTEALEVQGPVSLNGCPDQ

SEQ ID NO: 2283 - protein, 1814 aa, Homo sapiens
MGNSYAGQLKSARFEEALHNSIEASLRCSSVVPRPIFSQLYLDPDQHPFSSADVKPKVEDLDKDLVNRYTQNGSLDFSNNLTVNEMEDDEDDEEMSDSNSPPIPYSQKPAPEGSCTTDGFCQAGKDLRLVSLCMEQIDIPAGFLLVGAKSPNLPEHILVCAVDKRFLPDDHGKNALLGFSGNCIGCGERGFRYFTEFSNHINLKLTTQPKKQKHLKYYLVRSSQGVLSKGPLICWKECRSRQSSASCHSIKPSSSVSSTVTPENGTTNGYKSGFTQTDAANGNSSHGGKGSASSSTPAHTGNYSLSPRPSYASGDQATMFISGPPKKRHRGWYPGSPLPQPGLVVPVPTVRPLSRTEPLLSAPVPQTPLTGILQPRPIPAGETVIVPENLLSNSGVRPVILIGYGTLPYFYGNVGDIVVSPLLVNCYKIPQLENKDLEKLGLTGSQFLSVENMILLTIQYLVRLGQHQSRALAESMLTTSEFLKEISYELITGKVSFLASHFKTTSLGDDLDKLLEKMQQRRGDSVVTPFDGDLNECVSPQEAAAMIPTQNLDLDNETFHIYQPQLTVARKLLSQVCAIADSGSQSLDLGHFSKVDFIIIVPRSEVLVQQTLQRIRQSGVLVDLGLEENGTAHQRAEKYVVRLDNEIQTKFEVFMRRVKQNPYTLFVLVHDNSHVELTSVISGSLSHSEPSHGLADRVINCREVLEAFNLLVLQVSSFPYTLQTQQSRISSSNEVHWIQLDTGEDVGCEEKLYFGLSEYSKSLQWGITSPLLRCDETFEKMVNTLLERYPRLHSMVVRCYLLIQQYSEALMALTTMASLRDHSTPETLSIMDDLISSPGKNKSGRGHMLIIRVPSVQLAMLAKERLQEVRDKLGLQYRFEIILGNPATELSVATHFVARLKSWRGNEPEEWIPRTYQDLDGLPCIVILTGKDPLGETFPRSLKYCDLRLIDSSYLTRTALEQEVGLACCYVSKEVIRGPTVALDLSGKEQERAAVSENDSDELLIDLERPQSNSSAVTGTSGSIMENGVSSSSTADKSQKQSLTPSFQSPATSLGLDEGVSASSAGAGAGETLKQECDSLGPQMASSTTSKPSSSSSGPRTLPWPGQPIRGCRGPQAALPPVVILSKAAYSLLGSQKSGKLPSSSSLLPHADVAWVSSLRPLLNKDMSSEEQSLYYRQWTLARQHHADYSNQLDPASGTRNFHPRRLLLTGPPQVGKTGSYLQFLRILFRMLIRLLEVDVYDEEEINTDHNESSEVSQSEGEPWPDIESFSKMPFDVSVHDPKYSLMSLVYTEKLAGVKQEVIKESKVEEPRKRETVSIMLTKYAAYNTFHHCEQCRQYMDFTSASQMSDSTLHAFTFSSSMLGEEVQLYFIIPKSKESHFVFSKQGKHLESMRLPLVSDKNLNAVKSPIFTPSSGRHEHGLLNLFHAMEGISHLHLLVVKEYEMPLYRKYWPNHIMLVLPGMFNNAGVGAARFLIKELSYHNLELERNRLEELGIKRQCVWPFIVMMDDSCVLWNIHSVQEPSSQPMEVGVSSKNVSLKTVLQHIEATPKIVHYAILGIQKWSSKLTSQSLKAPFSRCHVHDFILLNTDLTQNVQYDFNRYFCEDADFNLRTNSSGLLICRFNNFSLMKKHVQVGGQRDFIIKPKIMVSESLAPILPLQYICAPDSEHTLLAAPAQFLLEKFLQHASYKLFPKAIHNFRSPVLAIDCYLNIGPEVAICYISSRPHSSNVNCEGVFFSGLLLYLCDSFVGADLKKFKFLKGATLCVICQDRSSLRQTIVRLELEDEWQFRLRDEFQTANSSDDKPLYFLTGRHV

SEQ ID NO: 2284 - protein, 657 aa, Homo sapiens
MGEEDYYLELCERPVQFEKANPVNCVFFDEANKQVFAVRSGGATGVVVKGPDDRNPISFRMDDKGEVKCIKFSLENKILAVQRTSKTVDFCNFIPDNSQLEYTQECKTKNANILGFCWTSSTEIVFITDQGIEFYQVLPEKRSLKLLKSHNLNVNWYMYCPESAVILLSTTVLENVLQPFHFRAGTMSKLPKFEIELPAAPKSTKPSLSERDIAMATIYGQLYVLFLRHHSRTSNSTGAEVVLYHLPREGACKKMHILKLNRTGKFALNVVDNLVVVHHQDTETSVIFDIKLRGEFDGSVTFHHPVLPARSIQPYQIPITGPAAVTSQSPVPCKLYSSSWIVFQPDIIISASQGYLWNLQVKLEPIVNLLPDKGRLMDFLLQRKECKMVILSVCSQMLSESDRASLPVIATVFDKLNHEYKKYLDAEQSYAMAVEAGQSRSSPLLKRPVRTQAVLDQSDVYTHVLSAFVEKKEMPHKFVIAVLMEYIRSLNQFQIAVQHYLHELVIKTLVQHNLFYMLHQFLQYHVLSDSKPLACLLLSLESFYPPAHQLSLDMLKRLSTANDEIVEVLLSKHQVLAALRFIRGIGGHDNISARKFLDAAKQTEDNMLFYTIFRFFEQRNQRLRGSPNFTPGEHCEEHVAFFKQIFGDQALMRPTTF

SEQ ID NO: 2285 - protein, 1278 aa, Homo sapiens
MTARGLALGLLLLLLCPAQVFSQSCVWYGECGIAYGDKRYNCEYSGPPKPLPKDGYDLVQELCPGFFFGNVSLCCDVRQLQTLKDNLQLPLQFLSRCPSCFYNLLNLFCELTCSPRQSQFLNVTATEDYVDPVTNQTKTNVKELQYYVGQSFANAMYNACRDVEAPSSNDKALGLLCGKDADACNATNWIEYMFNKDNGQAPFTITPVFSDFPVHGMEPMNNATKGCDESVDEVTAPCSCQDCSIVCGPKPQPPPPPAPWTILGLDAMYVIMWITYMAFLLVFFGAFFAVWCYRKRYFVSEYTPIDSNIAFSVNASDKGEASCCDPVSAAFEGCLRRLFTRWGSFCVRNPGCVIFFSLVFITACSSGLVFVRVTTNPVDLWSAPSSQARLEKEYFDQHFGPFFRTEQLIIRAPLTDKHIYQPYPSGADVPFGPPLDIQILHQVLDLQIAIENITASYDNETVTLQDICLAPLSPYNTNCTILSVLNYFQNSHSVLDHKKGDDFFVYADYHTHFLYCVRAPASLNDTSLLHDPCLGTFGGPVFPWLVLGGYDDQNYNNATALVITFPVNNYYNDTEKLQRAQAWEKEFINFVKNYKNPNLTISFTAERSIEDELNRESDSDVFTVVISYAIMFLYISLALGHMKSCRRLLVDSKVSLGIAGILIVLSSVACSLGVFSYIGLPLTLIVIEVIPFLVLAVGVDNIFILVQAYQRDERLQGETLDQQLGRVLGEVAPSMFLSSFSETVAFFLGALSVMPAVHTFSLFAGLAVFIDFLLQITCFVSLLGLDIKRQEKNRLDIFCCVRGAEDGTSVQASESCLFRFFKNSYSPLLLKDWMRPIVIAIFVGVLSFSIAVLNKVDIGLDQSLSMPDDSYMVDYFKSISQYLHAGPPVYFVLEEGHDYTSSKGQNMVCGGMGCNNDSLVQQIFNAAQLDNYTRIGFAPSSWIDDYFDWVKPQSSCCRVDNITDQFCNASVVDPACVRCRPLTPEGKQRPQGGDFMRFLPMFLSDNPNPKCGKGGHAAYSSAVNILLGHGTRVGATYFMTYHTVLQTSADFIDALKKARLIASNVTETMGINGSAYRVFPYSVFYVFYEQYLTIIDDTIFNLGVSLGAIFLVTMVLLGCELWSAVIMCATIAMVLVNMFGVMWLWGISLNAVSLVNLVMSCGISVEFCSHITRAFTVSMKGSRVERAEEALAHMGSSVFSGITLTKFGGIVVLAFAKSQIFQIFYFRMYLAMVLLGATHGLIFLPVLLSYIGPSVNKAKSCATEERYKGTERERLLNF

SEQ ID NO: 2286 - protein, 1976 aa, Homo sapiens
MAQRTGLEDPERYLFVDRAVIYNPATQADWTAKKLVWIPSERHGFEAASIKEERGDEVMVELAENGKKAMVNKDDIQKMNPPKFSKVEDMAELTCLNEASVLHNLKDRYYSGLIYTYSGLFCVVINPYKNLPIYSENIIEMYRGKKRHEMPPHIYAISESAYRCMLQDREDQSILCTGESGAGKTENTKKVIQYLAHVASSHKGRKDHNIPGELERQLLQANPILESFGNAKTVKNDNSSRFGKFIRINFDVTGYIVGANIETYLLEKSRAVRQAKDERTFHIFYQLLSGAGEHLKSDLLLEGFNNYRFLSNGYIPIPGQQDKDNFQETMEAMHIMGFSHEEILSMLKVVSSVLQFGNISFKKERNTDQASMPENTVAQKLCHLLGMNVMEFTRAILTPRIKVGRDYVQKAQTKEQADFAVEALAKATYERLFRWLVHRINKALDRTKRQGASFIGILDIAGFEIFELNSFEQLCINYTNEKLQQLFNHTMFILEQEEYQREGIEWNFIDFGLDLQPCIDLIERPANPPGVLALLDEECWFPKATDKTFVEKLVQEQGSHSKFQKPRQLKDKADFCIIHYAGKVDYKADEWLMKNMDPLNDNVATLLHQSSDRFVAELWKDVDRIVGLDQVTGMTETAFGSAYKTKKGMFRTVGQLYKESLTKLMATLRNTNPNFVRCIIPNHEKRAGKLDPHLVLDQLRCNGVLEGIRICRQGFPNRIVFQEFRQRYEILTPNAIPKGFMDGKQACERMIRALELDPNLYRIGQSKIFFRAGVLAHLEEERDLKITDIIIFFQAVCRGYLARKAFAKKQQQLSALKVLQRNCAAYLKLRHWQWWRVFTKVKPLLQVTRQEEELQAKDEELLKVKEKQTKVEGELEEMERKHQQLLEEKNILAEQLQAETELFAEAEEMRARLAAKKQELEEILHDLESRVEEEEERNQILQNEKKKMQAHIQDLEEQLDEEEGARQKLQLEKVTAEAKIKKMEEEILLLEDQNSKFIKEKKLMEDRIAECSSQLAEEEEKAKNLAKIRNKQEVMISDLEERLKKEEKTRQELEKAKRKLDGETTDLQDQIAELQAQIDELKLQLAKKEEELQGALARGDDETLHKNNALKVVRELQAQIAELQEDFESEKASRNKAEKQKRDLSEELEALKTELEDTLDTTAAQQELRTKREQEVAELKKALEEETKNHEAQIQDMRQRHATALEELSEQLEQAKRFKANLEKNKQGLETDNKELACEVKVLQQVKAESEHKRKKLDAQVQELHAKVSEGDRLRVELAEKASKLQNELDNVSTLLEEAEKKGIKFAKDAASLESQLQDTQELLQEETRQKLNLSSRIRQLEEEKNSLQEQQEEEEEARKNLEKQVLALQSQLADTKKKVDDDLGTIESLEEAKKKLLKDAEALSQRLEEKALAYDKLEKTKNRLQQELDDLTVDLDHQRQVASNLEKKQKKFDQLLAEEKSISARYAEERDRAEAEAREKETKALSLARALEEALEAKEEFERQNKQLRADMEDLMSSKDDVGKNVHELEKSKRALEQQVEEMRTQLEELEDELQATEDAKLRLEVNMQAMKAQFERDLQTRDEQNEEKKRLLIKQVRELEAELEDERKQRALAVASKKKMEIDLKDLEAQIEAANKARDEVIKQLRKLQAQMKDYQRELEEARASRDEIFAQSKESEKKLKSLEAEILQLQEELASSERARRHAEQERDELADEITNSASGKSALLDEKRRLEARIAQLEEELEEEQSNMELLNDRFRKTTLQVDTLNAELAAERSAAQKSDNARQQLERQNKELKAKLQELEGAVKSKFKATISALEAKIGQLEEQLEQEAKERAAANKLVRRTEKKLKEIFMQVEDERRHADQYKEQMEKANARMKQLKRQLEEAEEEATRANASRRKLQRELDDATEANEGLSREVSTLKNRLRRGGPISFSSSRSGRRQLHLEGASLELSDDDTESKTSDVNETQPPQSE

SEQ ID NO: 2287 - protein, 1429 aa, Homo sapiens
MAGGAWGRLACYLEFLKKEELKEFQLLLANKAHSRSSSGETPAQPEKTSGMEVASYLVAQYGEQRAWDLALHTWEQMGLRSLCAQAQEGAGHSPSFPYSPSEPHLGSPSQPTSTAVLMPWIHELPAGCTQGSERRVLRQLPDTSGRRWREISASLLYQALPSSPDHESPSQESPNAPTSTAVLGSWGSPPQPSLAPREQEAPGTQWPLDETSGIYYTEIREREREKSEKGRPPWAAVVGTPPQAHTSLQPHHHPWEPSVRESLCSTWPWKNEDFNQKFTQLLLLQRPHPRSQDPLVKRSWPDYVEENRGHLIEIRDLFGPGLDTQEPRIVILQGAAGIGKSTLARQVKEAWGRGQLYGDRFQHVFYFSCRELAQSKVVSLAELIGKDGTATPAPIRQILSRPERLLFILDGVDEPGWVLQEPSSELCLHWSQPQPADALLGSLLGKTILPEASFLITARTTALQNLIPSLEQARWVEVLGFSESSRKEYFYRYFTDERQAIRAFRLVKSNKELWALCLVPWVSWLACTCLMQQMKRKEKLTLTSKTTTTLCLHYLAQALQAQPLGPQLRDLCSLAAEGIWQKKTLFSPDDLRKHGLDGAIISTFLKMGILQEHPIPLSYSFIHLCFQEFFAAMSYVLEDEKGRGKHSNCIIDLEKTLEAYGIHGLFGASTTRFLLGLLSDEGEREMENIFHCRLSQGRNLMQWVPSLQLLLQPHSLESLHCLYETRNKTFLTQVMAHFEEMGMCVETDMELLVCTFCIKFSRHVKKLQLIEGRQHRSTWSPTMVVLFRWVPVTDAYWQILFSVLKVTRNLKELDLSGNSLSHSAVKSLCKTLRRPRCLLETLRLAGCGLTAEDCKDLAFGLRANQTLTELDLSFNVLTDAGAKHLCQRLRQPSCKLQRLQLVSCGLTSDCCQDLASVLSASPSLKELDLQQNNLDDVGVRLLCEGLRHPACKLIRLGLDQTTLSDEMRQELRALEQEKPQLLIFSRRKPSVMTPTEGLDTGEMSNSTSSLKRQRLGSERAASHVAQANLKLLDVSKIFPIAEIAEESSPEVVPVELLCVPSPASQGDLHTKPLGTDDDFWGPTGPVATEVVDKEKNLYRVHFPVAGSYRWPNTGLCFVMREAVTVEIEFCVWDQFLGEINPQHSWMVAGPLLDIKAEPGAVEAVHLPHFVALQGGHVDTSLFQMAHFKEEGMLLEKPARVELHHIVLENPSFSPLGVLLKMIHNALRFIPVTSVVLLYHRVHPEEVTFHLYLIPSDCSIRKELELCYRSPGEDQLFSEFYVGHLGSGIRLQVKDKKDETLVWEALVKPGDLMPATTLIPPARIAVPSPLDAPQLLHFVDQYREQLIARVTSVEVVLDKLHGQVLSQEQYERVLAENTRPSQMRKLFSLSQSWDRKCKDGLYQALKETHPHLIMELWEKGSKKGLLPLSS

SEQ ID NO: 2288 - protein, 1303 aa, Homo sapiens
MGDPAPARSLDDIDLSALRDPAGIFELVEVVGNGTYGQVYKGRHVKTGQLAAIKVMDVTEDEEEEIKQEINMLKKYSHHRNIATYYGAFIKKSPPGNDDQLWLVMEFCGAGSVTDLVKNTKGNALKEDCIAYICREILRGLAHLHAHKVIHRDIKGQNVLLTENAEVKLVDFGVSAQLDRTVGRRNTFIGTPYWMAPEVIACDENPDATYDYRSDIWSLGITAIEMAEGAPPLCDMHPMRALFLIPRNPPPRLKSKKWSKKFIDFIDTCLIKTYLSRPPTEQLLKFPFIRDQPTERQVRIQLKDHIDRSRKKRGEKEETEYEYSGSEEEDDSHGEEGEPSSIMNVPGESTLRREFLRLQQENKSNSEALKQQQQLQQQQQRDPEAHIKHLLHQRQRRIEEQKEERRRVEEQQRREREQRKLQEKEQQRRLEDMQALRREEERRQAEREQEYKRKQLEEQRQSERLQRQLQQEHAYLKSLQQQQQQQQLQKQQQQQLLPGDRKPLYHYGRGMNPADKPAWAREVEERTRMNKQQNSPLAKSKPGSTGPEPPIPQASPGPPGPLSQTPPMQRPVEPQEGPHKSLVAHRVPLKPYAAPVPRSQSLQDQPTRNLAAFPASHDPDPAIPAPTATPSARGAVIRQNSDPTSEGPGPSPNPPAWVRPDNEAPPKVPQRTSSIATALNTSGAGGSRPAQAVRASNPDLRRSDPGWERSDSVLPASHGHLPQAGSLERNRVGVSSKPDSSPVLSPGNKAKPDDHRSRPGRPASYKRAIGEDFVLLKERTLDEAPRPPKKAMDYSSSSEEVESSEDDEEEGEGGPAEGSRDTPGGRSDGDTDSVSTMVVHDVEEITGTQPPYGGGTMVVQRTPEEERNLLHADSNGYTNLPDVVQPSHSPTENSKGQSPPSKDGSGDYQSRGLVKAPGKSSFTMFVDLGIYQPGGSGDSIPITALVGGEGTRLDQLQYDVRKGSVVNVNPTNTRAHSETPEIRKYKKRFNSEILCAALWGVNLLVGTENGLMLLDRSGQGKVYGLIGRRRFQQMDVLEGLNLLITISGKRNKLRVYYLSWLRNKILHNDPEVEKKQGWTTVGDMEGCGHYRVVKYERIKFLVIALKSSVEVYAWAPKPYHKFMAFKSFADLPHRPLLVDLTVEEGQRLKVIYGSSAGFHAVDVDSGNSYDIYIPVHIQSQITPHAIIFLPNTDGMEMLLCYEDEGVYVNTYGRIIKDVVLQWGEMPTSVAYICSNQIMGWGEKAIEIRSVETGHLDGVFMHKRAQRLKFLCERNDKVFFASVRSGGSSQVYFMTLNRNCIMNW

SEQ ID NO: 2289 - protein, 291 aa, Homo sapiens
MTKEYQDLQHLDNEESDHHQLRKGPPPPQPLLQRLCSGPRLLLLSLGLSLLLLVVVCVIGSQNSQLQEELRGLRETFSNFTASTEAQVKGLSTQGGNVGRKMKSLESQLEKQQKDLSEDHSSLLLHVKQFVSDLRSLSCQMAALQGNGSERTCCPVNWVEHERSCYWFSRSGKAWADADNYCRLEDAHLVVVTSWEEQKFVQHHIGPVNTWMGLHDQNGPWKWVDGTDYETGFKNWRPEQPDDWYGHGLGGGEDCAHFTDDGRWNDDVCQRPYRWVCETELDKASQEPPLL

SEQ ID NO: 2290 - protein, 393 aa, Homo sapiens [sequence omitted]

SEQ ID NO: 2291 - protein, 534 aa, Homo sapiens
MQAARVDYIAPWWVVWLHSVPHVGLRLQPVNSTFSPGDESYQESLLFLGLVAAVCLGLNLIFLVAYLVCACHCRRDDAVQTKQHHSCCITWTAVVAGLICCAAVGVGFYGNSETNDGAYQLMYSLDDANHTFSGIDALVSGTTQKMKVDLEQHLARLSEIFAARGDYLQTLKFIQQMAGSVVVQLSGLPVWREVTMELTKLSDQTGYVEYYRWLSYLLLFILDLVICLIACLGLAKRSKCLLASMLCCGALSLLLSWASLAADGSAAVATSDFCVAPDTFILNVTEGQISTEVTRYYLYCSQSGSSPFQQTLTTFQRALTTMQIQVAGLLQFAVPLFSTAEEDLLAIQLLLNSSESSLHQLTAMVDCRGLHKDYLDALAGICYDGLQGLLYLGLFSFLAALAFSTMICAGPRAWKHFTTRNRDYDDIDDDDPFNPQAWRMAAHSPPRGQLHSFCSYSSGLGSQTSLQPPAQTISNAPVSEYMNQAMLFGRNPRYENVPLIGRASPPPTYSPSMRATYLSVADEHLRHYGNQFPA

SEQ ID NO: 2292 - protein, 517 aa, Homo sapiens
MAAQLLEEKLTCAICLGLYQDPVTLPCGHNFCGACIRDWWDRCGKACPECREPFPDGAELRRNVALSGVLEVVRAGPARDPGPDPGPGPDPAARCPRHGRPLELFCRTEGRCVCSVCTVRECRLHERALLDAERLKREAQLRASLEVTQQQATQAEGQLLELRKQSSQIQNSACILASWVSGKFSSLLQALEIQHTTALRSIEVAKTQALAQARDEEQRLRVHLEAVARHGCRIRELLEQVDEQTFLQESQLLQPPGPLGPLTPLQWDEDQQLGDLKQLLSRLCGLLLEEGSHPGAPAKPVDLAPVEAPGPLAPVPSTVCPLRRKLWQNYRNLTFDPVSANRHFYLSRQDQQVKHCRQSRGPGGPGSFELWQVQCAQSFQAGHHYWEVRASDHSVTLGVSYPQLPRCRLGPHTDNIGRGPCSWGLCVQEDSLQAWHNGEAQRLPGVSGRLLGMDLDLASGCLTFYSLEPQTQPLYTFHALFNQPLTPVFWLLEGRTLTLCHQPGAVFPLGPQEEVLS

SEQ ID NO: 2293 - protein, 389 aa, Homo sapiens
MELSAVGERVFAAEALLKRRIRKGRMEYLVKWKGWSQKYSTWEPEENILDARLLAAFEEREREMELYGPKKRGPKPKTFLLKAQAKAKAKTYEFRSDSARGIRIPYPGRSPQDLASTSRAREGLRNMGLSPPASSTSTSSTCRAEAPRDRDRDRDRDRERDRERERERERERERERERERGTSRVDDKPSSPGDSSKKRGPKPRKELPDPSQRPLGEPSAGLGEYLKGRKLDDTPSGAGKFPAGHSVIQLARRQDSDLVQCGVTSPSSAEATGKLAVDTFPARVIKHRAAFLEAKGQGALDPNGTRVRHGSGPPSSGGGLYRDMGAQGGRPSLIARIPVARILGDPEEESWSPSLTNLEKVVVTDVTSNFLTVTIKESNTDQGFFKEKR

SEQ ID NO: 2294 - protein, 679 aa, Homo sapiens
MGALTSRQHAGVEEVDIPSNSVYRYPPKSGSYFASHFIMGGEKFDSTHPEGYLFGENSDLNFLGNRPVVFPYAAPPPQEPVKTLRSLVNIRKDTLRLVKCAEEVKSPGEEASKAKVHYNVEFTFDTDARVAITIYYQATEEFQNGIASYIPKDNSLQSETVQYKRGVCQQFCLPSHTVDPSEWAEEELGFDLDREVYPLVVHAVVDEGDEYFGHCHVLLGTFEKHTDGTFCVKPLKQKQVVDGVSYLLQEIYGIENKYNTQDSKVAEDEVSDNSAECVVCLSDVRDTLILPCRHLCLCNTCADTLRYQANNCPICRLPFRALLQIRAMRKKLGPLSPTSFNPIISSQTSDSEEHPSSENIPPGYEVVSLLEALNGPLTPSPAVPPLHVLGDGHLSGMLPSYGSDGHLPPVRTISPLDRLSDSSSQGLKLKKSLSKSTSQNSSVLHEEEDEHSCSESETQLSQRPSVQHLGEECGVTPESENLTLSSSGAIDQSSCTGTPLSSTISSPEGPASSSLAQSVMSMASSQISTDTVSSMSGSYIAPGTEEEGEALSSPQPASRAPSEEGEGLPAESPDSNFAGLPAGEQDAEGNDVIEEEDGSPTQEGQRTCAFLGMECDNNNDFDIASVKALDNKLCSEVCLPGAWQADDNAVSRNAQRRRLSSSSLEDSETRPCVWGPLAV

SEQ ID NO: 2295 - protein, 1083 aa, Homo sapiens
MKGTRAIGSVPERSPAGVDLSLTGLPPPVSRRPGSAATTKPIVRSVSVVTGSEQKRKVLEATGPGGSQAINNLRRSNSTTQVSQPRSGSPRPTEPTDFLMLFEGSPSGKKRPASLSTAPSEKGATWNVLDDQPRGFTLPSNARSSSALDSPAGPRRKECTVALAPNFTANNRSNKGAVGNCVTTMVHNRYTPSERAPPLKSSNQTAPSLNNIIKAATCEGSESSGFGKLPKNVSSATHSARNNTGGSTGLPRRKEVTEEEAERFIHQVNQATVTIQRWYRHQVQRRGAGAARLEHLLQAKREEQRQRSGEGTLLDLHQQKEAARRKAREEKARQARRAAIQELQQKRALRAQKASTAERGPPENPRETRVPGMRQPAQELSPTPGGTAHQALKANNTGGGLPAAGPGDRCLPTSDSSPEPQQPPEDRTQDVLAQDAAGDNLEMMAPSRGSAKSRGPLEELLHTLQLLEKEPDVLPRPRTHHRGRYAWASEVTTEDDASSLTADNLEKFGKLSAFPEPPEDGTLLSEAKLQSIMSFLDEMEKSGQDQLDSQQEGWVPEAGPGPLELGSEVSTSVMRLKLEVEEKKQAMLLLQRALAQQRDLTARRVKETEKALSRQLQRQREHYEATIQRHLAFIDQLIEDKKVLSEKCEAVVAELKQEDQRCTERVAQAQAQHELEIKKLKELMSATEKARREKWISEKTKKIKEVTVRGLEPEIQKLIARHKQEVRRLKSLHEAELLQSDERASQRCLRQAEELREQLEREKEALGQQERERARQRFQQHLEQEQWALQQQRQRLYSEVAEERERLGQQAARQRAELEELRQQLEESSSALTRALRAEFEKGREEQERRHQMELNTLKQQLELERQAWEAGRTRKEEAWLLNREQELREEIRKGRDKEIELVIHRLEADMALAKEESEKAAESRIKRLRDKYEAELSELEQSERKLQERCSELKGQLGEAEGENLRLQGLVRQKERALEDAQAVNEQLSSERSNLAQVIRQEFEDRLAASEEETRQAKAELATLQARQQLELEEVHRRVKTALARKEEAVSSLRTQHEAAVKRADHLEELLEQHRRPTPSTK

SEQ ID NO: 2296 - protein, 723 aa, Homo sapiens
MSLLKERKPKKPHYIPRPPGKPFKYKCFQCPFTCNEKSHLFNHMKYGLCKNSITLVSEQDRVPKCPKSNSLDPKQTNQPDATAKPASSKSVANGLSAFDSKLQHSSAREDIKENLELQARGTHRCLGQKPALHRASPCKSPAPEAALGAQPALEGAARPSAFVPVGEHRLKGPDNAEAPETLALHNPTAKAVSFHTKSAFHTPGYPWKAGSPFLPPEFPHKISSTKGLGAISPYMHPTIPEYPPHFYTEHGLATIYSPYLLAGSSPECDAPLLSVYGTQDPRHFLPHPGPIPKHLAPSPATYDHYRFFQQYPSNLPIPYGFYRPESAFSSYGLRLPPVTGLTRDQSSHLLEEATLVYPASSPSRLNPSDPNRKHVEFESPIPEAKDSSKAGQRDTEGSKMSPRAGSAATGSPGRPSPTDFMQTSQTCEGLYDLSNKAASSALGRLYPPEQSLTAFRPVKKSTECLPAQAAETTAESPVSLNVVNGDPPAPTGSASLVSEAAPSSPDDSSGMGPLNLSKKSEINLAATHEPTYQGSPQAETASFSELQDLPLNLSVKDPCNTQAPRPAFPGRPRAAEPAAAVPQKTGTEGSEDGPSHPETKPGSLDGDGAPPTGPGEEAPDACAVDSSEEQKQTAAVALCQLAAYSPRNIRVGDGDAAAPEPACRQDTPTLSSMESQEAQCDLRPKGQKRTSLRDAGKSQQGAKKAKLQDTARVFTLRRRARVS

SEQ ID NO: 2297 - protein, 669 aa, Homo sapiens
MGSNSSRIGDLPKNEYLKKLSGTESISENDPFWNQLLSFSFPAPTSSSELKLLEEATISVCRSLVENNPRTGNLGALIKVFLSRTKELKLSAECQNHIFIWQTHNALFIICCLLKVFICQMSEEELQLHFTYEEKSPGNYSSDSEDLLEELLCCLMQLITDIPLLDITYEISVEAISTMVVFLSCQLFHKEVLRQSISHKYLMRGPCLPYTSKLVKTLLYNFIRQEKPPPPGAHVFPQQSDGGGLLYGLASGVATGLWTVFTLGGVGSKAAASPELSSPLANQSLLLLLVLANLTDASDAPNPYRQAIMSFKNTQDSSPFPSSIPHAFQINFNSLYTALCEQQTSDQATLLLYTLLHQNSNIRTYMLARTDMENLVLPILEILYHVEERNSHHVYMALIILLILTEDDGFNRSIHEVILKNITWYSERVLTEISLGSLLILVVIRTIQYNMTRTRDKYLHTNCLAALANMSAQFRSLHQYAAQRIISLFSLLSKKHNKVLEQATQSLRGSLSSNDVPLPDYAQDLNVIEEVIRMMLEIINSCLTNSLHHNPNLVYALLYKRDLFEQFRTHPSFQDIMQNIDLVISFFSSRLLQAGAELSVERVLEIIKQGVVALPKDRLKKFPELKFKYVEEEQPEEFFIPYVWSLVYNSAVGLYWNPQDIQLFTMDSD

SEQ ID NO: 2298 - protein, 605 aa, Homo sapiens
MAEDWLDCPALGPGWKRREVFRKSGATCGRSDTYYQSPTGDRIRSKVELTRYLGPACDLTLFDFKQGILCYPAPKAHPVAVASKKRKKPSRPAKTRKRQVGPQSGEVRKEAPRDETKADTDTAPASFPAPGCCENCGISFSGDGTQRQRLKTLCKDCRAQRIAFNREQRMFKRVGCGECAACQVTEDCGACSTCLLQLPHDVASGLFCKCERRRCLRIVERSRGCGVCRGCQTQEDCGHCPICLRPPRPGLRRQWKCVQRRCLRGKHARRKGGCDSKMAARRRPGAQPLPPPPPSQSPEPTEPHPRALAPSPPAEFIYYCVDEDELQPYTNRRQNRKCGACAACLRRMDCGRCDFCCDKPKFGGSNQKRQKCRWRQCLQFAMKRLLPSVWSESEDGAGSPPPYRRRKRPSSARRHHLGPTLKPTLATRTAQPDHTQAPTKQEAGGGFVLPPPGTDLVFLREGASSPVQVPGPVAASTEALLQEAQCSGLSWVVALPQVKQEKADTQDEWTPGTAVLTSPVLVPGCPSKAVDPGLPSVKQEPPDPEEDKEENKDDSASKLAPEEEAGGAGTPVITEIFSLGGTRFRDTAVWLPRSKDLKKPGARKQ

SEQ ID NO: 2299 - protein, 556 aa, Homo sapiens
MAEDWLDCPALGPGWKRREVFRKSGATCGRSDTYYQSPTGDRIRSKVELTRYLGPACDLTLFDFKQGILCYPAPKAHPVAVASKKRKKPSRPAKTRKRQVGPQSGEVRKEAPRDETKADTDTAPASFPAPGCCENCGISFSGDGTQRQRLKTLCKDCRAQRIAFNREQRMFKSRGCGVCRGCQTQEDCGHCPICLRPPRPGLRRQWKCVQRRCLRGKHARRKGGCDSKMAARRRPGAQPLPPPPPSQSPEPTEPHPRALAPSPPAEFIYYCVDEDELQPYTNRRQNRKCGACAACLRRMDCGRCDFCCDKPKFGGSNQKRQKCRWRQCLQFAMKRLLPSVWSESEDGAGSPPPYRRRKRPSSARRHHLGPTLKPTLATRTAQPDHTQAPTKQEAGGGFVLPPPGTDLVFLREGASSPVQVPGPVAASTEALLQEAQCSGLSWVVALPQVKQEKADTQDEWTPGTAVLTSPVLVPGCPSKAVDPGLPSVKQEPPDPEEDKEENKDDSASKLAPEEEAGGAGTPVITEIFSLGGTRFRDTAVWLPRSKDLKKPGARKQ

SEQ ID NO: 2300 - protein, 586 aa, Homo sapiens
MAEDWLDCPALGPGWKRREVFRKSGATCGRSDTYYQSPTGDRIRSKVELTRYLGPACDLTLFDFKQGILCYPAPKAHPVAVASKKRKKPSRPAKTRKRQVGPQSGEVRKEAPRDETKADTDTAPASFPAPGCCENCGISFSGDGTQRQRLKTLCKDCRAQRIAFNREQRMFKRVGCGECAACQVTEDCGACSTCLLQLPHDVASGLFCKCERRRCLRIVERSRGCGVCRGCQTQEDCGHCPICLRPPRPGLRRQWKCVQRRCLRGKHARRKGGCDSKMAARRRPGAQPLPPPPPSQSPEPTEPQPYTNRRQNRKCGACAACLRRMDCGRCDFCCDKPKFGGSNQKRQKCRWRQCLQFAMKRLLPSVWSESEDGAGSPPPYRRRKRPSSARRHHLGPTLKPTLATRTAQPDHTQAPTKQEAGGGFVLPPPGTDLVFLREGASSPVQVPGPVAASTEALLQAVDPGLPSVKQEPPDPEEDKEENKDDSASKLAPEEEAGGAGTPVITEIFSLGGTRFRDTAVWLPSLQGRHSGREDGCKVWETEDTVEPTSTSWNPRGWPGTHVSLSPPPASMMWVSCRRSWCPSSQS

SEQ ID NO: 2301 - protein, 400 aa, Homo sapiens
MDSLGAVSTRLGFDLFKELKKTNDGNIFFSPVGILTAIGMVLLGTRGATASQLEEVFHSEKETKSSRIKAEEKEVVRIKAEGKEIENTEAVHQQFQKFLTEISKLTNDYELNITNRLFGEKTYLFLQKYLDYVEKYYHASLEPVDFVNAADESRKKINSWVESKTNEKIKDLFPDGSISSSTKLVLVNMVYFKGQWDREFKKENTKEEKFWMNKSTSKSVQMMTQSHSFSFTFLEDLQAKILGIPYKNNDLSMFVLLPNDIDGLEKIIDKISPEKLVEWTSPGHMEERKVNLHLPRFEVEDGYDLEAVLAAMGMGDAFSEHKADYSGMSSGSGLYAQKFLHSSFVAVTEEGTEAAAATGIGFTVTSAPGHENVHCNHPFLFFIRHNESNSILFFGRFSSP

SEQ ID NO: 2302 - protein, 1178 aa, Homo sapiens
MLRMKLPLKPTHPAEPPPEAEEPEADARPGAKAPSRRRRDCRPPPPPPPPAGPSRGPLPPPPPPRGLGPPVAGGAAAGAGMPGGGGGPSAALREQERVYEWFGLVLGSAQRLEFMCGLLDLCNPLELRFLGSCLEDLARKDYHYLRDSEAKANGLSDPGPLADFREPAVRSRLIVYLALLGSENREAAGRLHRLLPQVDSVLKSLRAARGEGSRGGAEDERGEDGDGEQDAEKDGSGPEGGIVEPRVGGGLGSRAQEELLLLFTMASLHPAFSFHQRVTLREHLERLRAALRGGPEDAEVEVEPCKFAGPRAQNNSAHGDYMQNNESSLIEQAPIPQDGLTVAPHRAQREAVHIEKIMLKGVQRKRADKYWEYTFKVNWSDLSVTTVTKTHQELQEFLLKLPKELSSETFDKTILRALNQGSLKREERRHPDLEPILRQLFSSSSQAFLQSQKVHSFFQSISSDSLHSINNLQSSLKTSKILEHLKEDSSEASSQEEDVLQHAIIHKKHTGKSPIVNNIGTSCSPLDGLTMQYSEQNGIVDWRKQSCTTIQHPEHCVTSADQHSAEKRSLSSINKKKGKPQTEKEKIKKTDNRLNSRINGIRLSTPQHAHGGTVKDVNLDIGSGHDTCGETSSESYSSPSSPRHDGRESFESEEEKDRDTDSNSEDSGNPSTTRFTGYGSVNQTVTVKPPVQIASLGNENGNLLEDPLNSPKYQHISFMPTLHCVMHNGAQKSEVVVPAPKPADGKTIGMLVPSPVAISAIRESANSTPVGILGPTACTGESEKHLELLASPLPIPSTFLPHSSTPALHLTVQRLKLPPPQGSSESCTVNIPQQPPGSLSIASPNTAFIPIHNPGSFPGSPVATTDPITKSASQVVGLNQMVPQIEGNTGTVPQPTNVKVVLPAAGLSAAQPPASYPLPGSPLAAGVLPSQNSSVLSTAATSPQPASAGISQAQATVPPAVPTHTPGPAPSPSPALTHSTAQSDSTSYISAVGNTNANGTVVPPQQMGSGPCGSCGRRCSCGTNGNLQLNSYYYPNPMPGPMYRVPSFFTLPSICNGSYLNQAHQSNGNQLPFFLPQTPYANGLVHDPVMGSQANYGMQQMAGFGRFYPVYPAPNVVANTSGSGPKKNGNVSCYNCGVSGHYAQDCKQSSMEANQQGTYRLRYAPPLPPSNDTLDSAD

SEQ ID NO: 2303 - protein, 1255 aa, Homo sapiens [sequence omitted]

SEQ ID NO: 2304 - protein, 584 aa, Homo sapiens
MSVRYSSSKHYSSSRSGGGGGGGGCGGGGGVSSLRISSSKGSLGGGFSSGGFSGGSFSRGSSGGGCFGGSSGGYGGLGGFGGGSFRGSYGSSSFGGSYGGIFGGGSFGGGSFGGGSFGGGGFGGGGFGGGFGGGFGGDGGLLSGNEKVTMQNLNDRLASYLDKVRALEESNYELEGKIKEWYEKHGNSHQGEPRDYSKYYKTIDDLKNQILNLTTDNANILLQIDNARLAADDFRLKYENEVALRQSVEADINGLRRVLDELTLTKADLEMQIESLTEELAYLKKNHEEEMKDLRNVSTGDVNVEMNAAPGVDLTQLLNNMRSQYEQLAEQNRKDAEAWFNEKSKELTTEIDNNIEQISSYKSEITELRRNVQALEIELQSQLALKQSLEASLAETEGRYCVQLSQIQAQISALEEQLQQIRAETECQNTEYQQLLDIKIRLENEIQTYRSLLEGEGSSGGGGRGGGSFGGGYGGGSSGGGSSGGGHGGGHGGSSGGGYGGGSSGGGSSGGGYGGGSSSGGHGGSSSGGYGGGSSGGGGGGYGGGSSGGGSSSGGGYGGGSSSGGHKSSSSGSVGESSSKGPRY

SEQ ID NO: 2305 - protein, 282 aa, Homo sapiens
MSGADRSPNAGAAPDSAPGQAAVASAYQRFEPRAYLRNNYAPPRGDLCNPNGVGPWKLRCLAQTFATGEVSGRTLIDIGSGPTVYQLLSACSHFEDITMTDFLEVNRQELGRWLQEEPGAFNWSMYSQHACLIEGKGECWQDKERQLRARVKRVLPIDVHQPQPLGAGSPAPLPADALVSAFCLEAVSPDLASFQRALDHITTLLRPGGHLLLIGALEESWYLAGEARLTVVPVSEEEVREALVRSGYKVRDLRTYIMPAHLQTGVDDVKGVFFAWAQKVGL

SEQ ID NO: 2306 - protein, 179 aa, Homo sapiens
MGQLIAKLMSIFGNQEHTVIIVGLDNEGKTTILYRFLTNEVVHMCPTIGSNVEEIILPKTHFFMWDIVRPEALSFIWNTYYSNTEFIILVIDSTDRDRLLTTREELYKMLAHEALQDASVLIFANKQDVKDSMRMVEISHFLTLSTIKDHSWHIQGCCALTREGLPARLQWMESQAAAN

SEQ ID NO: 2307 - protein, 531 aa, Homo sapiens
MLPITDRLLHLLGLEKTAFRIYAVSTLLLFLLFFLFRLLLRFLRLCRSFYITCRRLRCFPQPPRRNWLLGHLGMYLPNEAGLQDEKKVLDNMHHVLLVWMGPVLPLLVLVHPDYIKPLLGASAAIAPKDDLFYGFLKPWLGDGLLLSKGDKWSRHRRLLTPAFHFDILKPYMKIFNQSADIMHAKWRHLAEGSAVSLDMFEHISLMTLDSLQKCVFSYNSNCQEKMSDYISAIIELSALSVRRQYRLHHYLDFIYYRSADGRRFRQACDMVHHFTTEVIQERRRALRQQGAEAWLKAKQGKTLDFIDVLLLARDEDGKELSDEDIRAEADTFMFEGHDTTSSGISWMLFNLAKYPEYQEKCREEIQEVMKGRELEELEWDDLTQLPFTTMCIKESLRQYPPVTLVSRQCTEDIKLPDGRIIPKGIICLVSIYGTHHNPTVWPDSKVYNPYRFDPDNPQQRSPLAYVPFSAGPRNCIGQSFAMAELRVVVALTLLRFRLSVDRTRKVRRKPELILRTENGLWLKVEPLPPRA

SEQ ID NO: 2308 - protein, 218 aa, Homo sapiens
MCDLRRPAAGGMMDLAYVCEWEKWSKSTHCPSVPLACAWSCRNLIAFTMDLRSDDQDLTRMIHILDTEHPWDLHSIPSEHHEAITCLEWDQSGSRLLSADADGQIKCWSMADHLANSWESSVGSLVEGDPIVALSWLHNGVKLALHVEKSGASSFGEKFSRVKFSPSPTEECKACTRCGCVTMLKSPNRTTAVKQWEQRWIKNCLCGGLWWRVPLSYP

SEQ ID NO: 2309 - protein, 472 aa, Homo sapiens
MNNSQGRVTFEDVTVNFTQGEWQRLNPEQRNLYRDVMLENYSNLVSVGQGETTKPDVILRLEQGKEPWLEEEEVLGSGRAEKNGDIGGQIWKPKDVKESLAREVPSINKETLTTQKGVECDGSKKILPLGIDDVSSLQHYVQNNSHDDNGYRKLVGNNPSKFVGQQLKCNACRKLFSSKSRLQSHLRRHACQKPFECHSCGRAFGEKWKLDKHQKTHAEERPYKCENCGNAYKQKSNLFQHQKMHTKEKPYQCKTCGKAFSWKSSCINHEKIHNAKKSYQCNECEKSFRQNSTLIQHKKVHTGQKPFQCTDCGKAFIYKSDLVKHQRIHTGEKPYKCSICEKAFSQKSNVIDHEKIHTGKRAYECDLCGNTFIQKKNLIQHKKIHTGEKPYECNRCGKAFFQKSNLHSHQKTHSGERTYRCSECGKTFIRKLNLSLHKKTHTGQKPYGCSECGKAFADRSYLVRHQKRIHSR

SEQ ID NO: 2310 - protein, 1507 aa, Homo sapiens
MPRRRPPASGAAQFPERIATRSPDPIPLCTFQRQPRAAPVQPPCRLFFVTFAGCGHRWRSESKPGWISRSRSGIALRAARPPGSSPPRPAAPRPPPPGGVVAEAPGDVVIPRPRVQPMRVARGGPWTPNPAFREAESWSQIGNQRVSEQLLETSLGNEVSDTEPLSPASAGLRRNPALPPGPFAQNFSWGNQENLPPALGKIANGGGTGAGKAECGYETESHLLEPHEIPLNVNTHKFSDCEFPYEFCTVCFSPFKLLGMSGVEGVWNQHSRSASMHTFLNHSATGIREAGCRKDMPVSEMAEDGSEEIMFIWCEDCSQYHDSECPELGPVVMVKDSFVLSRARSWPASGHVHTQAGQGMRGYEDRDRADPQQLPEAVPAGLVRRLSGQQLPCRSTLTWGRLCHLVAQGRSSLPPNLEIRRLEDGAEGVFAITQLVKRTQFGPFESRRVAKWEKESAFPLKVFQKDGHPVCFDTSNEDDCNWMMLVRPAAEAEHQNLTAYQHGSDVYFTTSRDIPPGTELRVWYAAFYAKKMDKPMLKQAGSGVHAAGTPENSAPVESEPSQWACKVCSATFLELQLLNEHLLGHLEQAKSLPPGSQSEAAAPEKEQDTPRGEPPAVPESENVATKEQKKKPRRGRKPKVSKAEQPLVIVEDKEPTEQVAEIITEVPPDEPVSATPDERIMELVLGKLATTTTDTSSVPKFTHHQNNTITLKRSLILSSRHGIRRKLIKQLGEHKRVYQCNICSKIFQNSSNLSRHVRSHGDKLFKCEECAKLFSRKESLKQHVSYKHSRNEVDGEYRYRCGTCEKTFRIESALEFHNCRTDDKTFQCEMCFRFFSTNSNLSKHKKKHGDKKFACEVCSKMFYRKDVMLDHQRRHLEGVRRVKREDLEAGGENLVRYKKEPSGCPVCGKVFSCRSNMNKHLLTHGDKKYTCEICGRKFFRVDVLRDHIHVHFKDIALMDDHQREEFIGKIGISSEENDDNSDESADSEPHKYSCKRCQLTFGRGKEYLKHIMEVHKEKGYGCSICNRRFALKATYHAHMVIHRENLPDPNVQKYIHPCEICGRIFNSIGNLERHKLIHTGVKSHACEQCGKSFARKDMLKEHMRVHDNVREYLCAECGKGMKTKHALRHHMKLHKGIKEYECKECHRRFAQKVNMLKHCKRHTGIKDFMCELCGKTFSERNTMETHKLIHTVGKQWTCSVCDKKYVTEYMLQKHVQLTHDKVEAQSCQLCGTKVSTRASMSRHMRRKHPEVLAVRIDDLDHLPETTTIDASSIGIVQPELTLEQEDLAEGKHGKAAKRSHKRKQKPEEEAGAPVPEDATFSEYSEKETEFTGSVGDETNSAVQSIQQVVVTLGDPNVTTPSSSVGLTNITVTPITTAAATQFTNLQPVAVGHLTTPERQLQLDNSILTVTFDTVSGSAMLHNRQNDVQIHPQPEASNPQSVAHFINLTTLVNSITPLGSQLSDQHPLTWRAVPQTDVLPPSQPQAPPQQAAQPQVQAEQQQQQMYSY

SEQ ID NO: 2311 - protein, 669 aa, Homo sapiens
MDLRTAVYNAARDGKLQLLQKLLSGRSREELDELTGEVAGGGTPLLIAARYGHLDVVEYLVDRCGASVEAGGSVHFDGETIEGAPPLWAASAAGHLDVVRSLLRRGASVNRTTRTNSTPLRAACFDGHLEVVRYLVGEHQADLEVANRHGHTCLMISCYKGHREIARYLLEQGAQVNRRSAKGNTALHDCAESGSLEILQLLLGCKARMERDGYGMTPLLAASVTGHTNIVEYLIQEQPGQEQVAGGEAQPGLPQEDPSTSQGCAQPQGAPCCSSSPEEPLNGESYESCCPTSREAAVEALELLGATYVDKKRDLLGALKHWRRAMELRHQGGEYLPKPEPPQLVLAYDYSREVNTTEELEALITDPDEMRMQALLIRERILGPSHPDTSYYIRYRGAVYADSGNFERCIRLWKYALDMQQSNLEPLSPMTASSFLSFAELFSYVLQDRAAKGSLGTQIGFADLMGVLTKGVREVERALQLPREPGDSAQFTKALAIILHLLYLLEKVECTPSQEHLKHQTVYRLLKCAPRGKNGFTPLHMAVDKDTTNVGRYPVGRFPSLHVVKVLLDCGADPDSRDFDNNTPLHIAAQNNCPAIMNALIEAGAHMDATNAFKKTAYELLDEKLLARGTMQPFNYVTLQCLAARALDKNKIPYKGFIPEDLEAFIELH

SEQ ID NO: 2312 - protein, 368 aa, Homo sapiens
MSVAGLKKQFYKASQLVSEKVGGAEGTKLDDDFKEMEKKVDVTSKAVTEVLARTIEYLQPNPASRAKLTMLNTVSKIRGQVKNPGYPQSEGLLGECMIRHGKELGGESNFGDALLDAGESMKRLAEVKDSLDIEVKQNFIDPLQNLCEKDLKEIQHHLKKLEGRRLDFDYKKKRQGKIPDEELRQALEKFEESKEVAETSMHNLLETDIEQVSQLSALVDAQLDYHRQAVQILDELAEKLKRRMREASSRPKREYKPKPREPFDLGEPEQSNGGFPCTTAPKIAASSSFRSSDKPIRTPSRSMPPLDQPSCKALYDFEPENDGELGFHEGDVITLTNQIDENWYEGMLDGQSGFFPLSYVEVLVPLPQ

SEQ ID NO: 2313 - protein, 445 aa, Homo sapiens
MAVAIAAARVWRLNRGLSQAALLLLRQPGARGLARSHPPRQQQQFSSLDDKPQFPGASAEFIDKLEFIQPNVISGIPIYRVMDRQGQIINPSEDPHLPKEKVLKLYKSMTLLNTMDRILYESQRQGRISFYMTNYGEEGTHVGSAAALDNTDLVFGQYREAGVLMYRDYPLELFMAQCYGNISDLGKGRQMPVHYGCKERHFVTISSPLATQIPQAVGAAYAAKRANANRVVICYFGEGAASEGDAHAGFNFAATLECPIIFFCRNNGYAISTPTSEQYRGDGIAARGPGYGIMSIRVDGNDVFAVYNATKEARRRAVAENQPFLIEAMTYRIGHHSTSDDSSAYRSVDEVNYWDKQDHPISRLRHYLLSQGWWDEEQEKAWRKQSRRKVMEAFEQAERKPKPNPNLLFSDVYQEMPAQLRKQQESLARHLQTYGEHYPLDHFDK

SEQ ID NO: 2314 - protein, 538 aa, Homo sapiens
MTTFKEAVTFKDVAVVFTEEELGLLDPAQRKLYRDVMLENFRNLLSVGHQPFHQDTCHFLREEKFWMMGTATQREGNSGGKIQTELESVPEAGAHEEWSCQQIWEQIAKDLTRSQDSIINNSQFFENGDVPSQVEAGLPTIHTGQKPSQGGKCKQSISDVPIFDLPQQLYSEEKSYTCDECGKSICYISALHVHQRVHVGEKLFMCDVCGKEFSQSSHLQTHQRVHTGEKPFKCEQCGKGFSRRSALNVHRKLHTGEKPYICEACGKAFIHDSQLKEHKRIHTGEKPFKCDICGKTFYFRSRLKSHSMVHTGEKPFRCDTCDKSFHQRSALNRHCMVHTGEKPYRCEQCGKGFIGRLDFYKHQVVHTGEKPYNCKECGKSFRWSSCLLNHQRVHSGEKSFKCEECGKGFYTNSQLSSHQRSHSGEKPYKCEECGKGYVTKFNLDLHQRVHTGERPYNCKECGKNFSRASSILNHKRLHCQKKPFKCEDCGKRLVHRTYRKDQPRDYSGENPSKCEDCGRRYKRRLNLDILLSLFLNDT

SEQ ID NO: 2315 - protein, 385 aa, Homo sapiens
MYAKGGKGSAVPSDSQAREKLALYVYEYLLHIGAQKSAQTFLSEIRWEKNITLGEPPGFLHSWWCVFWDLYCAAPDRREACEHSGEAKAFQDYSAAAAPSPVMGSMAPGDTMAAGSMAAGFFQGPPGSQPSPHNPNAPMMGPHGQPFMSPRFPGGPRPTLRMPSQPPAGLPGSQPLLPGAMEPSPRAQGHPSMGGPMQRVTPPRGMASVGPQSYGGGMRPPPNSLAGPGLPAMNMGPGVRGPWASPSGNSIPYSSSSPGSYTGPPGGGGPPGTPIMPSPGDSTNSSENMYTIMNPIGQGAGRANFPLGPGPEGPMAAMSAMEPHHVNGSLGSGDMDGLPKSSPGAVAGLSNAPGTPRDDGEMAAAGTFLHPFPSESYSPGMTMSV

SEQ ID NO: 2316 - protein, 426 aa, Homo sapiens
MGPLPAPSCTQRITWKGLLLTASLLNFWNPPTTAEVTIEAQPPKVSEGKDVLLLVHNLPQNLPGYFWYKGEMTDLYHYIISYIVDGKIIIYGPAYSGRETVYSNASLLIQNVTRKDAGTYTLHIIKRGDETREEIRHFTFTLYLETPKPYISSSNLNPREAMEAVRLICDPETLDASYLWWMNGQSLPVTHRLQLSKTNRTLYLFGVTKYIAGPYECEIRNPVSASRSDPVTLNLLPKLPIPYITINNLNPRENKDVLAFTCEPKSENYTYIWWLNGQSLPVSPGVKRPIENRILILPSVTRNETGPYQCEIRDRYGGLRSNPVILNVLYGPDLPRIYPSFTYYRSGENLDLSCFTESNPPAEYFWTINGKFQQSGQKLFIPQITRNHSGLYACSVHNSATGKEISKSMTVKVSGPCHGDLTESQS

SEQ ID NO: 2317 - protein, 783 aa, Homo sapiens
MVIMSEFSADPAGQGQGQQKPLRVGFYDIERTLGKGNFAVVKLARHRVTKTQVAIKIIDKTRLDSSNLEKIYREVQLMKLLNHPHIIKLYQVMETKDMLYIVTEFAKNGEMFDYLTSNGHLSENEARKKFWQILSAVEYCHDHHIVHRDLKTENLLLDGNMDIKLADFGFGNFYKSGEPLSTWCGSPPYAAPEVFEGKEYEGPQLDIWSLGVVLYVLVCGSLPFDGPNLPTLRQRVLEGRFRIPFFMSQDCESLIRRMLVVDPARRITIAQIRQHRWMRAEPCLPGPACPAFSAHSYTSNLGDYDEQALGIMQTLGVDRQRTVESLQNSSYNHFAAIYYLLLERLKEYRNAQCARPGPARQPRPRSSDLSGLEVPQEGLSTDPFRPALLCPQPQTLVQSVLQAEMDCELQSSLQWPLFFPVDASCSGVFRPRPVSPSSLLDTAISEEARQGPGLEEEQDTQESLPSSTGRRHTLAEVSTRLSPLTAPCIVVSPSTTASPAEGTSSDSCLTFSASKSPAGLSGTPATQGLLGACSPVRLASPFLGSQSATPVLQAQGGLGGAVLLPVSFQEGRRASDTSLTQGLKAFRQQLRKTTRTKGFLGLNKIKGLARQVCQAPASRASRGGLSPFHAPAQSPGLHGGAAGSREGWSLLEEVLEQQRLLQLQHHPAAAPGCSQAPQPAPAPFVIAPCDGPGAAPLPSTLLTSGLPLLPPPLLQTGASPVASAAQLLDTHLHIGTGPTALPAVPPPRLARLAPGCEPLGLLQGDCEMEDLMPCSLGTFVLVQ

SEQ ID NO: 2318 - protein, 387 aa, Homo sapiens
MAAIPALDPEAEPSMDVILVGSSELSSSVSPGTGRDLIAYEVKANQRNIEDICICCGSLQVHTQHPLFEGGICAPCKDKFLDALFLYDDDGYQSYCSICCSGETLLICGNPDCTRCYCFECVDSLVGPGTSGKVHAMSNWVCYLCLPSSRSGLLQRRRKWRSQLKAFYDRESENPLEMFETVPVWRRQPVRVLSLFEDIKKELTSLGFLESGSDPGQLKHVVDVTDTVRKDVEEWGPFDLVYGATPPLGHTCDRPPSWYLFQFHRLLQYARPKPGSPRPFFWMFVDNLVLNKEDLDVASRFLEMEPVTIPDVHGGSLQNAVRVWSNIPAIRSSRHWALVSEEELSLLAQNKQSSKLAAKWPTKLVKNCFLPLREYFKYFSTELTSSL

SEQ ID NO: 2319 - protein, 516 aa, Homo sapiens
MDAMKRGLCCVLLLCGAVFVSPSQEIHARFRRGARSYQGCSEPRCFNGGTCQQALYFSDFVCQCPEGFAGKCCEIDTRATCYEDQGISYRGTWSTAESGAECTNWNSSALAQKPYSGRRPDAIRLGLGNHNYCRNPDRDSKPWCYVFKAGKYSSEFCSTPACSEGNSDCYFGNGSAYRGTHSLTESGASCLPWNSMILIGKVYTAQNPSAQALGLGKHNYCRNPDGDAKPWCHVLKNRRLTWEYCDVPSCSTCGLRQYSQPQFRIKGGLFADIASHPWQAAIFAKHRRSPGERFLCGGILISSCWILSAAHCFQERFPPHHLTVILGRTYRVVPGEEEQKFEVEKYIVHKEFDDDTYDNDIALLQLKSDSSRCAQESSVVRTVCLPPADLQLPDWTECELSGYGKHEALSPFYSERLKEAHVRLYPSSRCTSQHLLNRTVTDNMLCAGDTRSGGPQANLHDACQGDSGGPLVCLNDGRMTLVGIISWGLGCGQKDVPGVYTKVTNYLDWIRDNMRP

SEQ ID NO: 2320 - protein, 674 aa, Homo sapiens
MAAGGAEGGSGPGAAMGDCAEIKSQFRTREGFYKLLPGDGAARRSGPASAQTPVPPQPPQPPPGPASASGPGAAGPASSPPPAGPGPGPALPAVRLSLVRLGEPDSAGAGEPPATPAGLGSGGDRVCFNLGRELYFYPGCCRRGSQRSIDLNKPIDKRIYKGTQPTCHDFNQFTAATETISLLVGFSAGQVQYLDLIKKDTSKLFNEERLIDKTKVTYLKWLPESESLFLASHASGHLYLYNVSHPCASAPPQYSLLKQGEGFSVYAAKSKAPRNPLAKWAVGEGPLNEFAFSPDGRHLACVSQDGCLRVFHFDSMLLRGLMKSYFGGLLCVCWSPDGRYVVTGGEDDLVTVWSFTEGRVVARGHGHKSWVNAVAFDPYTTRAEEAATAAGADGERSGEEEEEEPEAAGTGSAGGAPLSPLPKAGSITYRFGSAGQDTQFCLWDLTEDVLYPHPPLARTRTLPGTPGTTPPAASSSRGGEPGPGPLPRSLSRSNSLPHPAGGGKAGGPGVAAEPGTPFSIGRFATLTLQERRDRGAEKEHKRYHSLGNISRGGSGGSGSGGEKPSGPVPRSRLDPAKVLGTALCPRIHEVPLLEPLVCKKIAQERLTVLLFLEDCIITACQEGLICTWARPGKAFTDEETEAQTGEGSWPRSPSKSVVEGISSQPGNSPSGTVV

SEQ ID NO: 2321 - protein, 346 aa, Homo sapiens
MVEKEEAGGGISEEEAAQYDRQIRLWGLEAQKRLRASRVLLVGLKGLGAEIAKNLILAGVKGLTMLDHEQVTPEDPGAQFLIRTGSVGRNRAEASLERAQNLNPMVDVKVDTEDIEKKPESFFTQFDAVCLTCCSRDVIVKVDQICHKNSIKFFTGDVFGYHGYTFANLGEHEFVEEKTKVAKVSQGVEDGPDTKRAKLDSSETTMVKKKVVFCPVKEALEVDWSSEKAKAALKRTTSDYFLLQVLLKFRTDKGRDPSSDTYEEDSELLLQIRNDVLDSLGISPDLLPEDFVRYCFSEMAPVCAVVGGILAQEIVKALSQRDPPHNNFFFFDGMKGNGIVECLGPK

SEQ ID NO: 2322 - protein, 628 aa, Homo sapiens
MEPPDAPAQARGAPRLLLLAVLLAAHPDAQAEVRLSVPPLVEVMRGKSVILDCTPTGTHDHYMLEWFLTDRSGARPRLASAEMQGSELQVTMHDTRGRSPPYQLDSQGRLVLAEAQVGDERDYVCVVRAGAAGTAEATARLNVFAKPEATEVSPNKGTLSVMEDSAQEIATCNSRNGNPAPKITWYRNGQRLEVPVEMNPEGYMTSRTVREASGLLSLTSTLYLRLRKDDRDASFHCAAHYSLPEGRHGRLDSPTFHLTLHYPTEHVQFWVGSPSTPAGWVREGDTVQLLCRGDGSPSPEYTLFRLQDEQEEVLNVNLEGNLTLEGVTRGQSGTYGCRVEDYDAADDVQLSKTLELRVAYLDPLELSEGKVLSLPLNSSAVVNCSVHGLPTPALRWTKDSTPLGDGPMLSLSSITFDSNGTYVCEASLPTVPVLSRTQNFTLLVQGSPELKTAEIEPKADGSWREGDEVTLICSARGHPDPKLSWSQLGGSPAEPIPGRQGWVSSSLTLKVTSALSRDGISCEASNPHGNKRHVFHFGTVSPQTSQAGVAVMAVAVSVGLLLLVVAVFYCVRRKGGPCCRQRREKGAPPPGEPGLSHSGSEQPEQTGLLMGGASGGARGGSGGFGDEC

SEQ ID NO: 2323 - protein, 1489 aa, Homo sapiens
MRQVLWLCNVCVTARETRHHLHLPAILDKMPAPGALILLAAVSASGCLASPAHPDGFALGRAPLAPPYAVVLISCSGLLAFIFLLLTCLCCKRGDVGFKEFENPEGEDCSGEYTPPAEETSSSQSLPDVYILPLAEVSLPMPAPQPSHSDMTTPLGLSRQHLSYLQEIGSGWFGKVILGEIFSDYTPAQVVVKELRASAGPLEQRKFISEAQPYRSLQHPNVLQCLGLCVETLPFLLIMEFCQLGDLKRYLRAQRPPEGLSPELPPRDLRTLQRMGLEIARGLAHLHSHNYVHSDLALRNCLLTSDLTVRIGDYGLAHSNYKEDYYLTPERLWIPLRWAAPELLGELHGTFMVVDQSRESNIWSLGVTLWELFEFGAQPYRHLSDEEVLAFVVRQQHVKLARPRLKLPYADYWYDILQSCWRPPAQRPSASDLQLQLTYLLSERPPRPPPPPPPPRDGPFPWPWPPAHSAPRPGTLSSPFPLLDGFPGADPDDVLTVTESSRGLNLECLWEKARRGAGRGGGAPAWQPASAPPAPHANPSNPFYEALSTPSVLPVISARSPSVSSEYYIRLEEHGSPPEPLFPNDWDPLDPGVPAPQAPQAPSEVPQLVSETWASPLFPAPRPFPAQSSASGSFLLSGWDPEGRGAGETLAGDPAEVLGERGTAPWVEEEEEEEEGSSPGEDSSSLGGGPSRRGPLPCPLCSREGACSCLPLERGDAVAGWGGHPALGCPHPPEDDSSLRAERGSLADLPMAPPASAPPEFLDPLMGAAAPQYPGRGPPPAPPPPPPPPRAPADPAASPDPPSAVASPGSGLSSPGPKPGDSGYETETPFSPEGAFPGGGAAEEEGVPRPRAPPEPPDPGAPRPPPDPGPLPLPGPREKPTFVVQVSTEQLLMSLREDVTRNLLGEKGATARETGPRKAGRGPGNREKVPGLNRDPTVLGNGKQAPSLSLPVNGVTVLENGDQRAPGIEEKAAENGALGSPEREEKVLENGELTPPRREEKALENGELRSPEAGEKVLVNGGLTPPKSEDKVSENGGLRFPRNTERPPETGPWRAPGPWEKTPESWGPAPTIGEPAPETSLERAPAPSAVVSSRNGGETAPGPLGPAPKNGTLEPGTERRAPETGGAPRAPGAGRLDLGSGGRAPVGTGTAPGGGPGSGVDAKAGWVDNTRPQPPPPPLPPPPEAQPRRLEPAPPRARPEVAPEGEPGAPDSRAGGDTALSGDGDPPKPERKGPEMPRLFLDLGPPQGNSEQIKARLSRLSLALPPLTLTPFPGPGPRRPPWEGADAGAAGGEAGGAGAPGPAEEDGEDEDEDEEEDEEAAAPGAAAGPRGPGRARAAPVPVVVSSADADAARPLRGLLKSPRGADEPEDSELERKRKMVSFHGDVTVYLFDQETPTNELSVQAPPEGDTDPSTPPAPPTPPHPATPGDGFPSNDSGFGGSFEWAEDFPLLPPPGPPLCFSRFSVSPALETPGPPARAPDARPAGPVEN

SEQ ID NO: 2324 - protein, 1518 aa, Homo sapiens
MAAVGSGGYARNDAGEKLPSVMAGVPARRGQSSPPPAPPICLRRRTRLSTASEETVQNRVSLEKVLGITAQNSSGLTCDPGTGHVAYLAGCVVVILDPKENKQQHIFNTARKSLSALAFSPDGKYIVTGENGHRPAVRIWDVEEKNQVAEMLGHKYGVACVAFSPNMKHIVSMGYQHDMVLNVWDWKKDIVVASNKVSCRVIALSFSEDSSYFVTVGNRHVRFWFLEVSTETKVTSTVPLVGRSGILGELHNNIFCGVACGRGRMAGSTFCVSYSGLLCQFNEKRVLEKWINLKVSLSSCLCVSQELIFCGCTDGIVRIFQAHSLHYLANLPKPHYLGVDVAQGLEPSFLFHRKAEAVYPDTVALTFDPIHQWLSCVYKDHSIYIWDVKDINRVGKVWSELFHSSYVWNVEVYPEFEDQRACLPSGSFLTCSSDNTIRFWNLDSSPDSHWQKNIFSNTLLKVVYVENDIQHLQDMSHFPDRGSENGTPMDVKAGVRVMQVSPDGQHLASGDRSGNLRIHELHFMDELVKVEAHDAEVLCLEYSKPETGLTLLASASRDRLIHVLNVEKNYNLEQTLDDHSSSITAIKFAGNRDIQMISCGADKSIYFRSAQQGSDGLHFVRTHHVAEKTTLYDMDIDITQKYVAVACQDRNVRVYNTVNGKQKKCYKGSQGDEGSLLKVHVDPSGTFLATSCSDKSISVIDFYSGECIAKMFGHSEIITSMKFTYDCHHLITVSGDSCVFIWHLGPEITNCMKQHLLEIDHRQQQQHTNDKKRSGHPRQDTYVSTPSEIHSLSPGEQTEDDLEEECEPEEMLKTPSKDSLDPDPRCLLTNGKLPLWAKRLLGDDDVADGLAFHAKRSYQPHGRWAERAGQEPLKTILDAQDLDCYFTPMKPESLENSILDSLEPQSLASLLSESESPQEAGRGHPSFLPQQKESSEASELILYSLEAEVTVTGTDSQYCRKEVEAGPGDQQGDSYLRVSSDSPKDQSPPEDSGESEADLECSFAAIHSPAPPPDPAPRFATSLPHFPGCAGPTEDELSLPEGPSVPSSSLPQTPEQEKFLRHHFETLTESPCRALGDVEASEAEDHFFNPRLSISTQFLSSLQKASRFTHTFPPRATQCLVKSPEVKLMDRGGSQPRAGTGYASPDRTHVLAAGKAEETLEAWRPPPPCLTSLASCVPASSVLPTDRNLPTPTSAPTPGLAQGVHAPSTCSYMEATASSRARISRSISLGDSEGPIVATLAQPLRRPSSVGELASLGQELQAITTATTPSLDSEGQEPALRSWGNHEARANLRLTLSSACDGLLQPPVDTQPGVTVPAVSFPAPSPVEESALRLHGSAFRPSLPAPESPGLPAHPSNPQLPEARPGIPGGTASLLEPTSGALGLLQGSPARWSEPWVPVEALPPSPLELSRVGNILHRLQTTFQEALDLYRVLVSSGQVDTGQQQARTELVSTFLWIHSQLEAECLVGTSVAPAQALPSPGPPSPPTLYPLASPDLQALLEHYSELLVQAVRRKARGH

SEQ ID NO: 2325 - protein, 1103 aa, Homo sapiens
MAPACQILRWALALGLGLMFEVTHAFRSQDEFLSSLESYEIAFPTRVDHNGALLAFSPPPPRRQRRGTGATAESRLFYKVASPSTHFLLNLTRSSRLLAGHVSVEYWTREGLAWQRAARPHCLYAGHLQGQASSSHVAISTCGGLHGLIVADEEEYLIEPLHGGPKGSRSPEESGPHVVYKRSSLRHPHLDTACGVRDEKPWKGRPWWLRTLKPPPARPLGNETERGQPGLKRSVSRERYVETLVVADKMMVAYHGRRDVEQYVLAIMNIVAKLFQDSSLGSTVNILVTRLILLTEDQPTLEITHHAGKSLDSFCKWQKSIVNHSGHGNAIPENGVANHDTAVLITRYDICIYKNKPCGTLGLAPVGGMCERERSCSVNEDIGLATAFTIAHEIGHTFGMNHDGVGNSCGARGQDPAKLMAAHITMKTNPFVWSSCSRDYITSFLDSGLGLCLNNRPPRQDFVYPTVAPGQAYDADEQCRFQHGVKSRQCKYGEVCSELWCLSKSNRCITNSIPAAEGTLCQTHTIDKGWCYKRVCVPFGSRPEGVDGAWGPWTPWGDCSRTCGGGVSSSSRHCDSPRPTIGGKYCLGERRRHRSCNTDDCPPGSQDFREVQCSEFDSIPFRGKFYKWKTYRGGGVKACSLTCLAEGFNFYTERAAAVVDGTPCRPDTVDICVSGECKHVGCDRVLGSDLREDKCRVCGGDGSACETIEGVFSPASPGAGYEDVVWIPKGSVHIFIQDLNLSLSHLALKGDQESLLLEGLPGTPQPHRLPLAGTTFQLRQGPDQVQSLEALGPINASLIVMVLARTELPALRYRFNAPIARDSLPPYSWHYAPWTKCSAQCAGGSQVQAVECRNQLDSSAVAPHYCSAHSKLPKRQRACNTEPCPPDWVVGNWSLCSRSCDAGVRSRSVVCQRRVSAAEEKALDDSACPQPRPPVLEACHGPTCPPEWAALDWSECTPSCGPGLRHRVVLCKSADHRATLPPAHCSPAAKPPATMRCNLRRCPPARWVAGEWGECSAQCGVGQRQRSVRCTSHTGQASHECTEALRPPTTQQCEAKCDSPTPGDGPEECKDVNKVAYCPLVLKFQFCSRAYFRQMCCKTCHGH

SEQ ID NO: 2326 - protein, 620 aa, Homo sapiens
MSKSKCSVGLMSSVVAPAKEPNAVGPKEVELILVKEQNGVQLTSSTLTNPRQSPVEAQDRETWGKKIDFLLSVIGFAVDLANVWRFPYLCYKNGGGAFLVPYLLFMVIAGMPLFYMELALGQFNREGAAGVWKICPILKGVGFTVILISLYVGFFYNVIIAWALHYLFSSFTTELPWIHCNNSWNSPNCSDAHPGDSSGDSSGLNDTFGTTPAAEYFERGVLHLHQSHGIDDLGPPRWQLTACLVLVIVLLYFSLWKGVKTSGKVVWITATMPYVVLTALLLRGVTLPGAIDGIRAYLSVDFYRLCEASVWIDAATQVCFSLGVGFGVLIAFSSYNKFTNNCYRDAIVTTSINSLTSFSSGFVVFSFLGYMAQKHSVPIGDVAKDGPGLIFIIYPEAIATLPLSSAWAVVFFIMLLTLGIDSAMGGMESVITGLIDEFQLLHRHRELFTLFIVLATFLLSLFCVTNGGIYVFTLLDHFAAGTSILFGVLIEAIGVAWFYGVGQFSDDIQQMTGQRPSLYWRLCWKLVSPCFLLFVVVVSIVTFRPPHYGAYIFPDWANALGWVIATSSMAMVPIYAAYKFCSLPGSFREKLAYAIAPEKDRELVDRGEVRQFTLRHWLKV

SEQ ID NO: 2327 - protein, 517 aa, Homo sapiens
MRAGRGATPARELFRDAAFPAADSSLFCDLSTPLAQFREDITWRRPQEICATPRLFPDDPREGQVKQGLLGDCWFLCACAALQKSRHLLDQVIPPGQPSWADQEYRGSFTCRIWQFGRWVEVTTDDRLPCLAGRLCFSRCQREDVFWLPLLEKVYAKVHGSYEHLWAGQVADALVDLTGGLAERWNLKGVAGSGGQQDRPGRWEHRTCRQLLHLKDQCLISCCVLSPRAGARELGEFHAFIVSDLRELQGQAGQCILLLRIQNPWGRRCWQGLWREGGEGWSQVDAAVASELLSQLQEGEFWVEEEEFLREFDELTVGYPVTEAGHLQSLYTERLLCHTRALPGAWVKGQSAGGCRNNSGFPSNPKFWLRVSEPSEVYIAVLQRSRLHAADWAGRARALVGDSHTSWSPASIPGKHYQAVGLHLWKVPEGGRSQDAPPLLLQEPLLSCVPHRYAQEVSRLCLLPAGTYKVVPSTYLPDTEGAFTVTIATRIDRPSIHSQEMLGQFLQEVSIMAVMKT

SEQ ID NO: 2328 - protein, 2809 aa, Homo sapiens
MTLEGLYLARGPLARLLLAWSALLCMAGGQGRWDGALEAAGPGRVRRRGSPGILQGPNVCGSRFHAYCCPGWRTFPGRSQCVVPICRRACGEGFCSQPNLCTCADGTLAPSCGVSRGSGCSVSCMNGGTCRGASCLCQKGYTGTVCGQPICDRGCHNGGRCIGPNRCACVYGFMGPQCERDYRTGPCFGQVGPEGCQHQLTGLVCTKALCCATVGRAWGLPCELCPAQPHPCRRGFIPNIHTGACQDVDECQAVPGLCQGGSCVNMVGSFHCRCPVGHRLSDSSAACEDYRAGACFSVLFGGRCAGDLAGHYTRRQCCCDRGRCWAAGPVPELCPPRGSNEFQQLCAQRLPLLPGHPGLFPGLLGFGSNGMGPPLGPARLNPHGSDARGIPSLGPGNSNIGTATLNQTIDICRHFTNLCLNGRCLPTPSSYRCECNVGYTQDVRGECIDVDECTSSPCHHGDCVNIPGTYHCRCYPGFQATPTRQACVDVDECIVSGGLCHLGRCVNTEGSFQCVCNAGFELSPDGKNCVDHNECATSTMCVNGVCLNEDGSFSCLCKPGFLLAPGGHYCMDIDECQTPGICVNGHCTNTEGSFRCQCLGGLAVGTDGRVCVDTHVRSTCYGAIEKGSCARPFPGTVTKSECCCANPDHGFGEPCQLCPAKDSAEFQALCSSGLGITTDGRDINECALDPEVCANGVCENLRGSYRCVCNLGYEAGASGKDCTDVDECALNSLLCDNGWCQNSPGSYSCSCPPGFHFWQDTEICKDVDECLSSPCVSGVCRNLAGSYTCKCGPGSRLDPSGTFCLDSTKGTCWLKIQESRCEVNLQGASLRSECCATLGAAWGSPCERCEIDPACARGFARMTGVTCDDVNECESFPGVCPNGRCVNTAGSFRCECPEGLMLDASGRLCVDVRLEPCFLRWDEDECGVTLPGKYRMDVCCCSIGAVWGVECEACPDPESLEFASLCPRGLGFASRDFLSGRPFYKDVNECKVFPGLCTHGTCRNTVGSFHCACAGGFALDAQERNCTDIDECRISPDLCGQGTCVNTPGSFECECFPGYESGFMLMKNCMDVDECARDPLLCRGGTCTNTDGSYKCQCPPGHELTAKGTACEDIDECSLSDGLCPHGQCVNVIGAFQCSCHAGFQSTPDRQGCVDINECRVQNGGCDVHCINTEGSYRCSCGQGYSLMPDGRACADVDECEENPRVCDQGHCTNMPGGHRCLCYDGFMATPDMRTCVDVDECDLNPHICLHGDCENTKGSFVCHCQLGYMVRKGATGCSDVDECEVGGHNCDSHASCLNIPGSFSCRCLPGWVGDGFECHDLDECVSQEHRCSPRGDCLNVPGSYRCTCRQGFAGDGFFCEDRDECAENVDLCDNGQCLNAPGGYRCECEMGFDPTEDHRACQDVDECAQGNLCAFGSCENLPGMFRCICNGGYELDRGGGNCTDINECADPVNCINGVCINTPGSYLCSCPQDFELNPSGVGCVDTRAGNCFLETHDRGDSGISCSAEIGVGVTRASCCCSLGRAWGNPCELCPMANTTEYRTLCPGGEGFQPNRITVILEDIDECQELPGLCQGGDCVNTFGSFQCECPPGYHLSEHTRICEDIDECSTHSGICGPGTCYNTLGNYTCVCPAEYLQVNGGNNCMDMRKSVCFRHYNGTCQNELAFNVTRKMCCCSYNIGQAWNRPCEACPTPISPDYQILCGNQAPGFLTDIHTGKPLDIDECGEIPAICANGICINQIGSFRCECPAGFNYNSILLACEDVDECGSRESPCQQNADCINIPGSYRCKCTRGYKLSPGGACVGRNECREIPNVCSHGDCMDTEGSYMCLCHRGFQASADQTLCMDIDECDRQPCGNGTCKNIIGSYNCLCFPGFVVTHNGDCVDFDECTTLVGQVCRFGHCLNTAGSFHCLCQDGFELTADGKNCVDTNECLSLAGTCLPGTCQNLEGSFRCICPPGFQVQSDHCIDIDECSEEPNLCLFGTCTNSPGSFQCLCPPGFVLSDNGHRCFDTRQSFCFTRFEAGKCSVPKAFNTTKTRCCCSKRPGEGWGDPCELCPQEGSAAFQELCPFGHGAVPGPDDSREDVNECAENPGVCTNGVCVNTDGSFRCECPFGYSLDFTGINCVDTDECSVGHPCGQGTCTNVIGGFECACADGFEPGLMMTCEDIDECSLNPLLCAFRCHNTEGSYLCTCPAGYTLREDGAMCRDVDECADGQQDCHARGMECKNLIGTFACVCPPGMRPLPGSGEGCTDDNECHAQPDLCVNGRCVNTAGSFRCDCDEGFQPSPTLTECHDIRQGPCFAEVLQTMCRSLSSSSEAVTRAECCCGGGRGWGPRCELCPLPGTSAYRKLCPHGSGYTAEGRDVDECRMLAHLCAHGECINSLGSFRCHCQAGYTPDATATTCLDMDECSQVPKPCTFLCKNTKGSFLCSCPRGYLLEEDGRTCKDLDECTSRQHNCQFLCVNTVGAFTCRCPPGFTQHHQACFDNDECSAQPGPCGAHGHCHNTPGSFRCECHQGFTLVSSGHGCEDVNECDGPHRCQHGCQNQLGGYRCSCPQGFTQHSQWAQCVDENECALSPPTCGSASCRNTLGGFRCVCPSGFDFDQALGGCQEVDECAGRRGPCSYSCANTPGGFLCGCPQGYFRAGQGHCVSGLGFSPGPQDTPDKEELLSSEACYECKINGLSPRDRPRRSAHRDHQVNLATLDSEALLTLGLNLSHLGRAERILELRPALEGLEGRIRYVIVRGNEQGFFRMHHLRGVSSLQLGRRRPGPGTYRLEVVSHMAGPWGVQPEGQPGPWGQALRLKVQLQLL

SEQ ID NO: 2329 - protein, 520 aa, Homo sapiens
MGKKGKKEKKGRGAEKTAAKMEKKVSKRSRKEEEDLEALIAHFQTLDAKRTQTVELPCPPPSPRLNASLSVHPEKDELILFGGEYFNGQKTFLYNELYVYNTRKDTWTKVDIPSPPPRRCAHQAVVVPQGGGQLWVFGGEFASPNGEQFYHYKDLWVLHLATKTWEQVKSTGGPSGRSGHRMVAWKRQLILFGGFHESTRDYIYYNDVYAFNLDTFTWSKLSPSGTGPTPRSGCQMSVTPQGGIVVYGGYSKQRVKKDVDKGTRHSDMFLLKPEDGREDKWVWTRMNPSGVKPTPRSGFSVAMAPNHQTLFFGGVCDEEEEESLSGEFFNDLYFYDATRNRWFEGQLKGPKSEKKKRRRGRKEEPEGGSRPACGGAGTQGPVQLVKEVVAEDGTVVTIKQVLTAPGSAGQPRSEDEDSLEEAGSPAPGPCPRSNAMLAVKHGVLYVYGGMFEAGDRQVTLSDLHCLDLHRMEAWKALVEMDPETQEWLEETDSEEDSEEVEGAEGGVDDEDSGEESGAED

SEQ ID NO: 2330 - protein, 871 aa, Homo sapiens
MAEEFVTLKDVGMDFTLGDWEQLGLEQGDTFWDTALDNCQDLFLLDPPRPNLTSHPDGSEDLEPLAGGSPEATSPDVTETKNSPLMEDFFEEGFSQEIIEMLSKDGFWNSNFGEACIEDTWLDSLLGDPESLLRSDIATNGESPTECKSHELKRGLSPVSTVSTGEDSMVHNVSEKTLTPAKSKEYRGEFFSYSDHSQQDSVQEGEKPYQCSECGKSFSGSYRLTQHWITHTREKPTVHQECEQGFDRNASLSVYPKTHTGYKFYVCNEYGTTFSQSTYLWHQKTHTGEKPCKSQDSDHPPSHDTQPGEHQKTHTDSKSYNCNECGKAFTRIFHLTRHQKIHTRKRYECSKCQATFNLRKHLIQHQKTHAAKTTSECQECGKIFRHSSLLIEHQALHAGEEPYKCNERGKSFRHNSTLKIHQRVHSGEKPYKCSECGKAFHRHTHLNEHRRIHTGYRPHKCQECVRSFSRPSHLMRHQAIHTAEKPYSCAECKETFSDNNRLVQHQKMHTVKTPYECQECGERFICGSTLKCHESVHAREKQGFFVSGKILDQNPEQKEKCFKCNKCEKTFSCSKYLTQHERIHTRGVKPFECDQCGKAFGQSTRLIHHQRIHSRVRLYKWGEQGKAISSASLIKLQSFHTKEHPFKCNECGKTFSHSAHLSKHQLIHAGENPFKCSKCDRVFTQRNYLVQHERTHARKKPLVCNECGKTFRQSSCLSKHQRIHSGEKPYVCDYCGKAFGLSAELVRHQRIHTGEKPYVCQECGKAFTQSSCLSIHRRVHTGEKPYRCGECGKAFAQKANLTQHQRIHTGEKPYSCNVCGKAFVLSAHLNQHLRVHTQETLYQCQRCQKAFRCHSSLSRHQRVHNKQQYCL

SEQ ID NO: 2331 - protein, 585 aa, Homo sapiens
MIKTQESLTLEDVAVEFSWEEWQLLDTAQKNLYRDVMVENYNHLVSLGYQTSKPDVLSKLAHGQEPWTTDAKIQNKNCPGIGKVDSHLQEHSPNQRLLKSVQQCNGQNTLRNIVHLSKTHFPIVQNHDTFDLYRKNLKSSLSLINQKRRHGINNPVEFIGGEKTLLHGKHERTHTKTRFSENAKCIHTKFQVFKHQRTQKIEKPHACIECEQTFLRKSQLIYHENICIQENPGSGQCEKLSRSVLFTKHLKTNTTDKICIPNEYRKGSTVKSSLITHQQTHTEEKSYMCSECGKGFTMKRYLIAHQRTHSGEKPYVCKECGKGFTVKSNLIVHQRTHTGEKPYICSECGKGFTMKRYLVVHQRTHTGEKPYMCSECGKGFTVKSNLIVHQRSHTGEKSYICSECGKGFTVKRTLVIHQRTHTGEKSYICNECGKGFTTKRTLIIHQRTHTGEKPYECNECGKAFSQKICLIQHERCHTGKTPFVCTECGKSYSHKYGLITHQRIHTGEKPYECNECGKAFTTKSVLNVHQRTHTGERPYGCSDCEKAFSHLSNLVKHKKMHTREMGRISQVENSCNGESQLLPYK

SEQ ID NO: 2332 - protein, 1276 aa, Homo sapiens
MRSKARARKLAKSDGDVVNNMYEPNRDLLASHSAEDEAEDSAMSPIPVGPPSPFPTSEDFTPKEGSPYEAPVYIPEDIPIPADFELRESSIPGAGLGVWAKRKMEAGERLGPCVVVPRAAAKETDFGWEQILTDVEVSPQEGCITKISEDLGSEKFCVDANQAGAGSWLKYIRVACSCDDQNLTMCQISEQIYYKVIKDIEPGEELLVHVKEGVYPLGTVPPGLDEEPTFRCDECDELFQSKLDLRRHKKYTCGSVGAALYEGLAEELKPEGLGGGSGQAHECKDCERMFPNKYSLEQHMVIHTEEREYKCDQCPKAFNWKSNLIRHQMSHDSGKRFECENCVKVFTDPSNLQRHIRSQHVGARAHACPDCGKTFATSSGLKQHKHIHSTVKPFICEVCHKSYTQFSNLCRHKRMHADCRTQIKCKDCGQMFSTTSSLNKHRRFCEGKNHYTPGGIFAPGLPLTPSPMMDKAKPSPSLNHASLGFNEYFPSRPHPGSLPFSTAPPTFPALTPGFPGIFPPSLYPRPPLLPPTSLLKSPLNHTQDAKLPSPLGNPALPLVSAVSNSSQGTTAAAGPEEKFESRLEDSCVEKLKTRSSDMSDGSDFEDVNTTTGTDLDTTTGTGSDLDSDVDSDPDKDKGKGKSAEGQPKFGGGLAPPGAPNSVAEVPVFYSQHSFFPPPDEQLLTATGAAGDSIKAIASIAEKYFGPGFMGMQEKKLGSLPYHSAFPFQFLPNFPHSLYPFTDRALAHNLLVKAEPKSPRDALKVGGPSAECPFDLTTKPKDVKPILPMPKGPSAPASGEEQPLDLSIGSRARASQNGGGREPRKNHVYGERKLGAGEGLPQVCPARMPQQPPLHYAKPSPFFMDPIYSRVEKRKVTDPVGALKEKYLRPSPLLFHPQMSAIETMTEKLESFAAMKADSGSSLQPLPHHPFNFRSPPPTLSDPILRKGKERYTCRYCGKIFPRSANLTRHLRTHTGEQPYRCKYCDRSFSISSNLQRHVRNIHNKEKPFKCHLCNRCFGQQTNLDRHLKKHEHENAPVSQHPGVLTNHLGTSASSPTSESDNHALLDEKEDSYFSEIRNFIANSEMNQASTRTEKRADMQIVDGSAQCPGLASEKQEDVEEEDDDDLEEDDEDSLAGKSQDDTVSPAPEPQAAYEDEEDEEPAASLAVGFDHTRRCAEDHEGGLLALEPMPTFGKGLDLRRAAEEAFEVKDVLNSTLDSEALKHTLCRQAKNQAYAMMLSLSEDTPLHTPSQGSLDAWLKVTGATSESGAFHPINHL

SEQ ID NO: 2333 - protein, 802 aa, Homo sapiens
MDCGPPATLQPHLTGPPGTAHHPVAVCQQESLSFAELPALKPPSPVCLDLFPVAPEELRAPGSRWSLGTPAPLQGLLWPLSPGGSDTEITSGGMRPSRAGSWPHCPGAQPPALEGPWSPRHTQPQRRASHGSEKKSAWRKMRVYQREEVPGCPEAHAVFLEPGQVVQEQALSTEEPRVELSGSTRVSLEGPERRRFSASELMTRLHSSLRLGRNSAARALISGSGTGAAREGKASGMEARSVEMSGDRVSRPAPGDSREGDWSEPRLDTQEEPPLGSRSTNERRQSRFLLNSVLYQEYSDVASARELRRQQREEEGPGDEAEGAEEGPGPPRANLSPSSSFRAQRSARGSTFSLWQDIPDVRGSGVLATLSLRDCKLQEAKFELITSEASYIHSLSVAVGHFLGSAELSECLGAQDKQWLFSKLPEVKSTSERFLQDLEQRLEADVLRFSVCDVVLDHCPAFRRVYLPYVTNQAYQERTYQRLLLENPRFPGILARLEESPVCQRLPLTSFLILPFQRITRLKMLVENILKRTAQGSEDEDMATKAFNALKELVQECNASVQSMKRTEELIHLSKKIHFEGKIFPLISQARWLVRHGELVELAPLPAAPPAKLKLSSKAVYLHLFNDCLLLSRRKELGKFAVFVHAKMAELQVRDLSLKLQGIPGHVFLLQLLHGQHMKHQFLLRARTESEKQRWISALCPSSPQEDKEVISEGEDCPQVQCVRTYKALHPDELTLEKTDILSVRTWTSDGWLEGVRLADGEKGWVPQAYVEEISSLSARLRNLRENKRVTSATSKLGEAPV

SEQ ID NO: 2334 - protein, 483 aa, Homo sapiens
MAQADIALIGLAVMGQNLILNMNDHGFVVCAFNRTVSKVDDFLANEAKGTKVVGAQSLKEMVSKLKKPRRIILLVKAGQAVDDFIEKLVPLLDTGDIIIDGGNSEYRDTTRRCRDLKAKGILFVGSGVSGGEEGARYGPSLMPGGNKEAWPHIKTIFQGIAAKVGTGEPCCDWVGDEGAGHFVKMVHNGIEYGDMQLICEAYHLMKDVLGMAQDEMAQAFEDWNKTELDSFLIEITANILKFQDTDGKHLLPKIRDSAGQKGTGKWTAISALEYGVPVTLIGEAVFARCLSSLKDERIQASKKLKGPQKFQFDGDKKSFLEDIRKALYASKIISYAQGFMLLRQAATEFGWTLNYGGIALMWRGGCIIRSVFLGKIKDAFDRNPELQNLLLDDFFKSAVENCQDSWRRAVSTGVQAGIPMPCFTTALSFYDGYRHEMLPASLIQAQRDYFGAHTYELLAKPGQFIHTNWTGHGGTVSSSSYNA

SEQ ID NO: 2335 - protein, 268 aa, Homo sapiens
MKRRNLFALETGVPPWGLLWVRSRRVGMDEMTFHIWYPQVRAPGQQPQAQLAMALCLKQVFAKDKTFRPRKRFEPGTQRFELYKKAQASLKSGLDLRSVVRLPPGENIDDWIAVHVVDFFNRINLIYGTMAERCSETSCPVMAGGPRYEYRWQDERQYRRPAKLSAPRYMALLMDWIEGLINDEEVFPTRVGVPFPKNFQQVCTKILTRLFRVFVHVYIHHFDSILSMGAEAHVNTCYKHFYYFIREFSLVDQRELEPLREMTERICH

SEQ ID NO: 2336 - protein, 511 aa, Homo sapiens
MVPSFLSLSFSSLGLWASGLILVLGFLKLIHLLLRRQTLAKAMDKFPGPPTHWLFGHALEIQETGSLDKVVSWAHQFPYAHPLWFGQFIGFLNIYEPDYAKAVYSRGDPKAPDVYDFFLQWIGRGLLVLEGPKWLQHRKLLTPGFHYDVLKPYVAVFTESTRIMLDKWEEKAREGKSFDIFCDVGHMALNTLMKCTFGRGDTGLGHRDSSYYLAVSDLTLLMQQRLVSFQYHNDFIYWLTPHGRRFLRACQVAHDHTDQVIRERKAALQDEKVRKKIQNRRHLDFLDILLGARDEDDIKLSDADLRAEVDTFMFEGHDTTTSGISWFLYCMALYPEHQHRCREEVREILGDQDFFQWDDLGKMTYLTMCIKESFRLYPPVPQVYRQLSKPVTFVDGRSLPAGSLISMHIYALHRNSAVWPDPEVFDSLRFSTENASKRHPFAFMPFSAGPRNCIGQQFAMSEMKVVTAMCLLRFEFSLDPSRLPIKMPQLVLRSKNGFHLHLKPLGPGSGK

SEQ ID NO: 2337 - protein, 639 aa, Homo sapiens
MNLEKLSKPELLTLFSILEGELEARDLVIEALKAQHRDTFIEERYGKYNISDPLMALQRDFETLKEKNDGEKQPVCTNPLSILKVVMKQCKNMQERMLSQLAAAESRHRKVILDLEEERQRHAQDTAEGDDVTYMLEKERERLTQQLEFEKSQVKKFEKEQKKLSSQLEEERSRHKQLSSMLVLECKKATNKAAEEGQKAGELSLKLEKEKSRVSKLEEELAAERKRGLQTEAQVEKQLSEFDIEREQLRAKLNREENRTKTLKEEMESLKKIVKDLEASHQHSSPNEQLKKPVTVSKGTATEPLMLMSVFCQTESFPAERTHGSNIAKMTNTGLPGPATPAYSYAKTNGHCDPEIQTTRELTAGNNVENQVPPREKSVALAQEKPVENGGCPVGIETPVPMPSPLSSSGSSLSPSSTASSSLTSSPCSSPVLTKRLLGSSASSPGYQSSYQVGINQRFHAARHKFQSQADQDQQASGLQSPPSRDLSPTLIDNSAAKQLARNTVTQVLSRFTSQQGPIKPVSPNSSPFGTDYRNLANTANPRGDTSHSPTPGKVSSPLSPLSPGIKSPTIPRAERGNPPPIPPKKPGLTPSPSATTPLTKTHSQAASLTTAEDLASSCSSNTVVANGKDVELLLPTSS

SEQ ID NO: 2338 - protein, 2923 aa, Homo sapiens
MRSPATGVPLPTPPPPLLLLLLLLLPPPLLGDQVGPCRSLGSRGRGSSGACAPMGWLCPSSASNLWLYTSRCRDAGTELTGHLVPHHDGLRVWCPESEAHIPLPPAPEGCPWSCRLLGIGGHLSPQGKLTLPEEHPCLKAPRLRCQSCKLAQAPGLRAGERSPEESLGGRRKRNVNTAPQFQPPSYQATVPENQPAGTPVASLRAIDPDEGEAGRLEYTMDALFDSRSNQFFSLDPVTGAVTTAEELDRETKSTHVFRVTAQDHGMPRRSALATLTILVTDTNDHDPVFEQQEYKESLRENLEVGYEVLTVRATDGDAPPNANILYRLLEGSGGSPSEVFEIDPRSGVIRTRGPVDREEVESYQLTVEASDQGRDPGPRSTTAAVFLSVEDDNDNAPQFSEKRYVVQVREDVTPGAPVLRVTASDRDKGSNAVVHYSIMSGNARGQFYLDAQTGALDVVSPLDYETTKEYTLRVRAQDGGRPPLSNVSGLVTVQVLDINDNAPIFVSTPFQATVLESVPLGYLVLHVQAIDADAGDNARLEYRLAGVGHDFPFTINNGTGWISVAAELDREEVDFYSFGVEARDHGTPALTASASVSVTVLDVNDNNPTFTQPEYTVRLNEDAAVGTSVVTVSAVDRDAHSVITYQITSGNTRNRFSITSQSGGGLVSLALPLDYKLERQYVLAVTASDGTRQDTAQIVVNVTDANTHRPVFQSSHYTVNVNEDRPAGTTVVLISATDEDTGENARITYFMEDSIPQFRIDADTGAVTTQAELDYEDQVSYTLAITARDNGIPQKSDTTYLEILVNDVNDNAPQFLRDSYQGSVYEDVPPFTSVLQISATDRDSGLNGRVFYTFQGGDDGDGDFIVESTSGIVRTLRRLDRENVAQYVLRAYAVDKGMPPARTPMEVTVTVLDVNDNPPVFEQDEFDVFVEENSPIGLAVARVTATDPDEGTNAQIMYQIVEGNIPEVFQLDIFSGELTALVDLDYEDRPEYVLVIQATSAPLVSRATVHVRLLDRNDNPPVLGNFEILFNNYVTNRSSSFPGGAIGRVPAHDPDISDSLTYSFERGNELSLVLLNASTGELKLSRALDNNRPLEAIMSVLVSDGVHSVTAQCALRVTIITDEMLTHSITLRLEDMSPERFLSPLLGLFIQAVAATLATPPDHVVVFNVQRDTDAPGGHILNVSLSVGQPPGPGGGPPFLPSEDLQERLYLNRSLLTAISAQRVLPFDDNICLREPCENYMRCVSVLRFDSSAPFIASSSVLFRPIHPVGGLRCRCPPGFTGDYCETEVDLCYSRPCGPHGRCRSREGGYTCLCRDGYTGEHCEVSARSGRCTPGVCKNGGTCVNLLVGGFKCDCPSGDFEKPYCQVTTRSFPAHSFITFRGLRQRFHFTLALSFATKERDGLLLYNGRFNEKHDFVALEVIQEQVQLTFSAGESTTTVSPFVPGGVSDGQWHTVQLKYYNKPLLGQTGLPQGPSEQKVAVVTVDGCDTGVALRFGSVLGNYSCAAQGTQGGSKKSLDLTGPLLLGGVPDLPESFPVRMRQFVGCMRNLQVDSRHIDMADFIANNGTVPGCPAKKNVCDSNTCHNGGTCVNQWDAFSCECPLGFGGKSCAQEMANPQHFLGSSLVAWHGLSLPISQPWYLSLMFRTRQADGVLLQAITRGRSTITLQLREGHVMLSVEGTGLQASSLRLEPGRANDGDWHHAQLALGASGGPGHAILSFDYGQQRAEGNLGPRLHGLHLSNITVGGIPGPAGGVARGFRGCLQGVRVSDTPEGVNSLDPSHGESINVEQGCSLPDPCDSNPCPANSYCSNDWDSYSCSCDPGYYGDNCTNVCDLNPCEHQSVCTRKPSAPHGYTCECPPNYLGPYCETRIDQPCPRGWWGHPTCGPCNCDVSKGFDPDCNKTSGECHCKENHYRPPGSPTCLLCDCYPTGSLSRVCDPEDGQCPCKPGVIGRQCDRCDNPFAEVTTNGCEVNYDSCPRAIEAGIWWPRTRFGLPAAAPCPKGSFGTAVRHCDEHRGWLPPNLFNCTSITFSELKGFAERLQRNESGLDSGRSQQLALLLRNATQHTAGYFGSDVKVAYQLATRLLAHESTQRGFGLSATQDVHFTENLLRVGSALLDTANKRHWELIQQTEGGTAWLLQHYEAYASALAQNMRHTYLSPFTIVTPNIVISVVRLDKGNFAGAKLPRYEALRGEQPPDLETTVILPESVFRETPPVVRPAGPGEAQEPEELARRQRRHPELSQGEAVASVIIYRTLAGLLPHNYDPDKRSLRVPKRPIINTPVVSISVHDDEELLPRALDKPVTVQFRLLETEERTKPICVFWNHSILVSGTGGWSARGCEVVFRNESHVSCQCNHMTSFAVLMDVSRRENGEILPLKTLTYVALGVTLAALLLTFFFLTLLRILRSNQHGIRRNLTAALGLAQLVFLLGINQADLPFACTVIAILLHFLYLCTFSWALLEALHLYRALTEVRDVNTGPMRFYYMLGWGVPAFITGLAVGLDPEGYGNPDFCWLSIYDTLIWSFAGPVAFAVSMSVFLYILAARASCAAQRQGFEKKGPVSGLQPSFAVLLLLSATWLLALLSVNSDTLLFHYLFATCNCIQGPFIFLSYVVLSKEVRKALKLACSRKPSPDPALTTKSTLTSSYNCPSPYADGRLYQPYGDSAGSLHSTSRSGKSQPSYIPFLLREESALNPGQGPPGLGDPGSLFLEGQDQQHDPDTDSDSDLSLEDDQSGSYASTHSSDSEEEEEEEEEEAAFPGEQGWDSLLGPGAERLPLHSTPKDGGPGPGKAPWPGDFGTTAKESSGNGAPEERLRENGDALSREGSLGPLPGSSAQPHKGILKKKCLPTISEKSSLLRLPLEQCTGSSRGSSASEGSRGGPPPRPPPRQSLQEQLNGVMPIAMSIKAGTVDEDSSGSEFLFFNFLH

SEQ ID NO: 2339 - protein, 546 aa, Homo sapiens
MKVVQHALPTPRRGALTMSLNSSLSCRKELSNLTEEEGGEGGVIITQFIAIIVITIFVCLGNLVIVVTLYKKSYLLTLSNKFVFSLTLSNFLLSVLVLPFVVTSSIRREWIFGVVWCNFSALLYLLISSASMLTLGVIAIDRYYAVLYPMVYPMKITGNRAVMALVYIWLHSLIGCLPPLFGWSSVEFDEFKWMCVAAWHREPGYTAFWQIWCALFPFLVMLVCYGFIFRVARVKARKVHCGTVVIVEEDAQRTGRKNSSTSTSSSGSRRNAFQGVVYSANQCKALITILVVLGAFMVTWGPYMVVIASEALWGKSSVSPSLETWATWLSFASAVCHPLIYGLWNKTVRKELLGMCFGDRYYREPFVQRQRTSRLFSISNRITDLGLSPHLTALMAGGQPLGHSSSTGDTGFSCSQDSGTDMMLLEDYTSDDNPPSHCTCPPKRRSSVTFEDEVEQIKEAAKNSILHVKAEVHKSLDSYAASLAKAIEAEAKINLFGEEALPGVLVTARTVPGGGFGGRRGSRTLVSQRLQLQSIEEGDVLAAEQR

SEQ ID NO: 2340 - protein, 1158 aa, Homo sapiens
MATRKDTEEEQVVPSEEDEANVRAVQAHYLRSPSPSQYSMVSDAETESIFMEPIHLSSAIAAKQIINEELKPPGVRADAECPGMLESAEQLLVEDLYNRVREKMDDTSLYNTPCVLDLQRALVQDRQEAPWNEVDEVWPNVFIAEKSVAVNKGRLKRLGITHILNAAHGTGVYTGPEFYTGLEIQYLGVEVDDFPEVDISQHFRKASEFLDEALLTYRGKVLVSSEMGISRSAVLVVAYLMIFHNMAILEALMTVRKKRAIYPNEGFLKQLRELNEKLMEEREEDYGREGGSAEAEEGEGTGSMLGARVHALTVEEEDDSASHLSGSSLGKATQASKPLTLIDEEEEEKLYEQWKKGQGLLSDKVPQDGGGWRSASSGQGGEELEDEDVERIIQEWQSRNERYQAEGYRRWGREEEKEEESDAGSSVGRRRRTLSESSAWESVSSHDIWVLKQQLELNRPDHGRRRRADSMSSESTWDAWNERLLEIEKEASRRYHAKSKREEAADRSSEAGSRVREDDEDSVGSEASSFYNFCSRNKDKLTALERWKIKRIQFGFHKKDLGAGDSSGEPGAEEAVGEKNPSDVSLTAYQAWKLKHQKKVGSENKEEVVELSKGEDSALAKKRQRRLELLERSRQTLEESQSMASWEADSSTASGSIPLSAFWSADPSVSADGDTTSVLSTQSHRSHLSQAASNIAGCSTSNPTTPLPNLPVGPGDTISIASIQNWIANVVSETLAQKQNEMLLLSRSPSVASMKAVPAASCLGDDQVSMLSGHSSSSLGGCLLPQSQARPSSDMQSVLSCNTTLSSPAESCRSKVRGTSKPIFSLFADNVDLKELGRKEKEMQMELREKMSEYKMEKLASDNKRSSLFKKKKVKEDEDDGVGDGDEDTDSAIGSFRYSSRSNSQKPETDTCSSLAVCDHYASGSRVGKEMDSSINKWLSGLRTEEKPPFQSDWSGSSRGKYTRSSLLRETESKSSSYKFSKSQSEEQDTSSYHEANGNSVRSTSRFSSSSTREGREMHKFSRSTYNETSSSREESPEPYFFRRTPESSEREESPEPQRPNWARSRDWEDVEESSKSDFSEFGAKRKFTQSFMRSEEEGEKERTENREEGRFASGRRSQYRRSTDREEEEEMDDEAIIAAWRRRQEETRTKLQKRRED

SEQ ID NO: 2341 - protein, 639 aa, Homo sapiens
MDRVLLRWISLFWLTAMVEGLQVTVPDKKKVAMLFQPTVLRCHFSTSSHQPAVVQWKFKSYCQDRMGESLGMSSTRAQSLSKRNLEWDPYLDCLDSRRTVRVVASKQGSTVTLGDFYRGREITIVHDADLQIGKLMWGDSGLYYCIITTPDDLEGKNEDSVELLVLGRTGLLADLLPSFAVEIMPEWVFVGLVLLGVFLFFVLVGICWCQCCPHSCCCYVRCPCCPDSCCCPQALYEAGKAAKAGYPPSVSGVPGPYSIPSVPLGGAPSSGMLMDKPHPPPLAPSDSTGGSHSVRKGYRIQADKERDSMKVLYYVEKELAQFDPARRMRGRYNNTISELSSLHEEDSNFRQSFHQMRSKQFPVSGDLESNPDYWSGVMGGSSGASRGPSAMEYNKEDRESFRHSQPRSKSEMLSRKNFATGVPAVSMDELAAFADSYGQRPRRADGNSHEARGGSRFERSESRAHSGFYQDDSLEEYYGQRSRSREPLTDADRGWAFSPARRRPAEDAHLPRLVSRTPGTAPKYDHSYLGSARERQARPEGASRGGSLETPSKRSAQLGPRSASYYAWSPPGTYKAGSSQDDQEDASDDALPPYSELELTRGPSYRGRDLPYHSNSEKKRKKEPAKKTNDFPTRMSLVV

SEQ ID NO: 2342 - protein, 317 aa, Homo sapiens
MTMETQMSQNVCPRNLWLLQPLTVLLLLASADSQAAAPPKAVLKLEPPWINVLQEDSVTLTCQGARSPESDSIQWFHNGNLIPTHTQPSYRFKANNNDSGEYTCQTGQTSLSDPVHLTVLSEWLVLQTPHLEFQEGETIMLRCHSWKDKPLVKVTFFQNGKSQKFSHLDPTFSIPQANHSHSGDYHCTGNIGYTLFSSKPVTITVQVPSMGSSSPMGIIVAVVIATAVAAIVAAVVALIYCRKKRISANSTDPVKAAQFEPPGRQMIAIRKRQLEETNNDYETADGGYMTLNPRAPTDDDKNIYLTLPPNDHVNSNN

SEQ ID NO: 2343 - protein, 464 aa, Homo sapiens
METLSFPRYNVAEIVIHIRNKILTGADGKNLTKNDLYPNPKPEVLHMIYMRALQIVYGIRLEHFYMMPVNSEVMYPHLMEGFLPFSNLVTHLDSFLPICRVNDFETADILCPKAKRTSRFLSGIINFIHFREACRETYMEFLWQYKSSADKMQQLNAAHQEALMKLERLDSVPVEEQEEFKQLSDGIQELQQSLNQDFHQKTIVLQEGNSQKKSNISEKTKRLNELKLSVVSLKEIQESLKTKIVDSPEKLKNYKEKMKDTVQKLKNARQEVVEKYEIYGDSVDCLPSCQLEVQLYQKKIQDLSDNREKLASILKESLNLEDQIESDESELKKLKTEENSFKRLMIVKKEKLATAQFKINKKHEDVKQYKRTVIEDCNKVQEKRGAVYERVTTINQEIQKIKLGIQQLKDAAEREKLKSQEIFLNLKTALEKYHDGIEKAAEDSYAKIDEKTAELKRKMFKMST

SEQ ID NO: 2344 - protein, 515 aa, Homo sapiens
MLLWASLLAFAPVCGQSAAAHKPVISVHPPWTTFFKGERVTLTCNGFQFYATEKTTWYHRHYWGEKLTLTPGNTLEVRESGLYRCQARGSPRSNPVRLLFSSDSLILQAPYSVFEGDTLVLRCHRRRKEKLTAVKYTWNGNILSISNKSWDLLIPQASSNNNGNYRCIGYGDENDVFRSNFKIIKIQELFPHPELKATDSQPTEGNSVNLSCETQLPPERSDTPLHFNFFRDGEVILSDWSTYPELQLPTVWRENSGSYWCGAETVRGNIHKHSPSLQIHVQRIPVSGVLLETQPSGGQAVEGEMLVLVCSVAEGTGDTTFSWHREDMQESLGRKTQRSLRAELELPAIRQSHAGGYYCTADNSYGPVQSMVLNVTVRETPGNRDGLVAAGATGGLLSALLLAVALLFHCWRRRKSGVGFLGDETRLPPAPGPGESSHSICPAQVELQSLYVDVHPKKGDLVYSEIQTTQLGEEEEANTSRTLLEDKDVSVVYSEVKTQHPDNSAGKISSKDEES

SEQ ID NO: 2345 - protein, 521 aa, Homo sapiens
MGRKKIQIQRITDERNRQVTFTKRKFGLMKKAYELSVLCDCEIALIIFNHSNKLFQYASTDMDKVLLKYTEYNEPHESRTNADIIETLRKKGFNGCDSPEPDGEDSLEQSPLLEDKYRRASEELDGLFRRYGSTVPAPNFAMPVTVPVSNQSSLQFSNPSGSLVTPSLVTSSLTDPRLLSPQQPALQRNSVSPGLPQRPASAGAMLGGDLNSANGACPSPVGNGYVSARASPGLLPVANGNSLNKVIPAKSPPPPTHSTQLGAPSRKPDLRVITSQAGKGLMHHLTEDHLDLNNAQRLGVSQSTHSLTTPVVSVATPSLLSQGLPFSSMPTAYNTDYQLTSAELSSLPAFSSPGGLSLGNVTAWQQPQQPQQPQQPQPPQQQPPQPQQPQPQQPQQPQQPPQQQSHLVPVSLSNLIPGSPLPHVGAALTVTTHPHISIKSEPVSPSRERSPAPPPPAVFPAARPEPGDGLSSPAGGSYETGDRDDGRGDFGPTLGLLRPAPEPEAEGSAVKRMRLDTWTLK

SEQ ID NO: 2346 - protein, 5635 aa, Homo sapiens
MISWEVVHTVFLFALLYSSLAQDASPQSEIRAEEIPEGASTLAFVFDVTGSMYDDLVQVIEGASKILETSLKRPKRPLFNFALVPFHDPEIGPVTITTDPKKFQYELRELYVQGGGDCPEMSIGAIKIALEISLPGSFIYVFTDARSKDYRLTHEVLQLIQQKQSQVVFVLTGDCDDRTHIGYKVYEEIASTSSGQVFHLDKKQVNEVLKWVEEAVQASKVHLLSTDHLEQAVNTWRIPFDPSLKEVTVSLSGPSPMIEIRNPLGKLIKKGFGLHELLNIHNSAKVVNVKEPEAGMWTVKTSSSGRHSVRITGLSTIDFRAGFSRKPTLDFKKTVSRPVQGIPTYVLLNTSGISTPARIDLLELLSISGSSLKTIPVKYYPHRKPYGIWNISDFVPPNEAFFLKVTGYDKDDYLFQRVSSVSFSSIVPDAPKVTMPEKTPGYYLQPGQIPCSVDSLLPFTLSFVRNGVTLGVDQYLKESASVNLDIAKVTLSDEGFYECIAVSSAGTGRAQTFFDVSEPPPVIQVPNNVTVTPGERAVLTCLIISAVDYNLTWQRNDRDVRLAEPARIRTLANLSLELKSVKFNDAGEYHCMVSSEGGSSAASVFLTVQEPPKVTVMPKNQSFTGGSEVSIMCSATGYPKPKIAWTVNDMFIVGSHRYRMTSDGTLFIKNAAPKDAGIYGCLASNSAGTDKQNSTLRYIEAPKLMVVQSELLVALGDITVMECKTSGIPPPQVKWFKGDLELRPSTFLIIDPLLGLLKIQETQDLDAGDYTCVAINEAGRATGKITLDVGSPPVFIQEPADVSMEIGSNVTLPCYVQGYPEPTIKWRRLDNMPIFSRPFSVSSISQLRTGALFILNLWASDKGTYICEAENQFGKIQSETTVTVTGLVAPLIGISPSVANVIEGQQLTLPCTLLAGNPIPERRWIKNSAMLLQNPYITVRSDGSLHIERVQLQDGGEYTCVASNVAGTNNKTTSVVVHVLPTIQHGQQILSTIEGIPVTLPCKASGNPKPSVIWSKKGELISTSSAKFSAGADGSLYVVSPGGEESGEYVCTATNTAGYAKRKVQLTVYVRPRVFGDQRGLSQDKPVEISVLAGEEVTLPCEVKSLPPPIITWAKETQLISPFSPRHTFLPSGSMKITETRTSDSGMYLCVATNIAGNVTQAVKLNVHVPPKIQRGPKHLKVQVGQRVDIPCNAQGTPLPVITWSKGGSTMLVDGEHHVSNPDGTLSIDQATPSDAGIYTCVATNIAGTDETEITLHVQEPPTVEDLEPPYNTTFQERVANQRIEFPCPAKGTPKPTIKWLHNGRELTGREPGISILEDGTLLVIASVTPYDNGEYICVAVNEAGTTERKYNLKVHVPPVIKDKEQVTNVSVLLNQLTNLFCEVEGTPSPIIMWYKDNVQVTESSTIQTVNNGKILKLFRATPEDAGRYSCKAINIAGTSQKYFNIDVLVPPTIIGTNFPNEVSVVLNRDVALECQVKGTPFPDIHWFKDGKPLFLGDPNVELLDRGQVLHLKNARRNDKGRYQCTVSNAAGKQAKDIKLTIYIPPSIKGGNVTTDISVLINSLIKLECETRGLPMPAITWYKDGQPIMSSSQALYIDKGQYLHIPRAQVSDSATYTCHVANVAGTAEKSFHVDVYVPPMIEGNLATPLNKQVVIAHSLTLECKAAGNPSPILTWLKDGVPVKANDNIRIEAGGKKLEIMSAQEIDRGQYICVATSVAGEKEIKYEVDVLVPPAIEGGDETSYFIVMVNNLLELDCHVTGSPPPTIMWLKDGQLIDERDGFKILLNGRKLVIAQAQVSNTGLYRCMAANTAGDHKKEFEVTVHVPPTIKSSGLSERVVVKYKPVALQCIANGIPNPSITWLKDDQPVNTAQGNLKIQSSGRVLQIAKTLLEDAGRYTCVATNAAGETQQHIQLHVHEPPSLEDAGKMLNETVLVSNPVQLECKAAGNPVPVITWYKDNRLLSGSTSMTFLNRGQIIDIESAQISDAGIYKCVAINSAGATELFYSLQVHVAPSISGSNNMVAVVVNNPVRLECEARGIPAPSLTWLKDGSPVSSFSNGLQVLSGGRILALTSAQISDTGRYTCVAVNAAGEKQRDIDLRVYVPPNIMGEEQNVSVLISQAVELLCQSDAIPPPTLTWLKDGHPLLKKPGLSISENRSVLKIEDAQVQDTGRYTCEATNVAGKTEKNYNVNIWVPPNIGGSDELTQLTVIEGNLISLLCESSGIPPPNLIWKKKGSPVLTDSMGRVRILSGGRQLQISIAEKSDAALYSCVASNVAGTAKKEYNLQVYIRPTITNSGSHPTEIIVTRGKSISLECEVQGIPPPTVTWMKDGHPLIKAKGVEILDEGHILQLKNIHVSDTGRYVCVAVNVAGMTDKKYDLSVHAPPSIIGNHRSPENISVVEKNSVSLTCEASGIPLPSITWFKDGWPVSLSNSVRILSGGRMLRLMQTTMEDAGQYTCVVRNAAGEERKIFGLSVLVPPHIVGENTLEDVKVKEKQSVTLTCEVTGNPVPEITWHKDGQPLQEDEAHHIISGGRFLQITNVQVPHTGRYTCLASSPAGHKSRSFSLNVFVSPTIAGVGSDGNPEDVTVILNSPTSLVCEAYSYPPATITWFKDGTPLESNRNIRILPGGRTLQILNAQEDNAGRYSCVATNEAGEMIKHYEVKVYIPPIINKGDLWGPGLSPKEVKIKVNNTLTLECEAYAIPSASLSWYKDGQPLKSDDHVNIAANGHTLQIKEAQISDTGRYTCVASNIAGEDELDFDVNIQVPPSFQKLWEIGNMLDTGRNGEAKDVIINNPISLYCETNAAPPPTLTWYKDGHPLTSSDKVLILPGGRVLQIPRAKVEDAGRYTCVAVNEAGEDSLQYDVRVLVPPIIKGANSDLPEEVTVLVNKSALIECLSSGSPAPRNSWQKDGQPLLEDDHHKFLSNGRILQILNTQITDIGRYVCVAENTAGSAKKYFNLNVHVPPSVIGPKSENLTVVVNNFISLTCEVSGFPPPDLSWLKNEQPIKLNTNTLIVPGGRTLQIIRAKVSDGGEYTCIAINQAGESKKKFSLTVYVPPSIKDHDSESLSVVNVREGTSVSLECESNAVPPPVITWYKNGRMITESTHVEILADGQMLHIKKAEVSDTGQYVCRAINVAGRDDKNFHLNVYVPPSIEGPEREVIVETISNPVTLTCDATGIPPPTIAWLKNHKRIENSDSLEVRILSGGSKLQIARSQHSDSGNYTCIASNMEGKAQKYYFLSIQVPPSVAGAEIPSDVSVLLGENVELVCNANGIPTPLIQWLKDGKPIASGETERIRVSANGSTLNIYGALTSDTGKYTCVATNPAGEEDRIFNLNVYVTPTIRGNKDEAEKLMTLVDTSINIECRATGTPPPQINWLKNGLPLPLSSHIRLLAAGQVIRIVRAQVSDVAVYTCVASNRAGVDNKHYNLQVFAPPNMDNSMGTEEITVLKGSSTSMACITDGTPAPSMAWLRDGQPLGLDAHLTVSTHGMVLQLLKAETEDSGKYTCIASNEAGEVSKHFILKVLEPPHINGSEEHEEISVIVNNPLELTCIASGIPAPKMTWMKDGRPLPQTDQVQTLGGGEVLRISTAQVEDTGRYTCLASSPAGDDDKEYLVRVHVPPNIAGTDEPRDITVLRNRQVTLECKSDAVPPPVITWLRNGERLQATPRVRILSGGRYLQINNADLGDTANYTCVASNIAGKTTREFILTVNVPPNIKGGPQSLVILLNKSTVLECIAEGVPTPRITWRKDGAVLAGNHARYSILENGFLHIQSAHVTDTGRYLCMATNAAGTDRRRIDLQVHVPPSIAPGPTNMTVIVNVQTTLACEATGIPKPSINWRKNGHLLNVDQNQNSYRLLSSGSLVIISPSVDDTATYECTVTNGAGDDKRTVDLTVQVPPSIADEPTDFLVTKHAPAVITCTASGVPFPSIHWTKNGIRLLPRGDGYRILSSGAIEILATQLNHAGRYTCVARNAAGSAHRHVTLHVHEPPVIQPQPSELHVILNNPILLPCEATGTPSPFITWQKEGINVNTSGRNHAVLPSGGLQISRAVREDAGTYMCVAQNPAGTALGKIKLNVQVPPVISPHLKEYVIAVDKPITLSCEADGLPPPDITWHKDGRAIVESIRQRVLSSGSLQIAFVQPGDAGHYTCMAANVAGSSSTSTKLTVHVPPRIRSTEGHYTVNENSQAILPCVADGIPTPAINWKKDNVLLANLLGKYTAEPYGELILENVVLEDSGFYTCVANNAAGEDTHTVSLTVHVLPTFTELPGDVSLNKGEQLRLSCKATGIPLPKLTWTFNNNIIPAHFDSVNGHSELVIERVSKEDSGTYVCTAENSVGFVKAIGFVYVKEPPVFKGDYPSNWIEPLGGNAILNCEVKGDPTPTIQWNRKGVDIEISHRIRQLGNGSLAIYGTVNEDAGDYTCVATNEAGVVERSMSLTLQSPPIITLEPVETVINAGGKIILNCQATGEPQPTITWSRQGHSISWDDRVNVLSNNSLYIADAQKEDTSEFECVARNLMGSVLVRVPVIVQVHGGFSQWSAWRACSVTCGKGIQKRSRLCNQPLPANGGKPCQGSDLEMRNCQNKPCPVDGSWSEWSLWEECTRSCGRGNQTRTRTCNNPSVQHGGRPCEGNAVEIIMCNIRPCPVHGAWSAWQPWGTCSESCGKGTQTRARLCNNPPPAFGGSYCDGAETQMQVCNERNCPIHGKWATWASWSACSVSCGGGARQRTRGCSDPVPQYGGRKCEGSDVQSDFCNSDPCPTHGNWSPWSGWGTCSRTCNGGQMRRYRTCDNPPPSNGGRACGGPDSQIQRCNTDMCPVDGSWGSWHSWSQCSASCGGGEKTRKRLCDHPVPVKGGRPCPGDTTQVTRCNVQACPGGPQRARGSVIGNINDVEFGIAFLNATITDSPNSDTRIIRAKITNVPRSLGSAMRKIVSILNPIYWTTAKEIGEAVNGFTLTNAVFKRETQVEFATGEILQMSHIARGLDSDGSLLLDIVVSGYVLQLQSPAEVTVKDYTEDYIQTGPGQLYAYSTRLFTIDGISIPYTWNHTVFYDQAQGRMPFLVETLHASSVESDYNQIEETLGFKIHASISKGDRSNQCPSGFTLDSVGPFCADEDECAAGNPCSHSCHNAMGTYYCSCPKGLTIAADGRTCQDIDECALGRHTCHAGQDCDNTIGSYRCVVRCGSGFRRTSDGLSCQDINECQESSPCHQRCFNAIGSFHCGCEPGYQLKGRKCMDVNECRQNVCRPDQHCKNTRGGYKCIDLCPNGMTKAENGTCIDIDECKDGTHQCRYNQICENTRGSYRCVCPRGYRSQGVGRPCMDINECEQVPKPCAHQCSNTPGSFKCICPPGQHLLGDGKSCAGLERLPNYGTQYSSYNLARFSPVRNNYQPQQHYRQYSHLYSSYSEYRNSRTSLSRTRRTIRKTCPEGSEASHDTCVDIDECENTDACQHECKNTFGSYQCICPPGYQLTHNGKTCQDIDECLEQNVHCGPNRMCFNMRGSYQCIDTPCPPNYQRDPVSGFCLKNCPPNDLECALSPYALEYKLVSLPFGIATNQDLIRLVAYTQDGVMHPRTTFLMVDEEQTVPFALRDENLKGVVYTTRPLREAETYRMRVRASSYSANGTIEYQTTFIVYIAVSAYPY

SEQ ID NO: 2347 - protein, 1203 aa, Homo sapiens
MEQAPNMAEPRGPVDHGVQIRFITEPVSGAEMGTLRRGGRRPAKDARASTYGVAVRVQGIAGQPFVVLNSGEKGGDSFGVQIKGANDQGASGALSSDLELPENPYSQVKGFPAPSQSSTSDEEPGAYWNGKLLRSHSQASLAGPGPVDPSNRSNSMLELAPKVASPGSTIDTAPLSSVDSLINKFDSQLGGQARGRTGRRTRMLPPEQRKRSKSLDSRLPRDTFEERERQSTNHWTSSTKYDNHVGTSKQPAQSQNLSPLSGFSRSRQTQDWVLQSFEEPRRSAQDPTMLQFKSTPDLLRDQQEAAPPGSVDHMKATIYGILREGSSESETSVRRKVSLVLEKMQPLVMVSSGSTKAVAGQGELTRKVEELQRKLDEEVKKRQKLEPSQVGLERQLEEKTEECSRLQELLERRKGEAQQSNKELQNMKRLLDQGEDLRHGLETQVMELQNKLKHVQGPEPAKEVLLKDLLETRELLEEVLEGKQRVEEQLRLRERELTALKGALKEEVASRDQEVEHVRQQYQRDTEQLRRSMQDATQDHAVLEAERQKMSALVRGLQRELEETSEETGHWQSMFQKNKEDLRATKQELLQLRMEKEEMEEELGEKIEVLQRELEQARASAGDTRQVEVLKKELLRTQEELKELQAERQSQEVAGRHRDRELEKQLAVLRVEADRGRELEEQNLQLQKTLQQLRQDCEEASKAKMVAEAEATVLGQRRAAVETTLRETQEENDEFRRRILGLEQQLKETRGLVDGGEAVEARLRDKLQRLEAEKQQLEEALNASQEEEGSLAAAKRALEARLEEAQRGLARLGQEQQTLNRALEEEGKQREVLRRGKAELEEQKRLLDRTVDRLNKELEKIGEDSKQALQQLQAQLEDYKEKARREVADAQRQAKDWASEAEKTSGGLSRLQDEIQRLRQALQASQAERDTARLDKELLAQRLQGLEQEAENKKRSQDDRARQLKGLEEKVSRLETELDEEKNTVELLTDRVNRGRDQVDQLRTELMQERSARQDLECDKISLERQNKDLKTRLASSEGFQKPSASLSQLESQNQLLQERLQAEEREKTVLQSTNRKLERKVKELSIQIEDERQHVNDQKDQLSLRVKALKRQVDEAEEEIERLDGLRKKAQREVEEQHEVNEQLQARIKSLEKDSWRKASRSAAESALKNEGLSSDEEFDSVYDPSSIASLLTESNLQTSSC

SEQ ID NO: 2348 - protein, 1291 aa, Homo sapiens
MSSLPGCIGLDAATATVESEEIAELQQAVVEELGISMEELRHFIDEELEKMDCVQQRKKQLAELETWVIQKESEVAHVDQLFDDASRAVTNCESLVKDFYSKLGLQYRDSSSEDESSRPTEIIEIPDEDDDVLSIDSGDAGSRTPKDQKLREAMAALRKSAQDVQKFMDAVNKKSSSQDLHKGTLSQMSGELSKDGDLIVSMRILGKKRTKTWHKGTLIAIQTVGPGKKYKVKFDNKGKSLLSGNHIAYDYHPPADKLYVGSRVVAKYKDGNQVWLYAGIVAETPNVKNKLRFLIFFDDGYASYVTQSELYPICRPLKKTWEDIEDISCRDFIEEYVTAYPNRPMVLLKSGQLIKTEWEGTWWKSRVEEVDGSLVRILFLDDKRCEWIYRGSTRLEPMFSMKTSSASALEKKQGQLRTRPNMGAVRSKGPVVQYTQDLTGTGTQFKPVEPPQPTAPPAPPFPPAPPLSPQAGDSDLESQLAQSRKQVAKKSTSFRPGSVGSGHSSPTSPALSENVSGGKPGINQTYRSPLGSTASAPAPSALPAPPAPPVFHGMLERAPAEPSYRAPMEKLFYLPHVCSYTCLSRVRPMRNEQYRGKNPLLVPLLYDFRRMTARRRVNRKMGFHVIYKTPCGLCLRTMQEIERYLFETGCDFLFLEMFCLDPYVLVDRKFQPYKPFYYILDITYGKEDVPLSCVNEIDTTPPPQVAYSKERIPGKGVFINTGPEFLVGCDCKDGCRDKSKCACHQLTIQATACTPGGQINPNSGYQYKRLEECLPTGVYECNKRCKCDPNMCTNRLVQHGLQVRLQLFKTQNKGWGIRCLDDIAKGSFVCIYAGKILTDDFADKEGLEMGDEYFANLDHIESVENFKEGYESDAPCSSDSSGVDLKDQEDGNSGTEDPEESNDDSSDDNFCKDEDFSTSSVWRSYATRRQTRGQKENGLSETTSKDSHPPDLGPPHIPVPPSIPVGGCNPPSSEETPKNKVASWLSCNSVSEGGFADSDSHSSFKTNEGGEGRAGGSRMEAEKASTSGLGIKDEGDIKQAKKEDTDDRNKMSVVTESSRNYGYNPSPVKPEGLRRPPSKTSMHQSRRLMASAQSNPDDVLTLSSSTESEGESGTSRKPTAGQTSATAVDSDDIQTISSGSEGDDFEDKKNMTGPMKRQVAVKSTRGFALKSTHGIAIKSTNMASVDKGESAPVRKNTRQFYDGEESCYIIDAKLEGNLGRYLNHSCSPNLFVQNVFVDTHDLRFPWVAFFASKRIRAGTELTWDYNYEVGSVEGKELLCCCGAIECRGRLL

SEQ ID NO: 2349 - protein, 1074 aa, Homo sapiens
MENWTGRPWLYLLLLLSLPQLCLDQEVLSGHSLQTPTEEGQGPEGVWGPWVQWASCSQPCGVGVQRRSRTCQLPTVQLHPSLPLPPRPPRHPEALLPRGQGPRPQTSPETLPLYRTQSRGRGGPLRGPASHLGREETQEIRAARRSRLRDPIKPGMFGYGRVPFALPLHRNRRHPRSPPRSELSLISSRGEEAIPSPTPRAEPFSANGSPQTELPPTELSVHTPSPQAEPLSPETAQTEVAPRTRPAPLRHHPRAQASGTEPPSPTHSLGEGGFFRASPQPRRPSSQGWASPQVAGRRPDPFPSVPRGRGQQGQGPWGTGGTPHGPRLEPDPQHPGAWLPLLSNGPHASSLWSLFAPSSPIPRCSGESEQLRACSQAPCPPEQPDPRALQCAAFNSQEFMGQLYQWEPFTEVQGSQRCELNCRPRGFRFYVRHTEKVQDGTLCQPGAPDICVAGRCLSPGCDGILGSGRRPDGCGVCGGDDSTCRLVSGNLTDRGGPLGYQKILWIPAGALRLQIAQLRPSSNYLALRGPGGRSIINGNWAVDPPGSYRAGGTVFRYNRPPREEGKGESLSAEGPTTQPVDVYMIFQEENPGVFYQYVISSPPPILENPTPEPPVPQLQPEILRVEPPLAPAPRPARTPGTLQRQVRIPQMPAPPHPRTPLGSPAAYWKRVGHSACSASCGKGVWRPIFLCISRESGEELDERSCAAGARPPASPEPCHGTPCPPYWEAGEWTSCSRSCGPGTQHRQLQCRQEFGGGGSSVPPERCGHLPRPNITQSCQLRLCGHWEVGSPWSQCSVRCGRGQRSRQVRCVGNNGDEVSEQECASGPPQPPSREACDMGPCTTAWFHSDWSSKCSAECGTGIQRRSVVCLGSGAALGPGQGEAGAGTGQSCPTGSRPPDMRACSLGPCERTWRWYTGPWGECSSECGSGTQRRDIICVSKLGTEFNVTSPSNCSHLPRPPALQPCQGQACQDRWFSTPWSPCSRSCQGGTQTREVQCLSTNQTLSTRCPPQLRPSRKRPCNSQPCSQRPDDQCKDSSPHCPLVVQARLCVYPYYTATCCRSCAHVLERSPQDPS

SEQ ID NO: 2350 - protein, 329 aa, Homo sapiens
MWGLKVLLLPVVSFALYPEEILDTHWELWKKTHRKQYNNKVDEISRRLIWEKNLKYISIHNLEASLGVHTYELAMNHLGDMTSEEVVQKMTGLKVPLSHSRSNDTLYIPEWEGRAPDSVDYRKKGYVTPVKNQGQCGSCWAFSSVGALEGQLKKKTGKLLNLSPQNLVDCVSENDGCGGGYMTNAFQYVQKNRGIDSEDAYPYVGQEESCMYNPTGKAAKCRGYREIPEGNEKALKRAVARVGPVSVAIDASLTSFQFYSKGVYYDESCNSDNLNHAVLAVGYGIQKGNKHWIIKNSWGENWGNKGYILMARNKNNACGIANLASFPKM

SEQ ID NO: 2351 - protein, 549 aa, Homo sapiens
MASASSGPSSSVGFSSFDPAVPSCTLSSASGIKRPMASEVPYASGMPIKKIGHRSVDSSGETTYKKTTSSALKGAIQLGITHTVGSLSTKPERDVLMQDFYVVESIFFPSEGSNLTPAHHYNDFRFKTYAPVAFRYFRELFGIRPDDYLYSLCSEPLIELCSSGASGSLFYVSSDDEFIIKTVQHKEAEFLQKLLPGYYMNLNQNPRTLLPKFYGLYCVQAGGKNIRIVVMNNLLPRSVKMHIKYDLKGSTYKRRASQKEREKPLPTFKDLDFLQDIPDGLFLDADMYNALCKTLQRDCLVLQSFKIMDYSLLMSIHNIDHAQREPLSSETQYSVDTRRPAPQKALYSTAMESIQGEARRGGTMETDDHMGGIPARNSKGERLLLYIGIIDILQSYRFVKKLEHSWKALVHDGDTVSVHRPGFYAERFQRFMCNTVFKKIPLKPSPSKKFRSGSSFSRRAGSSGNSCITYQPSVSGEHKAQVTTKAEVEPGVHLGRPDVLPQTPPLEEISEGSPIPDPSFSPLVGETLQMLTTSTTLEKLEVAESEFTH

SEQ ID NO: 2352 - protein, 380 aa, Homo sapiens
MLQTLYDYFWWERLWLPVNLTWADLEDRDGRVYAKASDLYITLPLALLFLIVRYFFELYVATPLAALLNIKEKTRLRAPPNATLEHFYLTSGKQPKQVEVELLSRQSGLSGRQVERWFRRRRNQDRPSLLKKFREASWRFTFYLIAFIAGMAVIVDKPWFYDMKKVWEGYPIQSTIPSQYWYYMIELSFYWSLLFSIASDVKRKDFKEQIIHHVATIILISFSWFANYIRAGTLIMALHDSSDYLLESAKMFNYAGWKNTCNNIFIVFAIVFIITRLVILPFWILHCTLVYPLELYPAFFGYYFFNSMMGVLQLLHIFWAYLILRMAHKFITGKLVEDERSDREETESSEGEEAAAGGGAKSRPLANGHPILNNNHRKND

SEQ ID NO: 2353 - protein, 1410 aa, Homo sapiens
MADTDLFMECEEEELEPWQKISDVIEDSVVEDYNSVDKTTTVSVSQQPVSAPVPIAAHASVAGHLSTSTTVSSSGAQNSDSTKKTLVTLIANNNAGNPLVQQGGQPLILTQNPAPGLGTMVTQPVLRPVQVMQNANHVTSSPVASQPIFITTQGFPVRNVRPVQNAMNQVGIVLNVQQGQTVRPITLVPAPGTQFVKPTVGVPQVFSQMTPVRPGSTMPVRPTTNTFTTVIPATLTIRSTVPQSQSQQTKSTPSTSTTPTATQPTSLGQLAVQSPGQSNQTTNPKLAPSFPSPPAVSIASFVTVKRPGVTGENSNEVAKLVNTLNTIPSLGQSPGPVVVSNNSSAHGSQRTSGPESSMKVTSSIPVFDLQDGGRKICPRCNAQFRVTEALRGHMCYCCPEMVEYQKKGKSLDSEPSVPSAAKPPSPEKTAPVASTPSSTPIPALSPPTKVPEPNENVGDAVQTKLIMLVDDFYYGRDGGKVAQLTNFPKVATSFRCPHCTKRLKNNIRFMNHMKHHVELDQQNGEVDGHTICQHCYRQFSTPFQLQCHLENVHSPYESTTKCKICEWAFESEPLFLQHMKDTHKPGEMPYVCQVCQYRSSLYSEVDVHFRMIHEDTRHLLCPYCLKVFKNGNAFQQHYMRHQKRNVYHCNKCRLQFLFAKDKIEHKLQHHKTFRKPKQLEGLKPGTKVTIRASRGQPRTVPVSSNDTPPSALQEAAPLTSSMDPLPVFLYPPVQRSIQKRAVRKMSVMGRQTCLECSFEIPDFPNHFPTYVHCSLCRYSTCCSRAYANHMINNHVPRKSPKYLALFKNSVSGIKLACTSCTFVTSVGDAMAKHLVFNPSHRSSSILPRGLTWIAHSRHGQTRDRVHDRNVKNMYPPPSFPTNKAATVKSAGATPAEPEELLTPLAPALPSPASTATPPPTPTHPQALALPPLATEGAECLNVDDQDEGSPVTQEPELASGGGGSGGVGKKEQLSVKKLRVVLFALCCNTEQAAEHFRNPQRRIRRWLRRFQASQGENLEGKYLSFEAEEKLAEWVLTQREQQLPVNEETLFQKATKIGRSLEGGFKISYEWAVRFMLRHHLTPHARRAVAHTLPKDVAENAGLFIDFVQRQIHNQDLPLSMIVAIDEISLFLDTEVLSSDDRKENALQTVGTGEPWCDVVLAILADGTVLPTLVFYRGQMDQPANMPDSILLEAKESGYSDDEIMELWSTRVWQKHTACQRSKGMLVMDCHRTHLSEEVLAMLSASSTLPAVVPAGCSSKIQPLDVCIKRTVKNFLHKKWKEQAREMADTACDSDVLLQLVLVWLGEVLGVIGDCPELVQRSFLVASVLPGPDGNINSPTRNADMQEELIASLEEQLKLSGEHSESSTPRPRSSPEETIEPESLHQLFEGESETESFYGFEEADLDLMEI

SEQ ID NO: 2354 - protein, 989 aa, Homo sapiens
MTMAGGRRGLVAPQNTFLENIVRRSNDTNFVLGNAQIVDWPIVYSNDGFCKLSGYHRAEVMQKSSTCSFMYGELTDKDTIEKVRQTFENYEMNSFEILMYKKNRTPVWFFVKIAPIRNEQDKVVLFLCTFSDITAFKQPIEDDSCKGWGKFARLTRALTSSRGVLQQLAPSVQKGENVHKHSRLAEVLQLGSDILPQYKQEAPKTPPHIILHYCVFKTTWDWIILILTFYTAILVPYNVSFKTRQNNVAWLVVDSIVDVIFLVDIVLNFHTTFVGPAGEVISDPKLIRMNYLKTWFVIDLLSCLPYDVINAFENVDEVSAFMGDPGKIGFADQIPPPLEGRESQGISSLFSSLKVVRLLRLGRVARKLDHYIEYGAAVLVLLVCVFGLAAHWMACIWYSIGDYEIFDEDTKTIRNNSWLYQLAMDIGTPYQFNGSGSGKWEGGPSKNSVYISSLYFTMTSLTSVGFGNIAPSTDIEKIFAVAIMMIGSLLYATIFGNVTTIFQQMYANTNRYHEMLNSVRDFLKLYQVPKGLSERVMDYIVSTWSMSRGIDTEKVLQICPKDMRADICVHLNRKVFKEHPAFRLASDGCLRALAMEFQTVHCAPGDLIYHAGESVDSLCFVVSGSLEVIQDDEVVAILGKGDVFGDVFWKEATLAQSCANVRALTYCDLHVIKRDALQKVLEFYTAFSHSFSRNLILTYNLRKRIVFRKISDVKREEEERMKRKNEAPLILPPDHPVRRLFQRFRQQKEARLAAERGGRDLDDLDVEKGNVLTEHASANHSLVKASVVTVRESPATPVSFQAASTSGVPDHAKLQAPGSECLGPKGGGGDCAKRKSWARFKDACGKSEDWNKVSKAESMETLPERTKASGEATLKKTDSCDSGITKSDLRLDNVGEARSPQDRSPILAEVKHSFYPIPEQTLQATVLEVRHELKEDIKALNAKMTNIEKQLSEILRILTSRRSSQSPQELFEISRPQSPESERDIFGAS

SEQ ID NO: 2355 - protein, 495 aa, Homo sapiens
MPQLLQNINGIIEAFRRYARTEGNCTALTRGELKRLLEQEFADVIVKPHDPATVDEVLRLLDEDHTGTVEFKEFLVLVFKVAQACFKTLSESAEGACGSQESGSLHSGASQELGEGQRSGTEVGRAGKGQHYEGSSHRQSQQGSRGQNRPGVQTQGQATGSAWVSSYDRQAESQSQERISPQIQLSGQTEQTQKAGEGKRNQTTEMRPERQPQTREQDRAHQTGETVTGSGTQTQAGATQTVEQDSSHQTGRTSKQTQEATNDQNRGTETHGQGRSQTSQAVTGGHAQIQAGTHTQTPTQTVEQDSSHQTGSTSTQTQESTNGQNRGTEIHGQGRSQTSQAVTGGHTQIQAGSHTETVEQDRSQTVSHGGAREQGQTQTQPGSGQRWMQVSNPEAGETVPGGQAQTGASTESGRQEWSSTHPRRCVTEGQGDRQPTVVGEEWVDDHSRETVILRLDQGNLHTSVSSAQGQDAAQSEEKRGITARELYSYLRSTKP

SEQ ID NO: 2356 - protein, 814 aa, Homo sapiens
MRLALLWALGLLGAGSPLPSWPLPNIGGTEEQQAESEKAPREPLEPQVLQDDLPISLKKVLQTSLPEPLRIKLELDGDSHILELLQNRELVPGRPTLVWYQPDGTRVVSEGHTLENCCYQGRVRGYAGSWVSICTCSGLRGLVVLTPERSYTLEQGPGDLQGPPIISRIQDLHLPGHTCALSWRESVHTQKPPEHPLGQRHIRRRRDVVTETKTVELVIVADHSEAQKYRDFQHLLNRTLEVALLLDTFFRPLNVRVALVGLEAWTQRDLVEISPNPAVTLENFLHWRRAHLLPRLPHDSAQLVTGTSFSGPTVGMAIQNSICSPDFSGGVNMDHSTSILGVASSIAHELGHSLGLDHDLPGNSCPCPGPAPAKTCIMEASTDFLPGLNFSNCSRRALEKALLDGMGSCLFERLPSLPPMAAFCGNMFVEPGEQCDCGFLDDCVDPCCDSLTCQLRPGAQCASDGPCCQNCQLRPSGWQCRPTRGDCDLPEFCPGDSSQCPPDVSLGDGEPCAGGQAVCMHGRCASYAQQCQSLWGPGAQPAAPLCLQTANTRGNAFGSCGRNPSGSYVSCTPRDAICGQLQCQTGRTQPLLGSIRDLLWETIDVNGTELNCSWVHLDLGSDVAQPLLTLPGTACGPGLVCIDHRCQRVDLLGAQECRSKCHGHGVCDSNRHCYCEEGWAPPDCTTQLKATSSLTTGLLLSLLVLLVLVMLGASYWYRARLHQRLCQLKGPTCQYRAAQSGPSERPGPPQRALLARGTKSQGPAKPPPPRKPLPADPQGRCPSGDLPGPGAGIPPLVVPSRPAPPPPTVSSLYL

SEQ ID NO: 2357 - protein, 1736 aa, Homo sapiens
MTGCPASSRRRGFGLFFFLRLHRLLLLFLVLRGTLANKLNVPQVLLPFGREPGRVPFLLEAQRGCYTWHSTHHDAVTVEPLYENGTLCSQKAVLIAESTQPIRLSSIILAREIVTDHELRCDVKVDVINSIEIVSRARELYVDDSPLELMVRALDAEGNTFSSLAGMMFEWSIAQDNESAREELSSKIRILKYSEAEYAPPIYIAEMEKEEKQGDVILVSGIRTGAAVVKVRIHEPFYKKVAAALIRLLVLENIFLIPSHDIYLLVGTYIKYQVAKMVQGRVTEVKFPLEHYILELQDHRVALNGSHSEKVAILDDKTAMVTASQLGQTNLVFVHKNVHMRSVSGLPNCTIYVVEPGFLGFTVQPGNRWSLEVGQVYVITVDVFDKSSTKVYISDNLRITYDFPKEYFEEQLTTVNGSYHIVKALKDGVVVINASLTSIIYQNKDIQPIKFLIKHQQEVKIYFPIMLTPKFLAFPHHPMGMLYRYKVQVEGGSGNFTWTSSNETVVIVTTKGVVTAGQVRGNSTVLARDVQNPFRYGEIKIHVLKLNKMELLPFHADVEIGQIIEIPIAMYHINKETKEAMAFTDCSHLSLDLNMDKQGVFTLLKEGIQRPGPMHCSSTHIAAKSLGHTLVTVSVNECDKYLESSATFAAYEPLKALNPVEVALVTWQSVKEMVFEGGPRPWILEPSRFFLELNAEKTEKIGIAQVWLPSKRKQNQYIYRIQCLDLGEQVLTFRIGNHPGVLNPSPAVEVLQVRFICAHPASMSVTPVYKVPAGAQPCPLPQHNKWLIPVSRLRDTVLELAVFDQHRRKFDNFSSLMLEWKSSNETLAHFEDYKSVEMVAKDDGSGQTRLHGHQILKVHQIKGTVLIGVNFVGYSEKKSPKEISNLPRSVDVELLLVDDVTVVPENATIYNHPDVKETFSLVEGSGYFLVNSSEQGVVTITYMEAESSVELVPLHPGFFTLEVYDLCLAFLGPATAHLRVSDIQELELDLIDKVEIDKTVLVTVRVLGSSKRPFQNKYFRNMELKLQLASAIVTLTPMEQQDEYSENYILRATTIGQTTLVAIAKDKMGRKYTSTPRHIEVFPPFRLLPEKMTLIPMNMMQVMSEGGPQPQSIVHFSISNQTVAVVNRRGQVTGKIVGTAVVHGTIQTVNEDTGKVIVFSQDEVQIEVVQLRAVRILAAATRLITATKMPVYVMGVTSTQTPFSFSNANPGLTFHWSMSKRDVLDLVPRHSEVFLQLPVEHNFAMVVHTKAAGRTSIKVTVHCMNSSSGQFEGNLLELSDEVQILVFEKLQLFYPECQPEQILMPINSQLKLHTNREGAAFVSSRVLKCFPNSSVIEEDGEGLLKAGSIAGTAVLEVTSIEPFGVNQTTITGVQVAPVTYLRVSSQPKLYTAQGRTLSAFPLGMSLTFTVQFYNSIGEKFHTHNTQLYLALNRDDLLHIGPGNKNYTYMAQAVNRGLTLVGLWDRRHPGMADYIPVAVEHAIEPDTKLTFVGDIICFSTHLVSQHGEPGIWMISANNILQTDIVTGVGVARSPGTAMIFHDIPGVVKTYREVVVNASSRLMLSYDLKTYLTNTLNSTVFKLFITTGRNGVNLKGFCTPNQALAITKVLLPATLMLCHVQFSNTLLDIPASKVFQVHSDFSMEKDHCEDSAILKRFTGSYQILLLTLFAVLASTASIFLAYNAFLNKIQTVPVVYVPTLGTPQPGFFNSTSSPPHFMSLQPPLAQSRLQHWLWSIRH

SEQ ID NO: 2358 - protein, 811 aa, Homo sapiens
MPKPPKPRNNLEDRHNPGIQGRREHRPGPGRVRAASSPGGSAPRAERRLWGEGWESGAAPHPHSSRVSALRPCGVVGAWVGMGVCQRTRAPWKEKSQLERAALGFRKGGSGMFASGWNQTVPIEEAGSMAALLLLPLLLLLPLLLLKLHLWPQLRWLPADLAFAVRALCCKRALRARALAAAAADPEGPEGGCSLAWRLAELAQQRAAHTFLIHGSRRFSYSEAERESNRAARAFLRALGWDWGPDGGDSGEGSAGEGERAAPGAGDAAAGSGAEFAGGDGAARGGGAAAPLSPGATVALLLPAGPEFLWLWFGLAKAGLRTAFVPTALRRGPLLHCLRSCGARALVLAPEFLESLEPDLPALRAMGLHLWAAGPGTHPAGISDLLAEVSAEVDGPVPGYLSSPQSITDTCLYIFTSGTTGLPKAARISHLKILQCQGFYQLCGVHQEDVIYLALPLYHMSGSLLGIVGCMGIGATVVLKSKFSAGQFWEDCQQHRVTVFQYIGELCRYLVNQPPSKAERGHKVRLAVGSGLRPDTWERFVRRFGPLQVLETYGLTEGNVATINYTGQRGAVGRASWLYKHIFPFSLIRYDVTTGEPIRDPQGHCMATSPGEPGLLVAPVSQQSPFLGYAGGPELAQGKLLKDVFRPGDVFFNTGDLLVCDDQGFLRFHDRTGDTFRWKGENVATTEVAEVFEALDFLQEVNVYGVTVPGHEGRAGMAALVLRPPHALDLMQLYTHVSENLPPYARPRFLRLQESLATTETFKQQKVRMANEGFDPSTLSDPLYVLDQAVGAYLPLTTARYSALLAGNLRI

SEQ ID NO: 2359 - protein, 1079 aa, Homo sapiens
MMTSVGTNRARGNWEQPQNQNQTQHKQRPQATAEQIRLAQMISDHNDADFEEKVKQLIDITGKNQDECVIALHDCNGDVNRAINVLLEGNPDTHSWEMVGKKKGVSGQKDGGQTESNEEGKENRDRDRDYSRRRGGPPRRGRGASRGRECMHGALSKPAVVRGQENGLDGTKSGGPSGRGTERGRRGRGRGRGGSGRRGGRFSAQGMGTFNPADYAEPANTDDNYGNSSGNTWNNTGHFEPDDGTSAWRTATEEWGTEDWNEDLSETKIFTASNVSSVPLPAENVTITAGQRIDLAVLLGKTPSTMENDSSNLDPSQAPSLAQPLVFSNSKQTAISQPASGNTFSHHSMVSMLGKGFGDVGEAKGGSTTGSQFLEQFKTAQALAQLAAQHSQSGSTTTSSWDMGSTTQSPSLVQYDLKNPSDSAVHSPFTKRQAFTPSSTMMEVFLQEKSPAVATSTAAPPPPSSPLPSKSTSAPQMSPGSSDNQSSSPQPAQQKLKQQKKKASLTSKIPALAVEMPGSADISGLNLQFGALQFGSEPVLSDYESTPTTSASSSQAPSSLYTSTASESSSTISSNQSQESGYQSGPIQSTTYTSQNNAQGPLYEQRSTQTRRYPSSISSSPQKDLTQAKNGFSSVQATQLQTTQSVEGATGSAVKSDSPSTSSIPPLNETVSAASLLTTTNQHSSSLGGLSHSEEIPNTTTTQHSSTLSTQQNTLSSSTSSGRTSTSTLLHTSVESEANLHSSSSTFSTTSSTVSAPPPVVSVSSSLNSGSSLGLSLGSNSTVTASTRSSVATTSGKAPPNLPPGVPPLLPNPYIMAPGLLHAYPPQVYGYDDLQMLQTRFPLDYYSIPFPTPTTPLTGRDGSLASNPYSGDLTKFGRGDASSPAPATTLAQPQQNQTQTHHTTQQTFLNPALPPGYSYTSLPYYTGVPGLPSTFQYGPAVFPVAPTSSKQHGVNVSVNASATPFQQPSGYGSHGYNTGVSVTSSNTGVPDISGSVYSKTQQSFEKQGFHSGTPAASFNLPSALGSGGPINPATAAAYPPAPFMHILTPHQQPHSQILHHHLQQDGQDILNFVDDQLGE

(The sequence listing continues in the following parts.)
